United States Patent Application Publication US 2009/0005268 A1 - sequence listing, part 2

SEQ ID NO: 1509 - DNA, 2382 bp, Artificial Sequence
  chemically treated genomic DNA (Homo sapiens)
taatatttttagtaagttattataagattagaaaattaaatattatatgtttttatttataggtgagagttgattaatgagaatatatggatatagggaggggaatattatatattagggtttgttacggggtggggggttaggagaggggtaatattaggagaaatatttaatgtaggtgatgggttgatgggtgtagtaaattattagggtacgtatatatttatgtaataaaattatacgttttgtatatgtaatttaaaatttaaagtataataaaaaaaaatttttttttgtagagatggagttttattatgttgtttaggttggttttgaattttcggttttaagtgatttttttgttttatttttttaaagtgttgggattataggtatgagttattgtgagggtttggttattttagtttcgttaattagtatttatgatagtgtttgatatatgtagtagatattttgtgtttattgagtgatttaatatgttttattataattatatatatatatatatatataaaatttatttgttatggtagattatttgttgtttgtttgtagttagtttaattaatattggggtgtgtttggtgagagaaaattttaattatttaagaggaaagagtttgaacgggttagggatagtgggagaggggagaatggcgatgggagaaaatataggaatgggtagggggtattaggaagaaagggaaaagtaaaagaggtagggaggagaagggaagaggaaattggaggaaaggagaaggagtttatataatttttaattattttgtttatattagagggggttttttttgtaggggtagtagggataggagaggagagagagtttatttaaagttaattttgtttttaaatgtttttttttattttttaataaatgattatattttgaatatttggaaaatattttttttataaaattgttttttaattgggtttttataggtttgattttagttgttttagggtaaagaatttgggtagtgtttatatttacgttgttggataatatttttttattatattagtgagggtgaatgtgtatacgtttagttttttgtttgttattttttatagtatgcgaagaatatttttgatttttagttttgtgcgtttttttttgtttttgttgttgttattaatagttttggagattatggttggtgagtgttttgagtataagaattggttgaggataaggaggagggagaaaggtagggggtaggcgaatggggttttatgtaggttttagataagtgggtgtttgtttttaaggatgacgtgaggaagaggatttttgggatgttatatttagtttatgggagattatagtttgaggttttaggtaaggtattggtttatagagggtagttttataatgttatttttcgttttttattttaggttatttttttgaatatttgggattttataggaatttagcgtgtgttttgtgataaatgttttttttttttttttattgaatgttatgtgtgtttagttagagtttaagttttaggaggttatatattggtttgtttgttttgtgttttagaatttggtagatgttgttaaaagtatttgtgatatgaatttttttgttaatattattaatattaagtgtattttaggggtttttggtattattaagtattttattttagatagttagggagagatgggaatagggatttagaaggttgagggagtttgggatggagttgtttcgtttttgttagtttggtttagtttagggagttttgggttatagaagcgtaggttttaatgggtttttttttttgttttggattttatttgtatttttgttttataggtggttattttttttgttttaattttattataaaattattgtttagatttggatagttttggtgtgaagcgtaggtttttttgaataaaaatttttttttttagtataatagtgataataatatggttaaatttttgggttttttggggaagaaggtatatgttattagtatttggggagaattgatttaaacgttgggagaagtggggcgagattttaggatgtttttttgtgatattaaattttagataaagattagtggtaagtgtggaatggggtgggtaaatagaggtaggtagtaagagaggggagggaagaatatagatggggaggggttttaggtatatttgtgtattgattattggtttaattatagaggtatatgggatttaatgggtaggaaagggtaagtttgggtagaaagaatatagatttttaaatgtgtagagaaatatttgatttattggaggatgatggattttttaaagagtggaggatgatggttttgt

SEQ ID NO: 1510 - DNA, 2498 bp, Artificial Sequence
  chemically treated genomic DNA (Homo sapiens)
gattattatgtttttatttgttttttatattaacgtgtttatagattttatgtatgggggttttattaaaatatggatttttatttaggaggtttggggtttgagattttgtatttttaataggaggtgaatttgttgttagtttatgaagtatatttttgagtagtgagattttttttagaggatattgagtgagttgaattaataatggtagtttttagtaatttagaatagtgtttggtttatataaatatagttattgttttatagttattaatttatttaattttttaatattattatgatgtagattttattatttttatttgatagtggaggaagttgaggtatagaggggttattaatataattagaggatttttgaagttttgagttttgttagtttttttttgattttaggaagggttttttaaggtttatatttttgattttatgtttattttttataggtttaggggtggttttaaggtggattgagtgagtttaattttttatttgtttttttttagttttgtttttgattttgatgatgatgggggtgtttttttattttttttagttttgttttttgtgttaatagtttttagttttgcgttgggttttgttttggttagaatttagttaattttaggggttgagtttagtatgttttagggtattttttattaattttgttttgttttttgatagttcgttaaggttttgatgtatttcggggagtatgatagtaagatgtagttagacgaattttttggtatttttgatatttttttgtaggtttttttagaggttcggtaggatttagaggttatgaggaggaggaaggaggaggaggagcggcgggcgcgtatggaagttatggtgaggggtagtgttaggtttgggattgaggggagacgggtgttatttggggagaatatttttaaattggggtgtgtgggaggagggtagagattgaggaattgaggaatattataggggttggatgttagttttaggagagagaaatttttttttagtttgagggaagagagtggtgtgaagttgggggtttgtatgttttaggtaggaagaaagtggggttaatagatataggtaggtagtatgattatggtttaggagttagtttagggttggggggttgttttggttttagcgtttttttttgagagggtttttatttttggtttttcgttcgtagttgaaggagtagagggaacgtgagcggtggtagcggtagcggaaggttttggttgtaggtagttcgttggaggagggaggagagttcgatgatttggtgtcggttttgcgttttggggaggttttcgataaggatttatgtaagtttaagcgtagtcgtaagcgattagggagttaggttttggaagttattcgggagcgggtaataaatcggttaaattattgatttggggaattagttatataggaggtcgggagatagggattggtgagaatggggttgagtggaggaggtggtgatatttaaattatttggtgtttggtttagagttttgggttgggttttgggatggggggttgtgtgtggttggattaggtgtttttttacgtttattttaaggggttttttttattttttttttatatgattttttttgtgttttggttttaggtattattttgaggttgttttggatggttttaggttaggtaattttaggttgaaggggttttgttttttattttttattatgggtatttatgtgttggtatagaatagttttagatttagattggagaggtttatagttttgtttagagtttttgtgtagtacggggagtaatgatggagggagtttttgagagggaatttggtgagggaatttagattttttttttttaaggggaggtttaatagaatattgatttgggggtaaattttttttttgaatgggaatagaggaggtattatatattttagttagattagttttggtaggttttagagaatagttaatgttggaaggatgatgtagggattaaagttattaggatagagtagtagtgtttgttttttatgttataagttttttggtttttttttgtatgttttaagtattttttttttttttttttatttttatttttattttgtttattaatttatagttttagaagatttattttgggtttttatagttatggtttattattaggtgtttgatgaatttggcgaggggtttaagatagattttatgtattattatattttatgttttttgggtattttttatgtttttattttttggatatttggttattgttgtgaagttagatagtgattttaaatgttgttttggagttttttatagttttttagtagagggtagtatttgaatgtttagttttattttatagttttttattttatataaattgtttaggtttttttattttttttttaatattagttttaaggtagaagttatagtagtttt

SEQ ID NO: 1511 - DNA, 2498 bp, Artificial Sequence
  chemically treated genomic DNA (Homo sapiens)
gaggttgttgtggtttttgttttgaagttagtgttagagaaggggtgggagggtttgagtaatttatatgaagtagagaattatgggatggagttaagtatttaagtgttgttttttgttgaggggttgtaggggattttaaggtaatatttgaggttattgtttggttttataataatggttaggtgtttaggagatggggatatgggagatgtttaaaaggtatgaggtgtggtgatgtatgaggtttgttttgagtttttcgttagatttattaagtatttggtagtgagttatagttgtggaaatttaaggtgagttttttaggattgtggattagtagataggatggaggtgagggtagagaaggaagggaaagatatttaagatatgtagggagaggttagaggatttgtgatatgggaaatagatattgttattttgttttgatggttttggtttttgtattatttttttaatattgattgttttttggaatttattagagttgatttaattagaatatataatgttttttttgtttttatttaagaggaaagtttgtttttaggttaatgttttgttgagtttttttttgagagaagggagtttggatttttttattagatttttttttaggggttttttttattattgtttttcgtgttatataggaattttggataaggttgtggatttttttagtttagatttggaattgttttgtgttagtatatgggtgtttatggtaggggatggggagtagggtttttttagtttggggttatttggtttgaggttatttaaggtagttttagaataatatttggggttagggtatagaaggaattatgtgaaggggagataagaggagttttttaaggtaagcgtggggagatatttggtttagttatatatagttttttattttaggatttagtttaaggttttaaattaagtattaaatggtttaaatattattattttttttatttagttttatttttattagtttttgtttttcggttttttgtgtggttagttttttaggttaataatttagtcggtttattgttcgttttcgggtaatttttagggtttggttttttgatcgtttgcggttgcgtttgagtttgtataagtttttgtcgaagatttttttagagcgtagggtcgatattaggttatcgaattttttttttttttttagcgagttgtttgtagttaggatttttcgttgtcgttgttatcgtttacgttttttttgtttttttagttgcgggcggggggttaaagataggaatttttttagggagaggcgttgaggttagggtagttttttaattttgggttaatttttaggttatggttatgttgtttgtttgtatttgttggttttattttttttttgtttaggatatataggtttttagttttatattattttttttttttaggttgggaagaagttttttttttttggggttgatatttaatttttatggtgttttttagttttttagtttttgttttttttttatatattttagtttgggggtgttttttttaagtagtattcgtttttttttagttttaggtttggtattgttttttattatggtttttatgcgcgttcgtcgtttttttttttttttttttttttttatggtttttagattttgtcgggtttttgagaaggtttgtaagaaggtattaaagatgttaaagaattcgtttggttgtattttgttgttatgtttttcgaagtgtattaaggttttggcgaattgttaagggatagaataggattggtggagagtgttttggagtatgttgggtttagtttttgaggttagttgggttttagttagagtagagtttagcgtaaggttggggattgttggtatagggggtagggttggaagaggtgagaagatatttttattattattaggattagagataaggttaaggagaggtaggtaaagagttgggtttatttagtttattttagagttatttttgggtttgtaaggggtaggtatgaggttaggggtatagattttgggaagttttttttgaggttaggaagaggttggtagaatttagaattttaaagattttttagttatgttaataatttttttgtgttttagttttttttattgttaaatgggaataatagaatttatattatagtggtgttggggggttagatgagttggtggttataaaatagtggttatatttatataggttaggtattgttttgagttattgagagttattattgttaatttaatttatttagtattttttaagaaagattttattatttaaaagtgtgttttatggattagtagtagatttattttttgttagaaatgtagaattttagattttaggttttttaaatgagaatttatgttttaataagatttttatatatgaggtttatggatacgttagtgtgagaagtagatagaggtatggtaatt

SEQ ID NO: 1512 - DNA, 2351 bp, Artificial Sequence
  chemically treated genomic DNA (Homo sapiens)
ggttttgtttttttatgttttagtttttttatcgataaaagaggtgataattatatttattttatagggttgttgcgaagattgaaataataagggtatggggtgttagttattattattttttagaattattattttttagatcgagatttttttgtagtagatggttgatattttaaagttttgtttgttttttatgttataatatggttataagttttttgatagtagggagtatattagtttttgttttttaatatttaagattggtatttagtatatagtagatatttaataagaacgtgttgaatagagttagatagagttgaattttttttttttttgaggagtattttttatttttttttttatttttttttttttttttttttttttttttgtttgatattttttttgtttgtttttttttttattatttttttttttaattattatatttttttttatttttttttttaattattttttttatttttttcggggttttatattgatatgtgcgtttttttttttggttgttttatttttagagtacgtttttattttgttttaaatttgtttttaggtttagtttttttgggaggttttttatggtttagttttgaggatattgaagtattagggttggatgggagttttattatttgttttattttagtttgtttattttttagatgaagatgttaaggtttaaagtattaagaaggttgttttacggttatgtggttaatttgttttagagttaggattagaatttgggtttttttatttttggtttaatgttttttatattacggtatttatagaggtagtggtagaaatatagtaggagattattgaatgtttgttagataaatgaatgaatgaatgaatgaatgttattggaagaggagagttatttagataatattatttgtttttttgtagttttttttgatttgttttatttttgttttattttttatatgtttggggtttttagaggaggtttttggtattgttagttttgtttgtgatttttttattatttttggggagttagcggtttttttttttttttttatttttgtgtgtataaaggttatttttattgttttttgtggaaatatttttagaggatcgagggtattttttgagaataaagtttttttttggggagtgttggttagggtttttgttattgcggtttgttgtttgtttagagttttgtgttttgataagaataaagtgatttcgattggaattttgtagtttgttgttggttttgtttgtttttttgtagatgtgtagttttattttggttttttttttttttaaggaaaggggagttgtttttaattgatggtttttttttaaagtttagttttttttttttttatgttttttttttgtattttatttggtattttttaaatattatttgtcgttgtagttttttgttgaattgttttggttttaattttattttttgtaattggagtttgaataatgagttattttataggaagattgatttgggtattagggtattatttagtttgttattataatagttaattttggttatatgtttagttgtgaaggggaaatgggttagtttgttggagttttttaaagtatggagttggtgagtagggggatggggtattgggttgaggggtagaggtggtagatgggtaggaggaggggttttggtttgttttagtaaaaatgtttttatgtttataatatgatattgtgaaagaaattgtaaggattgaaaatggatattatttttttttaaagggataagaagagtagagtttttaggttgtagatgttaggagtggaaaggttttttttaaataattgagtgagtgagttttaaattaaagagtattttagatttattaatattttaggatgataaaatagtggtgtatttttattcgttatttttatattagatttagttgtagaaattttagtggtttttttatttattttttttatagtattttttataatttaatatttttttttttatttattttaagtgaaatttcgtttattttttttttaattagattgaaaattatatgagggtaagaattatgtttatgttgtttatttgtttttttagggtttgagatagtgtttggtattttatgatatttaatagatattcgttgaatgaagtgaatgagtattagagggtattggttttatggatttgggtgtgggggataaggtatattatgcgtagtggtttttgatttttttgtatacgtacggtggtttttgattttttttatgtttacggtggtttttgatttttttgtatgtgtata

SEQ ID NO: 1513 - DNA, 2351 bp, Artificial Sequence
  chemically treated genomic DNA (Homo sapiens)
tgtgtatatgtagaggagttagagattatcgtgagtatgaggggagttagagattatcgtgcgtgtgtaggggagttagagattattgcgtatggtatgttttgttttttatatttagatttatgaaattagtgttttttgatgtttatttattttatttaacgaatgtttattgagtgttatgaagtgttaggtattgttttaggttttggggaaatagatgagtagtatagatatggtttttgtttttatgtagtttttaatttagttgaggaagagataggcgagattttatttaaagtaaatggaaagggaagtgttgggttgtgagaagtgttatgagggaaataaatgggggagttattgaaatttttgtagttgggtttggtatgggagtggcgagtaaggatgtattattattttgttattttgaaatattggtgagtttggaatgttttttaatttggggtttatttatttagttatttaagagagatttttttatttttggtatttatagtttgaaaattttgttttttttgtttttttgaggaagggtaatgtttatttttaatttttataattttttttatagtgttatgttgtgagtataaagatatttttgttgaagtaagttagaatttttttttttgtttatttgttatttttgttttttagtttagtattttatttttttatttattagttttatgttttagaaagttttagtaggttggtttattttttttttatagttgagtatgtaattaaaattggttgttgtaatggtaaattaaatgatgttttaatatttagattaatttttttgtgaaataatttattatttaggttttaattgtagggaatggaattaaaattagaatagtttaataaggaattgtagcggtagatagtgtttgggaggtgttaggtgggatataggagaaaggtatggagaaggagggggttaggttttggggaggggttattagttgaagataatttttttttttttgagaggagaggaggttagaatggggttatatatttgtaggaaaataggtagagttagtaataagttatagggttttaatcggaattattttgtttttgttaaaatataaggttttgagtagatagtaagtcgtaatgataagagttttggttaatattttttaggaagaggttttgtttttagagaatgttttcggttttttaaagatatttttatagagaataataaaaatggtttttatgtatataggagtgagaggagggagaaaggtcgttgattttttaggggtggtggaagggttataggtaagattaatagtgttaaagattttttttggggattttaggtatgtggagggtggggtaggggtagagtaggttaaaaggagttgtagaaaaataagtagtgttgtttgagtagttttttttttttaatagtatttatttatttatttatttatttatttaataagtatttagtggttttttattatgtttttgttattgtttttgtgaatgtcgtaatgtaaagagtattgggttaagagtgggaaagtttaggttttaattttagttttgggataagttggttatatgatcgtgaagtagtttttttggtattttggattttggtatttttatttgaaaagtgagtagattggaatagaataggtagtgaagtttttatttagttttgatgttttagtgtttttaaagttgagttatgggaggttttttaggaggattgagtttggaggtaaatttggagtagaataggagcgtgttttggagatggggtagttagggaaaggggcgtatatgttagtgtgaagtttcgaagagagtggggaaaatggttgaaagaaagagtaagagggagtataataattagagagagaggtggtggagggaaagatagatagagagagtgttagataaagagagggaagaagggagagagggagatgggagagagaatggaagatgttttttagaagaggaaagaatttagttttgtttggttttatttagtacgtttttattgggtatttattatgtgttaggtattagttttaagtattgaggaataaagattaatatgttttttgttattaaggaatttatgattatattataatatgaaaaataagtaaaattttaaaatgttaattatttattgtaaggggatttcgatttagaagatagtaattttggaaaatagtaatagttaatattttatgtttttattattttaattttcgtagtaattttataaggtgggtataattattattttttttatcggtgaggaaattgaggtatgggggggtaaggtt

SEQ ID NO: 1514 - DNA, 2487 bp, Artificial Sequence
  chemically treated genomic DNA (Homo sapiens)
gaggcgggaggattgtttgagtttaggagttttaggttatagtgtataatgatgattttattggtatatagatgaaaaagaaaaagatatttgaaataaaaataaaaatatagtgtataatgattaggtttgtgaatagttattgtattttagtttaggtagtatagtaagattatattttttatatgaaattttattagaatgaaatttatggtttattatatagatgttgtttattcgttgtaggaaaaattgaattatagatgatttttaaaattattagagtaaattatttaatttatttgtgtatatatttttagattttttatatacgttgtaaaaaaaatagatcgtattattttgttggttttttaagttgttttttgtaagtaatgtattgtgagtatttttttatggttataattattatatataaaagaaaaaaataggttttataataaatagttaaaagatattttgatttgaaattaatgaagaagggttttttggttttgtttttgtattttttgtataatgttgaaattggtaattttgtagtaaatattaatattttttgaggatttgttgaagatgaatgtgataaaaaataagaaattttattttttttattatatagttttaattaatatcgttggttttgtttgagattaagtaaacgttggttttagtgtttaagtttttttttggggttttacggttttgggtttggtatttttgttgggtatttcgtagggttttcgagacgtgtcgcgatttacgggattttacggaagtttttttttatcgtaagttttttggaggtagggaaaggagtcgggattcgagtttagttggttttaagagaagggcggtggttcgtacggcgcgggcggttttgtttattgtagttggggagatgtaggttggtcgttcgggcgcggcggcgggaggggttgcgggtttgtggggcggggtggtggtttcgtgttgttggatttttatggagatgattttgtttttgttttattttttttcggagttgcggttcgagttggcgtattcgatttttattgcgcggttttaagaggagatagtcgttattgtatcgggttttatagttattttttagaggtaaagttcgtggtttttgagtcgttagttttttttttggggtcgttcggggtatatcgtttgggtcggtttagttttttagtgtagtcgtttaggaagattttaagtagcgttgaggggcgtagggtttttttttcgcgattttggagttttttagtagttttggaattaattaagattttgaagaggttttggggagaaataaaatttacgcgtagggtagggtttgtatcgggttatgttaagtaaatttttattttttttagagaattgatttgggatcgaagtaaagtttttgaatattttggaaaacgttgatttttataggtttatattaattgtttttttttttttgatagttttttttttttttttttttatggggtttaaaaatgtagggagtagggtgggggttgggttgggggaatgagggaggaatataaaaaatttattgtgaatataggttttggttataaggatagttttaagagttaatatgttaagatttgatgagtaggataaataaaatagtggtattttaaaatatcgatttaaaaatatcgatgttgtgtttattaataaattttgtatatgtattagaatataatattttgatattattggtgttaaagtttattgtaatttatgtaattgtatttaagtttgttaaagtttgttttgtaggaattgatatttgtgttttatagaaattttaaaaattatgttttataaatatttattttagtgggaggaagaagggttaaggatttggaagttttatagtaatagttgtattttgtttgttatagttttagttttatagttttaaatttataaattagtgagtatatttattatttgaaaatattagtataagtatggtattttttattatcgtttgtaagattaatagtttaggtttttttaaaatacgttattatttttattatttattgtttagtgtgtatttaataaaaattatatattggtatgtagttttatatgttttaaatgtgggatatttaatttaattggaattgttttttatttttgtttttttattaattatatttattttttttttattttcgtttttttgtgcgatttttagaattagatatttttttggaggtatatttaaggaagtaaatttttgataaataaaggaattattgtataatttgtatgtgtgaattgtagaagtacgcgtatgtaggtatatatttttgtcgaggagtagtgttttaatttttaagttattttgtttattgtagtggagaaggattagattaatttgtatttttttagttgtataatagataatttgtggaaatatagttaattgatattattgtt

SEQ ID NO: 1515 - DNA, 2487 bp, Artificial Sequence
  chemically treated genomic DNA (Homo sapiens)
agtaatgatgttaattaattgtgtttttataggttatttgttatatagttggagaaatgtaagttagtttggtttttttttattatagtagatagagtggtttagaaattaaaatattgtttttcggtagaggtatgtatttatatgcgcgtatttttgtaatttatatatgtaaattgtgtaatgatttttttatttattaaaaatttatttttttaaatatgtttttaaaaaggtatttggttttaaagatcgtataaaagaacgggagtagaagaaaagtaagtgtgattggtgaaaaaatagaaatgaaagataattttagttgagttaaatgttttatatttagggtatgtaaaattatatgttagtatataatttttattaagtatatattaagtaatggataatgaaaataatggcgtgttttgaggaaatttgggttattgattttataggcggtgatagaaaatattatatttgtgttggtatttttaaatggtggatgtgtttattgatttataagtttaaagttataaaattaaagttgtaataaataagatgtaattgttgttataaaatttttaagtttttaattttttttttttttattgaaataagtgtttgtagagtatgatttttgaggtttttgtggagtataaatgttagtttttgtagaatagattttaataggtttggatataattgtatgggttgtagtgaattttaatattaatgatgttaggatattgtgttttgatatatatgtaaagtttattaataagtatagtatcggtatttttaaatcgatattttaaagtattattgttttatttgttttgtttattaaattttagtatattaatttttagagttatttttataattaagatttatatttatagtagattttttgtattttttttttatttttttaatttagtttttattttattttttatatttttggattttataggaggaaagagggagagaattgttagaaggaagaaggtagttggtgtgaatttatgaaaattagcgttttttaaagtgtttaagaattttatttcgattttaaattagttttttggaggaggtaagagtttatttggtatggttcgatgtaaattttattttacgcgtggattttgtttttttttagagtttttttagaattttggttaattttagagttgttaagggattttagggtcgcggagggagggttttgcgttttttagcgttgtttagggtttttttgggcgattgtattgggaaattaagtcggtttaggcgatgtgtttcgggcggttttaagaaaaagattagcggtttagaagttacgggttttatttttaggaagtggttatgaggttcggtatagtggcggttgtttttttttggaatcgcgtagtgaaaatcgagtgcgttaattcgggtcgtagtttcggagaggggtggggtagggatagggttatttttatagggatttaataatacggagttattatttcgttttataggttcgtagtttttttcgtcgtcgcgttcggacggttaatttgtatttttttagttgtagtgagtaaagtcgttcgcgtcgtgcgagttatcgttttttttttgaggttagttaggttcgggtttcggtttttttttttgtttttagggagtttgcggtgggagaaagttttcgtggggtttcgtgggtcgcggtacgtttcggaagttttgcgaggtgtttagtagaggtgttagatttaaggtcgtgggattttaagaagagatttggatattgaagttaacgtttgtttgattttaaataaagttagcgatgttaattaaggttgtgtgatgaggaaagtggagttttttattttttgttatatttatttttagtagatttttagaaaatgttaatatttattgtagaattattaattttagtattatataggaggtataaaaataaaattaaaaaatttttttttattagttttaggttaaaatgttttttaattatttattgtgaagtttgttttttttttttgtatgtaatagttatggttatgaaaagatgtttatagtatattatttataaaaagtagtttagaaaattagtagaatggtacgatttattttttttgtaacgtgtgtaagaaatttgggagtatgtatataaataggttaaatggtttgttttggtagttttaaaaattatttgtaatttaattttttttataacgaataagtaatatttatgtaataaattataagttttattttagtaaagttttatatgagaaatgtgattttgttatgttgtttaggttggagtgtagtggttatttataggtttggttattgtgtattatatttttatttttattttaaatattttttttttttttatttgtatgttagtaaaattattattgtatattatagtttagaatttttgggtttaagtaattttttcgtttt

SEQ ID NO: 1516 - DNA, 2392 bp, Artificial Sequence
  chemically treated genomic DNA (Homo sapiens)
gagtattcgttttgtgatagcgtaatgttgggtgttcgcggtcgcgttgggaaaatagacgcgtatatatattttttatgtggtgggtttagagcgatacgaaagttttcgagggcgtcgcgtggggttttgcgggggttttttagaggcggcgggagtgggaagggaaggatagtcggagggatgagggtttggtttggtcgtggggtgggagagaggacgggtgggacgggtagtggggttgtaggtatttgagatgagatgttttgttggagagcgaggttttttttagttagaaaatgggagttattgaaagtttaaaaataaagaaattatatgggtagtttttaatttcggcgagttcgatttcggcgagttttgtgtggtaggagatgggttggtaggagcgggaggaaggttttcgtgagtgattattaggatacgaaggtaggaagtttagatacgttgatttttttatatgaagtagaaaggagggaggattttatttttaatagagtagtgattttgaagttacggattcgataaggattttagtagagtcgagggaggggggaatttagttgtggtttagacgagtatcgtaggtggttgagaggggtcggggtgtaattaggggacgttttgggacggaatttagtagatagtttgggttggagatagggtttgggaacgggggtaggaaacggttaggtattgtttagggagagtttgtggcgggagaagaggcgaatttttgcggtgcggggagttggtgttgaagagaaaggtggagttgggggatttttatagaagatatgggtttggtgggtaggagggtatttcggaattagggggtagagttgttgggaagaaggagggttcgtgtcgtgggaggaggacgaggcgtaaagtttaggaaggaaggatttggagtcgggtcggagttttggagggaggagagaggggaggtcggagttggagcgtttattacggtgatcgttgtttttattaggtattgtttaggggttgtttatttttttttagtttttacgggggatgttgtgatttgataggtgaggagagtaagttttttagataggtcgtttttttaaggtcgtgtagtttttataagtttaaatgtgatttgcgtcgggtaattttaaaatattgtcgtcgttagttttaggtggttttgtagggaggggttttcggtgttttttgtgaattggaatcggaggttgattttttagagtgtgagaagttggcgggtttggcggttggggacgtgttgcggtgtgcgtgtatcgggttgaagatttgttaggttggacgtttttgtcgtgagtggtgtttttagaggtcgcggttttttgtagtagttttgggtagtttgtagtagggaaatttttggtcgagtgggtttagggggagttttggtggttaagtttgttgtgtggtcgtagtagaattttgagtttgggtgagggggaagagtagaagttttttttttatatttttggaggttgggggtgtaagattaaggcgtcggcgttttcggggttttttggttgtgtttttggaggttagagggcgttggaggtcgtaggaagttttttgtgtgacggttttgattttttttattgggaggagatttggagttagttattttttaatattattacgtcggtaacgtttgggttttggaggggatatattcgaattttagttaggtataagtaggtaaggtagagaaatgggggtgtagtttttgggggttcgagagttttagaggagttttttatattttagtgtttagtttttatttgttatggtatttttaggatgggaagggtttttgtcgatgagttttttttgttggtatagttttttttttttttcggaagtcgatttgagtaagtagtcggtttatattatattttttattattttttttttgggttttttttttgattgtttggtatatttgtttcgatatttatttgtaaatcgtaaggttaggtattttggggtttttttttgatcgtgttttcgatattttatagagtgtttgtacgtgagatgtttggtggtttgtgattttatgatggtttcgttttatttttgttatgtagtgtttttgtaaatttattatgattttattttgttatgtggtatttttgtagttttttggagttgttttttttgaggtttttagtgattttttgagggttggttaacgtaaggtgaattttagttttaaatttttttggggttagaattttttgttagatacgtttatagtttttgtaatttttttttgatgttatttgttaatcggtttgtataatgagttatttagtaaatggtgatgtgtttcgtttttgttatagtt

SEQ ID NO: 1517 - DNA, 2392 bp, Artificial Sequence
  chemically treated genomic DNA (Homo sapiens)
gattgtagtaaagacgggatatattattatttattaagtaatttattatgtaagtcggttaataagtgatattaaggaaaagttgtaggagttatgagcgtgtttaataggagattttgattttaggggggtttagggttggaatttattttacgttaattaatttttaggaggttattgaggattttaaggggagtagttttagggggttgtagggatgttatatggtagggtggggttatggtggatttgtagagatattgtatgatagggatggggcgaggttattatggagttataagttattaaatattttacgtgtaaatattttgtgaggtgtcgggggtacggttaggaagaggttttagggtgtttggttttgcggtttataggtgggtgtcggggtagatgtgttaggtaattaaggaggaggtttaggaagggggtagtgaggaatgtggtgtgagtcgattgtttgtttaagtcggttttcggggaaagggagaggttgtgttagtaagggggatttatcggtagggattttttttattttgaggatgttatggtaggtgggaattgggtattgaggtgtggaaagtttttttgaggttttcgagtttttagaagttgtatttttatttttttgttttatttgtttgtatttggttgaggttcgaatgtgttttttttaagatttaggcgttgtcgacgtgatagtgttggaggatgattagttttaggtttttttttagtgaaggggattaaggtcgttatataagaggttttttgcggtttttagcgttttttagtttttaagaatatagttaggaggtttcggggacgtcggcgttttgattttgtatttttagtttttagaaatgtgggaaggaaatttttgttttttttttttatttaggtttaggattttattgcggttatatagtagatttggttattaaggttttttttggatttattcgattagaggtttttttgttgtagattgtttagggttgttgtagagaatcgcggtttttgaggatattatttacggtagggacgtttaatttggtaggtttttagttcgatatacgtatatcgtagtacgtttttagtcgttaggttcgttagttttttatattttgaggagttagttttcgattttaatttatagaggatatcggggatttttttttgtagggttatttggagttgacggcggtagtgttttggagttgttcgacgtaggttatatttgaatttgtgggaattgtacggttttgggaaaacgatttgtttaggagatttgttttttttatttgttaaattataatatttttcgtggggattgaaggaaaatgggtagtttttgggtagtgtttggtgggaatagcggttatcgtggtggacgttttaatttcggtttttttttttttttttttttaaggtttcggttcggttttaggttttttttttttgaattttgcgtttcgttttttttttacggtacgggttttttttttttttagtagttttgttttttggtttcgggatgtttttttgtttattaggtttatattttttgtaggagttttttaattttatttttttttttaatattagtttttcgtatcgtagggattcgttttttttttcgttataaattttttttgggtaatgtttgatcgttttttgttttcgtttttaaattttgtttttagtttagattgtttgttgggtttcgttttagggcgttttttggttgtatttcggttttttttaattatttgcggtgttcgtttaggttatagttgagtttttttttttttcggttttgttgaggtttttatcgggttcgtggttttagaattattgttttgttaaaagtggggtttttttttttttttgttttatgtggaaggattagcgtgtttgagttttttgttttcgtgttttgatggttatttacggagatttttttttcgtttttgttagtttattttttgttatataggattcgtcgaagtcggattcgtcgaagttggaggttgtttatgtgatttttttgtttttaaatttttagtggtttttattttttggttgagaggggtttcgttttttaatagggtattttattttagatgtttgtagttttattgttcgttttattcgtttttttttttattttacggttaggttaggtttttattttttcggttatttttttttttttattttcgtcgtttttaggaagttttcgtaggattttacgcggcgttttcgggagttttcgtatcgttttggatttattatatggagaatgtgtgtgcgcgtttgtttttttagcgcggtcgcgggtatttagtattacgttgttatagggcgggtgttt

SEQ ID NO: 1518 - DNA, 2475 bp, Artificial Sequence
  chemically treated genomic DNA (Homo sapiens)
tggttttggtaatttaattcgtatgggttgtttagagtagggtttttgagggttttgatttgtttgtttttcgttgagtaggattaggttttagagagagtaattataggttgggtgtggtggtttttgtttgtaattttagtattttgggaggttaaggtgggtggattatttgaggttagaagtttgagattagtttggttaatatggtgaaattttgtttttattaaaaatataaaaattagttaggtatgttggtgtacgtttgtaattttagttattcgggaggttgaggtaggagaatcgtttgaattcgggaggtggaggttgtagtgagttaagattgcgttattgtattttagtttgggtgatagagagtttattttaaaaaataaataaataaataaataaaagagagtaataattttttttagagtagtagttgttattgggatattggaagtagaggttgtaatttttatttatatttagggttttttttttttttttttaaaaataagaaattaattaaattttaatatatatatttataatagtatatgtatgtgatttgtaagtaaatatgtatgtattagaggtatagttttaaaaatttgttattgatagtagcgtatgtttaaaaatgtttggggattgatttagaaaatgtgttttaagatattaatttatatttaaaattattagtttatttgatgtttagtagaatggaaaataaatgtgtaatatgttatatatggtgtttatattttagttgtttgttttttttttatttttatgtttaatagtttttatgtttattttaggtttggagtatgatgtttcgtatgttaatttaaaataaattttttaaggaatttagatttgtaatgtaatgattttgaatgtagattttgggttattattttttgggaatgtttttattatattatgaaattgtatttattgttgtttatatatatatttttgataattaagtaaatttttgaatattttttttaagatttaaaatagtaaaatgaaatttaatattattataaagttattttttggtaaataatttaaggaagataattttcgtatgtattttttttttaatagtttaggttaggtttttatatatagttttttttaaaatatttgagtgtaattatttagtaggttatcggttgtaattttgagaaataaagtagtataatgtgatttgtatagagaatgattttatttattacgtttttaattatttatatttgttttaaattaaaatgttttggttgaacgtaggtattcgaaggaaggtttattttagtttagttttgtttttaatgtttgtgatatatagagtatgtgtgtttagggagaggttgcgtttagtgaagtagttgggtttttatttttatagggcgatattttaataggattttagttttttggggagttattttattgtgttattgttgttgttattatgtagggtaatttttttttttttttatttatgattttattttggtttgggtatttttatttgttttgtttatcgtttttttttgggttttttgttttttacgagaattattaagtaaaataagaataaaatgagttttgtaaaataaggtattttgtggatatttgtgaggtaaaaagttgttttttagtagtttgtggtagagtaaattttttttggtttgattattgatttatttgttgttttttgacgggttgttttgaggggttgtgagggtaaggttggttaggttagttgtttcgatttattatttgatattgacgttttatttattttttttatttcgggttatgatataaatattaggttttgttttttttgttgattagtgattggttattagtcgagaagtttgtttttatgaaattttgtttttattgaattttagaatagttttggttaaagttgttatataaaaaattaaattttttgaatatgttagttttgtgttgagattattggtttattttttggttgtataaaattagtttgttttatttattagggggttagttcggattttaagtagatttgtagagaggatttggtggatatttagatgggtatataaatgtgtttaggaaatgttgagtaaatatgaatgatttgtttttttagggttgatttatttatggagttaagagaatatgttttgtttatgagtaaggatatttttttttttataaatatagattaattttttttagtgaaaatattaaagtataaaatatatttttagttttaaggatgatattaattatagaatttatgattatgtaagtttttttttttattataagtattaaattaattttggtttttaattttaaaatgtataaaattaattataaattaggttttatttttattttgggatatggaattaagtatattagaattgtagagatatatgtggttatgtttaattt

SEQ ID NO: 1519 - DNA, 2475 bp, Artificial Sequence
  chemically treated genomic DNA (Homo sapiens)
aggttagatataattatatgtatttttataattttaatgtgtttaattttatattttaggataggaataaagtttaatttatgattgattttatatattttagggttaaaggttaaagttaatttaatgtttatggtaggaagaaaagtttatataattatgaattttatgattaatgttatttttgaaattaaaaatgtattttatgttttgatgtttttattggaaaaagttgatttatatttgtgagaaaggaagtatttttgtttataggtaaagtatatttttttagttttataaataaattaattttaaggaaataggttatttatgtttatttagtattttttgaatatatttatgtatttatttaaatgtttattaagttttttttgtaaatttatttggaattcgagttgattttttggtggatgggatagattggttttatgtagttagaagatggattaataattttagtataaagttggtatgtttaagagatttaattttttatataatagttttagttaaagttattttaggatttagtggaagtagaattttatgaggataaatttttcgattaatggttaattattaattagtagggagggtaaagtttggtgtttgtgttatggttcggagtggagggggtgagtggggcgttagtattaaatagtaaatcgggataattagtttggttagttttgtttttatagttttttagagtagttcgttaggaggtagtagatggattaatggttaagttaggggggatttgttttgttataggttattggaaagtagttttttgttttatagatgtttataaaatgttttattttataagatttattttgtttttgttttgtttgatggttttcgtggagagtagaaaatttaagaggaagcgatggatagggtaggtggaaatgtttaagttaaggtaaagttataggtgggaaaggagggaggttattttgtatagtagtagtagtagtggtatagtgggatggttttttagggggttaaggttttattgagatatcgttttatgagaatgagaatttagttattttattgaacgtagtttttttttgggtatatatattttatgtgttataagtattgagagtagaattagattgggatgagttttttttcggatgtttgcgtttagttaaagtattttgatttgaggtagatataaatagttggagacgtagtgggtaaaattattttttgtataaattatattgtgttgttttgttttttagggttataatcgatgatttgttaaataattatatttaagtattttggggagaattgtatataggaatttagtttgaattattaagaaaaaaatgtatacgggagttgttttttttaaattatttgttagagaataattttataatgatattgggttttattttattgttttgaattttagaagaggtgtttagaaatttgtttaattattagaaatatatgtgtgaataatagtgaatgtaattttatgatgtaatggagatatttttaagaaataatagtttaggatttgtatttaaaattattatattataaatttaagttttttaggaagtttattttgaattgatatacgaagtattatattttaggtttgaagtagatataaggattgttagatatggagataagaaaagaataagtagttaagatataaatattatgtgtggtatgttatatatttattttttattttattaagtattagataaattagtggttttgaatataaattaatattttgaggtatattttttaggttagtttttaaatatttttgaatatgcgttgttgttaatgataagtttttgaaattgtatttttaatatatgtatatttatttataaattatatatatgtgttgttataaatatgtatgttaaagtttaattgattttttatttttagaaaaaaaaaaaaaaaattttgaatataaataagagttatagtttttatttttagtattttagtggtaattgttgttttgggagaggttattatttttttttgtttatttgtttgtttgttttttgagatggattttttgttatttaggttggagtgtagtggcgtaattttggtttattgtaatttttatttttcgggtttaagcgatttttttgttttagtttttcgagtagttgggattataggcgtgtattagtatgtttggttaatttttgtatttttagtagagatagggttttattatgttggttaggttggttttaaatttttgattttaagtgatttatttattttggttttttaaagtgttaggattataggtagaagttattatatttagtttataattattttttttggagtttagttttatttagcggaaggtaaatagattaaaatttttagaggttttgttttgaataatttatgcgggttgggttgttagaatta

SEQ ID NO: 1520 - DNA, 2437 bp, Artificial Sequence
  chemically treated genomic DNA (Homo sapiens)
tttttaggtattgaagaagtggttgtgaatgaaaatagataaaattagattgagataatggtatgtaaagtgtgatatgaatatgggggttaggttcgtttaatgtttttgttatttttatatgggatgattttaataagatatttatagttaagttgttagaaataaaggtttttttttttttttttagttattttaataaatttgggttatttattattgttgtttagtttgtattgagtagttttagttaagtgagttatggttatattgaaatatttatttggttacgaattgagtgaaggtgggaggttttttttgttaatttttttttttttttaatatattttttggtaatttttacgcggaaaattttattttattataggtttttttttttttattttttagaaggcggtggttttatttaggagagggttgtagatcggggttagttttagggttttcgcggtgttatttttttttcgcgagggtttttgtcgtgtttcggttcgtcgttgggaggcgttgcggtatcggcgtaggagtcgtcggtaggggtggggcggggtcggcgggacggggtagagggttttgcggcggcggacgcggcgggttcggttataggtaattcgtaggagtcgagagcgttgtttggcgcgcgggcggttggaggtacggcgttgggcggcgtcgaggttttggggtcgtcggagttagcgggagttagttttcgttttcgtttttcgttttttatcgtgtcgtcggttttggtttttgcggcgcggacgttcggcgcgggagagaaaggtattaggcgatttcgtcggttttttgggattttcgtttatatcggggtgggcgttttaggtcggggaggacgttgtcgggggaagggggcgttgttttttcggtattttaggatcgtcgattgttcgcggaggagattcggatatcgcgtttcgttttttggtttgcggttttcgaaaacgttcggcgcgagggggttttttcggggcgttttttttttcgtttggtattagttgtttttttggaatatggaatttcgggcgagggaggtggagaatttttttttggggttcgtttttcgtttttttgttcgtttgtagtttgaaggaagggcggtgggggcgggggttcgagtatttcgcggtttgcggcgcgtaggagggtaggtttttggtttgcggtcgttttcgaatgatttcgttttttttcgttttggacgatagtattagggtgtagtcgtaggagaggggtcgatattttttaggagttttatcggcgaagttttagtaagtggtatttttcggggtttagagagtcggcgtgttgtttggtttgggtttagatattagtttatttaagtttattttgggtttttaagtgtgttgttttcggtagatttcggggattggaggggaagtgtagtattatttgtgatttaagagggatttgaatgttttaaagttggttaagaatgtttttttcgcgaggtagtatgagatgggttacgtggtagtaaagagttatttcgggttcgtgagatggagttttgattttattatttgttaggtgtgtgattttggaaaatttatttttttaaattttagtttttagaattttaaattgtaggtattgtatataatttcgtagtattgtgtttatgtagtgaagtgatgggaatgaaatgtttggtattgtatttttgtgtgttagatattttttgcgaatttgttggatgttgaatttatttatgtttaggttttgttaggttagtgtaagtggaaagaatttgggtaatgaagataaatatatttgggtttaaggtggttttatttatggtatattgattgggggttttttatttttaaaatattaatagtagttttggcggggtttttgttgttgttgttttgagatagagtttcgttttgttgtttaggttgtaagttttgatttttttagtttaatcgatttttttattttagtttgggattattatatttggttaattttgaatttttttattttattagagatagagttttattgtgttgtttaagttggtttcgaattttttttgttttagttttttaaagtgttgggattataggtgtgagttattgtattggtttgtagttttgtttttgagtgtagtaggtgtgtttatatcgatatatgttatattttgttatttttagtatttgtttagtatatggtaataaaaaattttttaaaaattagggatataaattaaaattggggagtattttttgttttttaggttatattggatatgggggaagggtagaagagggatgaagaggaattaaagagattagaaaataattagtcgtagtgttgggaggtataaattaatggtaatttttaaaaatgtgaatttattaatttt

SEQ ID NO: 1521 - DNA, 2437 bp, Artificial Sequence
  chemically treated genomic DNA (Homo sapiens)
ggagttaataaatttatatttttaaaaattattattggtttatattttttaatattgcgattagttgttttttggtttttttaatttttttttattttttttttattttttttttatgtttagtatgatttagagggtagaaaatattttttaattttaatttgtatttttaatttttaaaaaattttttgttattatatgttaaataaatattaaagatgataaagtgtaatatgtatcggtatagatatatttattatatttaagaataaggttgtagattagtatagtggtttatatttgtaattttaatattttgggaggttgagataggaggagttcgagattagtttaggtaatatagtgagattttgtttttagtaaaataaaaaaatttaaaattagttaggtgtggtggttttaggttgaggtgggaagatcggttgagttaaggaggttaaagtttatagtttgggtaatagagcgaaattttgttttaaaataataataataaaaatttcgttaaggttgttattggtgttttggggatgagaaatttttaattagtatattatggatgggattattttggatttaggtgtgtttgtttttattgtttaagttttttttatttatattggtttaatagaatttaagtatgaatgaatttaatatttaataggttcgtaaaaggtgtttaatatataagagtataatgttaagtattttatttttattattttattgtatgaatataatattacgaggttatgtataatatttgtagtttagagttttaaaaattaaggtttaaagaagtgggttttttaaagttatatatttaataagtggtggagttagaattttattttacgggttcgaagtggttttttattattacgtgatttattttatgttatttcgcgggggaaatatttttgattagttttgagatatttaagttttttttgggttataaataatgttgtattttttttttagttttcgagatttatcggaagtaatatatttaaaagtttaagataagtttgggtgagttgatgtttggatttaaattagatagtacgtcgattttttggatttcgggagatgttatttgttgaggtttcgtcgatggggtttttgaggggtatcggttttttttttgcgattgtattttagtgttgtcgtttagggcggggagggacggggttattcggaggcggtcgtaggttagggatttatttttttacgcgtcgtagatcgcggggtattcggattttcgtttttatcgttttttttttaaattgtaagcgagtaggagaacgagggacgagttttagaagaaagttttttatttttttcgttcgaagttttatattttagggaggtaattgatgttaggcgaagagggaggcgtttcggggggattttttcgcgtcgggcgttttcggaggtcgtaggttagggggcgaggcgcggtgttcgggtttttttcgcgggtagtcggcgattttggggtgtcgagggagtagcgtttttttttttcgatagcgtttttttcgatttgaggcgtttatttcggtgtaagcgggggttttagggagtcggcgaggtcgtttggtatttttttttttcgcgtcggacgttcgcgtcgtagggattaaggtcggcgatacggtggggggcgaggggcgaagacggggattggttttcgttggtttcggcggttttagggtttcggcgtcgtttagcgtcgtgtttttagtcgttcgcgcgttaggtagcgttttcggtttttgcgggttatttgtggtcgagttcgtcgcgttcgtcgtcgtagggttttttgtttcgtttcgtcggtttcgttttatttttgtcggcggtttttacgtcggtgtcgtagcgttttttagcggcgagtcggggtacggtagggattttcgcgagagagaggtggtatcgcggaggttttggggttggtttcgatttgtagtttttttttgggtggggttatcgttttttgaagagtgggaggaagggggtttatagtagggtgaggtttttcgcgtgggggttgttaggaagtgtattgggaggggaggagaattagtaggaggaattttttatttttatttaattcgtggttaagtggatattttaatataattatagtttatttaattggggttgtttagtataaattgaataataatgatgaatgatttagatttattggggtagttggagaggggaaaggaagtttttatttttaatagtttgattataagtattttgttggaattattttatatggaaatggtaaaagtattgagcgagtttgatttttatatttatattatattttatatattattattttagtttggttttgtttatttttatttatagttatttttttaatatttagaag

SEQ ID NO: 1522 - DNA, 2308 bp, Artificial Sequence
  chemically treated genomic DNA (Homo sapiens)
gaggcgggtggatttttgaggttaggagattagtttggttaatatggtgaaattttgtttttattaaaaatataaaaattagttaggtgtggtggcgggtatcggtagttttagttatttgggaggttgaggtatgagaattgtttgaatttgggaggcggaggttgtagtgagttaagatcgtgttattgtattttagtttgggtgatagagtaagatttcgttttaaaaattaaataaaataaaagtatgatgatatttataataataattttttaaatttttataatatttttttattttaatatataaattaattttttaaaagagaaaaatagattataatttttttttttaagttaggaagttttagaaaaatttaatgatttttaagaagtagtaatgttttataaataaggaggagattaattcgagaaataatttagtaataataagggtttttaggaaagggtgagagatggtattgagttagagattttagggtttttgattattattatttttagagttgtaatagatttggtttaggtttttaagttatggtgtattttatttgtaaataatatttaatagtgatgttgttaaatagtagtataaaaatgtggtaagatttttataatttataggttttgttgttgtggtaatatgaaagtgaaaataaaagtatattgttttataattgtatagttttttttttttgtttttagggtagtagatgttaattgaatgtttagatattaataagaatagaaaatttaatatatagatgttgttattgatttgtgatgtttattaaatatttataatttagaggaagtatttttttttttttattggtttgaatttattaatttgattattaaataatgtagtagttttattatttttattattgggatttttttttttgattttatttgttgattgtatttatttatatataatttaggttttttttgaatacggagaaagatatacggtatttgttgtttagttagaagttattttaagttattttaaaatgagttatgtcgtttagtattttatttttgaaaattaagagaatcgttttttagttaaattgaaaatagtaaatatttagtggtttaaatttatatatgggttttaaagtcggggagattattttaggatgaaataaaattttaagtaaaatgaattttaaaataattaatttaagataagttgtttataggagttttatttcggttagtttaaatgtaagtggttgtttgtatttgatttattttttatgagatgttataattattgattttttaaatttttaattttatggttattttttaaatttttgttttatatttattttaaaatagaatagttattataaagtttaggataatttaatttttaaaagtagttttaagataagttaataagagggaaaaaaataaagttagagaattttgttattttttaattatttattttatattatgtggtaaagaaattatttttaatttttattttatataaattttattgttttatttttttttttttagggagagaattttttatttgtgttggttattttagatgattattatagatatatttttttttaagtaatatattttatttataaatataataatgaaaagttttttaatagtttattggtaattttaaagttgtaagtttcgaatattataaatcgtattttatatttttttatagggtttgggggagtgtttgttatatttattagaaggtaagaagttaagtaagaagagagaggagaggaaggaggtaggaaaaagtaagttagagttgtagtaatagtaggagagggcgggttggttgtgtttttataagggagagagaaatttaatatatatatatatatatatatacgtgtacgtacgcgcgcgtatatatatatatatatatatacgttataggtattgatggaggtagtagtttggaggaggtgggggtagggaaaggaatattatatgatatagtaaggggaaaatatatttaagtttttttagttgttgttaggggaaatattttagtagagagaagtagttggaagattttattagattttttatgttttgtttgttttttcggaaatttaaattttgagtatattattttcgttgtaaatgtagttttttattattgttgttttttttgggtagagattagttttttttattttttgggttatttttagtgtggtggaagatttattttttttttttttttttttttgtattagtttaattagtgttaggtt

SEQ ID NO: 1523 - DNA, 2308 bp, Artificial Sequence
  chemically treated genomic DNA (Homo sapiens)
aatttgatattaattaagttagtgtaagaagaagaagaaaaagaagatgaattttttattatattggagataatttaagaagtaagaaaaattgatttttatttaaaaaggataataatggtgaaagattgtatttgtaacgggggtaatatatttagagtttaaattttcgaaaggataaataaaatatggagagtttaatgagattttttagttgtttttttttgttaaggtattttttttggtaatagttagggaagtttgggtgtattttttttttgttgtgttatatgatgtttttttttttatttttattttttttagattgttgtttttattagtgtttgtggcgtgtgtgtgtgtgtgtgtgtgtgcgcgcgcgtgcgtgtacgtgtgtatgtgtgtgtgtgtgtattgggttttttttttttttgtaagaatatagttagttcgtttttttttgttgttgttgtagttttgatttgtttttttttgtttttttttttttttttttttttttgtttagttttttgttttttggtaagtatgataaatatttttttaagttttgtgagaaggtatagggtgcggtttgtggtgttcgaaatttgtaattttgagattgttagtgaattgttggagaattttttattgttgtatttataaataaaatgtgttgtttagggagggatgtgtttgtgatagttatttggaatagttaatataagtgaaaagttttttttttggggaggggaaaataaggtaataaagtttatataagataaaagttagaaataatttttttgttatataatataaaatggatgattgaaaagtaataaagttttttgattttgttttttttttttttgttaatttgttttgaggttatttttgggaattgaattgttttgggttttataatgattgttttgttttaaagtaaatgtggaataggagtttaaagaatagttatggaattaagaatttaaaaaattaatgattgtggtattttatgaagaataaattaaatataaatagttatttgtatttagattaatcgaagtaaaatttttatggatagtttattttaaattaattattttgaagtttattttatttgagattttattttattttaagatagttttttcgattttaaaatttatgtatggatttaagttattaaatgtttattgtttttaatttgattgaaaaacgatttttttgatttttaaggatgaagtgttaaacggtatgatttattttagaatagtttaaaataatttttggttggatagtaggtgtcgtgtgttttttttcgtgtttaggggaggtttaagttatatatagatgagtgtaattaataagtgaggttaggaaaagaaattttagtgatgaaaataatgaaattgttgtattatttgataattaagttggtgaatttaaattagtgaaagaaaaaaagtattttttttaagttatgagtgtttggtgagtattataagttagtggtaatatttgtgtgttgaattttttgtttttgttggtgtttgagtatttaattgatatttattgttttgagaataggaaaaggaagttgtgtagttgtagaatagtatgtttttgtttttatttttatgttattataatagtaaaatttgtgaattatgaggattttgttatatttttatgttgttatttagtagtattattgttaaatattatttataaataaaatgtattataatttaaaggtttaaattaaatttattgtaattttagaagtggtaatagttagaaattttggaatttttgatttagtattattttttatttttttttaagggtttttattattgttgaattatttttcgagttggttttttttttgtttatgaaatattgttattttttaaaaattattaagtttttttagagttttttgatttagaagagaaagttgtaatttgttttttttttttaaaaaattggtttatatattggaataaaagagtattatagaaatttaaggaattgttgttataagtattattatgtttttgttttgtttagtttttgagacgaagttttgttttgttatttaggttggagtgtagtggtacgattttggtttattatagttttcgttttttaagtttaagtaatttttatattttagttttttaagtagttgggattatcggtgttcgttattatatttggttaatttttgtatttttagtagagatagggttttattatgttggttaggttggttttttggttttaaggatttattcgtttt

SEQ ID NO: 1524 - DNA, 2324 bp, Artificial Sequence
  chemically treated genomic DNA (Homo sapiens)
tttattaagaggatataataattataaatgtatatatatttaatattaatgttttaaagtatataaagtagaaattgatataattaaaataagcggataattttataattatatgaagagatttttaatttttattttttagtaattgataaaaaaatttaaaaaaggtataaatgatttaaagttaattgttatttatagaatattatatttaatatttgaaaaatattgttttgaagtatatatggtattaagataagattatgtatgatcggttataaaaattaaataatatttttaaataatttttgggttaaagaaaaaattagaaagaaaatttgaaaatattttgaatttgaatttaaattttaaatattgattttgatatttaaatatgtttgattttggataattaatttggattgttgagtgttagtttttttattaataaagtggagatattaatttttattgggttattatgaagattaaatgaaataatgtatataaagtatttagtataatttttggtataataataatatttaatgttattgtttataatgagaagttattattgagggtatatgggtatatttatagggttttttgttattttgattattttgtttttgtttttttggtgggggagaatttttagttagttggatggtattaataagatttttttttttttttttttattttttgagatattgttttttgttatttaggttggagtgtagtggcgtaattataatttattgtaggttcgaatttttgggtttaaatgatttttttgttttagttttttaagtagttggtattgtaggaacgtgttatatttagttaatttttttgatttttggtagagataatgttttgtttttataaatgttgtttaggttggtttcgaatttttaagttgaagtgatttttcggttttgggtttttaaaatgttaggattatagatgtgatttattgtgattagttgaatattttgttttttaatattatttaagaagattacgttgtattattttattttttatatttttttgttgataaatgattttattttatttgatttaattttatttttttattgtgtaatattattgatagatagtggatttacgtaggtatataagagatttatgtattttttgaatttaaattttgagttgaggacgatgtttttatttttaggtttttattcggtttgggagtttgtttttagtattattgttgataagacgttagtagtatatttaaaatttgttatttgagattttgattttattatattggttttttattttttaaatattaaaaaataatttgggaaaatgaggaattatgatttttttttatttttttttttaatttaattgtataaatttagtagtgatttttatgtattttgttttttgaagtatttttttttaaacgtttataataataattattttataggaatattggtgtttgattaattattatttgttaaaagatttaggatttttagttggaaaggggattggggatgtatatagtattattttggagagttttgtattttgttatattgaatggagttagtgtttttgtgtaattaaattaattatattgttagggtttacgttgtaattaatgaaattcgtgtagattaaatgaagtgattagtttattatttttagattgaataattaaatttgaagagttttagtgttttttttaatagtttttttttttttagatgattattgatattttggtttttaattttattttattgtgttaattcggtgtgtgtttatttgttttatgttatgtagaatttattataatattaaaaatgttgaatttttataaatgtatttttttaaaagaattaaggtttattttagaaataaatttaatataatagaaaggtaaggggaatggtatgtattttattaagggtttgtattgtgttaggtattgtgcgggtattttatttatttaattttatttaatttttttttagttatatagtgaagttggtttaatttttattttacggatgaagaaagtagtttaaggaggtaaaattatttaaggttataagtaagtaaggggtagaggtagtatttgaatttaagtttttttgattttaaaatttatattttttttatgagtagtagaggtttgtttttgtgttttatttaagaaattatgttattttgaggtatggggatatatttttagagttttgttgtgtttttgtagttttcggtatagattttttaatttgtttcgagcgaggatagttttgttgtgt

SEQ ID NO: 1525 - DNA, 2324 bp, Artificial Sequence
  chemically treated genomic DNA (Homo sapiens)
atatagtagagttattttcgttcgaagtaaattggagagtttgtgtcgggagttgtagagatataataagattttgaaggtatgtttttatgttttagaataatataattttttgaatggggtatagagataggtttttgttatttatggaaagagtgtgaattttagaattagagaggtttgggtttaaatattgtttttgttttttgtttgtttgtaattttaaataattttatttttttgagttattttttttattcgtaaaatggagattagattagttttattgtgtggttgggaaaaaattagatgaagttgaataggtaaggtattcgtatagtatttgatatagtgtaggtttttgataaaatgtatattattttttttatttttttattatgttgagtttgtttttaaggtgggttttagtttttttaaaaaaatatatttgtaaagatttagtatttttggtgttataatgaattttgtatgatatgagataaatggatatatatcgaattgatatagtgaagtgagattgagaattaaaatgttaatagttatttgaaaaaaaggaagttattggaaaaagtattgaagttttttaggtttaattatttaatttaaaaataatagattgattattttatttggtttgtacgggttttattaattatagcgtaagttttagtagtgtggttaatttgattatatagagatattagttttatttaatatagtaagatgtagagttttttaagatgatattgtgtgtatttttaattttttttttagttgaagattttaaattttttgataaataataattaattagatattagtgtttttgtaaggtagttattattataagcgtttaaaaggagatattttaagaaatagagtatatgaaaattattgttgaatttgtataattgagttaggaagaaaaatagaagagaattatggttttttatttttttaaattgttttttgatatttgggaaatggagaattagtgtgatgaagttaaagttttaaatggtaggttttagatgtgttattggcgttttgttaataatagtattgaagatagatttttaggtcgaatgggggtttgaggatggaagtatcgtttttaatttaaggtttggatttaaaggatgtataaattttttgtgtgtttgcgtaaatttattgtttgttagtaatgttatatagtaaggagataaaattaaattagatagggtgggattatttattaataaagagatataaagagtagaatgatatagcgtggtttttttgggtagtattgaaagatagaatgtttagttggttatagtgggttatatttgtaattttagtattttggaagtttaaggtcggaggattattttagtttgggaattcgagattagtttgggtaatatttatgagagtaagatattgtttttattaaaaattaggaaaattagttgagtgtggtacgtttttgtagtgttagttatttgggaggttgaagtaggaggattatttgagtttagaagttcgagtttgtagtaagttatgattgcgttattatattttaatttgagtgatagagagtaatgttttagaaaataaagagagagagagagagattttattaatattatttaattggttagagatttttttttattaaaaaaataaagatagaatgattaaagtagtaggagattttgtaagtgtgtttatatgtttttagtaatggttttttattatgaataatgatattaagtattattattatgttagaagttatgttaagtgttttatatatattattttatttaatttttatgataatttagtgaaggttaatatttttattttattggtgaagaaattgatatttagtaatttaaattggttgtttaagattaagtatatttaaatgttaaaattaatatttgaaatttgaatttaaatttaaaatatttttaaattttttttttaattttttttttgatttagggattatttagaagtgttatttaatttttatagtcgattatatatggttttattttgatattatatgtattttaaaataatgttttttagatgttgggtgtagtgttttataagtaataattagttttaaattatttatgttttttttgaatttttttattaattgttgagaaatgagagttaaaaatttttttatataattgtggaattgttcgtttattttaattatgttaatttttgttttatgtattttgaagtattaatattaggtgtatatatatttatgattattatgtttttttgatgaa

SEQ ID NO: 1526 - DNA, 2389 bp, Artificial Sequence
  chemically treated genomic DNA (Homo sapiens)
agtttataggtaaatgttttatattttattattagttggtttaatttttttgtaaatttttgtttgaaggaatatattaagttataaattatttagtgggaatttattttgttaaagtagattatattttttgaagtagggatgttggattaattaagttttgggtatttggaaagtgaaggaattttgggagagtgattgtgttgaagaaatgataggatgaagagtaaagataattttgaaaattttgaatttttatagtgattttattatttgtgatttttttttattttttttttttttttttttttttttttttttttttttttgagatagagttttattttgttgttaggttggagtgtagttgtgtgattttggtttattgtaatttttgttttttaggtttaagcgatttttttgttttagttttttgagtagttgggattataggtacgtgttattatgtttagttaatttttgtattttttagtagagacggggttttataatgttggttaggatggtttcgattttttgattttgttatttgttcgttttagttttttaaagcgttgggattataggtgtgcgttatcgtattcggttattatttgtgattttttatttaatttttgtaaattagtattattgagtttttaaagaaagagtattttatgaaggaggtaggttgaggtagggcgttagagaatcgaagaatgggtattttcgtagattattaagtgtaattagataagaatagataaatttgaatatttttaataaattttaatatgtaattatgtaaatgtatgttagaaaaaaaatttaggtaatatgtttttgagtattattattttttagaagatgtaggtgggtttgggagaatattggggtaggttaagttatatagtttaatttttttttaagtttatttgaatatttatttagtattttttgtatataaagtttaagtaaaatttatttagtttttgtattgttattttgttattaaattttttttttgggttaaattttttttttagatttgtagttattgttttttttgatttttataaagtaggaaatgtttatgtattgttaagtttttagagttttcgttgtttatagtaattaaatgagatgattgttttagttttaagtattggttttagagaagggtagagtatattttgaatcggaaaattaaattaaataaaaataaatagttacgtgaggtatgtgagatgttagtttttttttggagaaatgtaagatagaaatttgattgtaaagttttatttttgaatgaaggtttttgcgatttgtttttagggttatattgttttttttttggattattgggaattatagttttagtaaatttagttttttttgatttggtgataaaggacgtaaattaaaattgtattaagttttttttgattttttaaagttattttaaaatagtttgtaaataataaagttattttttaaaatattttttttaaattaattataaattattttgaatagtttgaatatttgttttaaatgatgtttaggatgttttataatatttggaggatagcgttatatttgagagttgattattttaaattggtttttttaagtaattttttacgtgatttgtttgttgtgtttgtttatacgtagtagtttttgaattgttgttttaattatattgattgatttaataaaagagttaaaatattatttaattttgttgtatattttagttaattttgagtttttttaattaaaatagaatgggtggttgagtattttttttttgtagattagtgtttaattttaaaatttatagagatttattggattgatttggaagattattagtaattttagaagtggttaaataatcgggataaaagtatttatttagaagtggttaaataattgagataaaagtatttatgttttagatatgtttataggatgatgggtttatgttgttttttttttttattttttgttttttttttaggaaaatgtaaaaagtgtttttttttatattattggataaattattttaggataaattgaattttgtttatagtttagtagttttatgtaattagttttttaaaatttgagttttaaatagaaacgttttaattatgttaaaaatttgagtagttttaagagtttttttttttttaaatggtatagttgtaaagagtagtgtgatttttgtgggtttaagttcgggttttattttttatttaaatgtggttttgaataagtttttaatatttttttaatgttaagtttttattgggtataattatatttattttggttttttgtttgtttgttttttgaaagttaaatggtataatatgaatgt

SEQ ID NO: 1527 - DNA, 2389 bp, Artificial Sequence
  chemically treated genomic DNA (Homo sapiens)
atatttatattgtgttatttgatttttagaaaataaataaataaaaaattaaggtaaatataattatgtttaatgaaggtttgatattgagagagtgttagggatttgtttaagattatatttgagtaaagagtagagttcgagtttggatttataaaagttatattgttttttatagttgtattatttagaagaaggaggatttttagaattatttaggtttttgatatgattgaggcgtttttgtttgaaatttaggttttaaaaaattgattatataaaattattggattgtaaataggatttaatttattttgaagtaatttgtttaatggtgtaaagaaaagtattttttgtatttttttagaaagggggtaggaaataaaaaaaaaaaatagtatagatttattattttgtaaatatgtttaaggtataaatgtttttgttttagttatttagttatttttgggtaaatgtttttgtttcggttatttagttatttttgagattattggtggttttttaagttaatttagtgaatttttgtaaattttaaggttgggtattaatttgtaaaagaaaaatatttaattatttattttgttttagttggaaaaatttagaattaattgaaatatataatagaattaaatgatgttttaatttttttgttaaattagttaatgtggttaaagtaataatttagaagttattacgtgtgggtaagtatagtagataagttacgtaaagaattgtttgaaaaagttaatttaaggtagttaatttttaagtatagcgttgttttttaggtgttgtaaaatattttgaatattatttgaagtaaatatttaagttatttaaaatagtttgtaattggtttgaagggggtgttttaaaaaatagttttgttatttataaattattttgaagtaattttggagaattaaaaagaatttaatgtaattttaatttgcgttttttattattagattagggaaaattgagtttgttagggttatgatttttagtagtttaaggaagggatagtgtgattttaaaagtaagtcgtagaaatttttatttaaagatagagttttatagttagatttttattttatatttttttaaagagaaattgatattttatatattttacgtggttgtttgtttttgtttggtttggtttttcggtttaaagtatgttttatttttttttgagattaatgtttaggattgaggtaattattttatttgattgttatgggtagcgaggattttgaaaatttggtagtatatggatattttttgttttatggaggttaagagaagtagtggttgtaaatttgagagaaaaatttgatttaaaagagagatttaatgataaagtggtaatatagaaattaaatgaattttatttggattttatatgtaaaggatgttaagtaagtatttaagtggatttagaaagaaattaggttgtgtgatttagtttgttttagtgtttttttaagtttatttgtattttttggaaggtgataatatttaaaggtatgttatttagattttttttttaatatatatttgtatgattgtatgttagaatttgttagaaatgtttagatttatttgtttttatttaattgtatttaatggtttacgaaaatgtttatttttcgattttttggcgttttattttaatttgttttttttatagggtattttttttttgaagatttagtaatattggtttataggaattgggtaagaagttatagataatggtcgggtgcggtggcgtatatttgtaattttagcgttttgggaggttgaggcgggtagataataaggttaagagatcgagattattttggttaatattgtgaaatttcgtttttattaaaaaatataaaaattagttgggtatggtggtacgtgtttgtaattttagttatttaggaggttgaagtaggagaatcgtttgaatttgggaggtagaggttgtagtgagttaagattatataattgtattttagtttggtaatagagtgagattttgttttaaaaaaaaaaaaaaaagaaaaaaagaaaagaaaagaaaaatgaaaagaagttatagatagtgaagttattatagaggtttaaaatttttaaaattgtttttgttttttattttgttatttttttaatatagttatttttttagggtttttttattttttaagtgtttaagatttgattgatttaatatttttgttttagagaatataatttgttttaataaaatgaatttttattaggtaatttatgatttaatatatttttttaggtaagaatttgtagaaagattagattaattaatgatggagtatagggtatttgtttgtgggtt

SEQ ID NO: 1528 - DNA, 2380 bp, Artificial Sequence
  chemically treated genomic DNA (Homo sapiens)
gtgttgagattgtattattgtattttaggttgggcgatagagtgagatatagttttagaaaaaaaaaattatatatatatagatatatgtgtatatatatatatatatatatatatatatatatatatattttattgatagtggtattattagaattgtatatttttaagatttttgtagtagggtatggaagatagaatggagggagattgtattgaggtaaaatatataagtggtaagaaattatgagtatcggaattaaataagttagaaaagaatagtaaatgtttaataaataggtatgaattgtttgatattttatgaagtttgtataaattattttttttagagtaaaggttggttgtgaagataaaatgaaataataaaaatataagatgataaaaaaatttagagaaatttatagtggtatttaaataagatttggtttttttttgagttttagtgatttattattttgagttttaatggtgattaataagagtatttagttaaggagtgagtattatttttgtagataattattattataagttttcgagatatttttggatattcgttgttattattggtattgaattttaggaaatttcgggaataataattgtttaattataaattttagaaaataatgtggaagtttattagatttttgaataaagtattttttttttttttttatagtatataggtattttaaattaggaatattcgtttttatttttgttagtaaattttttgttaaatttattatttaattgaaaattttagaaaggagtaataaagaaattatggtagaggtttatattattaaaaagaaaaggtagttagtaaaaattattttttatgtagaagttaaaaaaaaaaaaaaattatttttaatgagatttgtattttaaagaaaataagaatcgatattatgatttatatattggttggtattttttatttaaagatgtatagatttgaaaaatttatatgttatattttattttattatttgttttttatagttttgtaaattagtaaatttttataagatatataggttgagagcgtgaagttagttagaaaagttacgtggaaatgtatatttattttagagtagtcggatttatatttaatatggtaaattaaaacgatgtaggtatttattttttttttttggagtttttaggtttttaaaatttaatattttattgttgatttgtttaaaatttttttaggtgaggtgaatttcgagggtattttatttaattatatagttagaggagggtggggttttataagattagattttaaatgttggggtttttgcgggtttttaggttgtcgggagtagaggtgaattgttttttgttttttgttgtaggaagaagacgggagatattgattgattggaggtggggggcgggggtttgggggagggaagtaatatggggattgtaataaataagagattttttttatatgattttttatatttggtgtttgatgtttttttttaggttttttagaggaaataggaaatttgttttttggttattggaaagaagagaataaatatattgagaattgtgaaaagaagtagtaggattttaggtaaggagttgatgggttagttaattttattttttattaagtgttttttttttgaagtttttttaagtgtttaattttgtaaaagttaagaatgtttttatttttttttattgagttggagtatattttggttttagtttagatgttatattatagagtagttgatgataggtaggttagaataggttttggaagaatttatttttagttttaggtaagattttttaagttttgtttttggaaagtttgattttttttaattttggattgattttaaagtttttaggttattttgttttagagtttaaagaattattaggaggttattattcgtggagtgaagtaggattttttatattatttatggggttttatgtaaaatgaaaatgtgatgttatttatttgaaaattaagaattttaagatggtgataatagaatattaaagtaagtgtggggattttttggagtatagggttttatgtaattgtattaggtcgtagatttattaagttagttttggttgtagaaagaacgtgggaattttgggttatgtggatttttataagttgagttgttgagagatttggattatttttattgtgtttagtagggtgatagttagttttttaatagtagtatatttggaagttgttgtaaggtagtagagggggaggagggtggatgttgggttgcgggtgtgagtaggtaaagattataaatatattattgagtaaaaattatatagtggtttttttgttt

SEQ ID NO: 1529 - DNA, 2380 bp, Artificial Sequence
  chemically treated genomic DNA (Homo sapiens)
gggtaaggagattattgtgtgatttttatttagtgatgtgtttgtggtttttgtttgtttatattcgtaatttagtatttatttttttttttttttgttgttttgtagtagtttttaagtgtgttgttgttggaggattgattgttattttgttgaatataatggaggtagtttaggttttttaataatttagtttgtgaaaatttatatggtttagagtttttacgttttttttatagttaggattggtttggtgagtttacggtttggtatagttgtatagagttttgtgttttagagagtttttatatttgttttaatgttttattgttattattttgaaatttttaatttttaaatgagtggtattatatttttattttatatgaaattttataaataatgtagagggttttattttattttacggatggtggttttttgataattttttaaattttaaggtaaaatggtttgagggttttggagttagtttaagattaagaaagattagattttttaaagatagagtttagggggttttgtttgaggttgggaatggatttttttagggtttgttttaatttgtttgttattagttgttttgtaatatgatatttggattggggttagaatatgttttagtttagtggaagaagatgaggatatttttgatttttatagagttaaatatttagaggaattttaggaagaaagtatttggtaaaaggtaaagttggttggtttattagttttttgtttggggttttgttgtttttttttatagtttttagtatgtttatttttttttttttagtggttagaggataagttttttgttttttttagggagtttggagagaggtattaggtattaaatataggaaattatgtggagaggattttttatttattatagtttttatattattttttttttttaagttttcgttttttatttttagttagttagtgtttttcgttttttttttgtagtagagaatagaaggtagtttatttttgttttcgatagtttgggaattcgtaagagttttagtatttgaagtttggttttgtgaaattttatttttttttggttgtgtgattgaatgggatgttttcgaggtttattttatttgagagggttttgggtagattagtagtaaggtgttaaattttagaagtttgaaaattttagaagagaaaggtaggtatttgtatcgttttgatttgttatgttaaatgtgaattcggttgttttggaatagatgtgtatttttacgtggtttttttagttggttttacgtttttaatttgtgtgttttgtggagatttattgatttataagattgtgaggggtaaatagtgagatgggatatgatatatggattttttaaatttgtatatttttggataaagaatgttagttagtatatagattatggtgtcgatttttattttttttggagtgtaaattttattagaagtagtttttttttttttttggtttttgtataaggggtaatttttattaattgttttttttttttaatagtatagatttttattatgatttttttattatttttttttgaggtttttagttaaatagtagatttgatagagaatttgttaatagaaataggaacgggtgtttttaatttagagtgtttatgtgttataagaaaaaaaaaagagtattttgtttagggatttggtggatttttatattattttttagaatttgtggttaaatagttgttattttcgaggttttttgaaatttaatattagtagtgataacgaatatttagggatgtttcggaggtttgtggtggtggttgtttgtagggatggtgtttattttttagttgggtgtttttgttggttattattgaggtttaagatgataggttattgagatttagagaggagttaggttttatttaagtattattataaatttttttggatttttttgttattttatgtttttattgttttattttgtttttataattagtttttattttaagagaaataatttatatagattttatggaatattaaataatttatatttatttattgaatatttattatttttttttagtttatttagtttcgatgtttataattttttattatttatgtattttattttaatatagtttttttttattttattttttatattttgttataggggttttgggaatatgtaattttaataatgttattgttagtgagatatatatatatatatatatatatatatatatatatatatatatatatttatatatatataattttttttttttgagattgtgttttattttgtcgtttagtttggagtatagtggtgtaattttagtat

SEQ ID NO: 1530 - DNA, 2378 bp, Artificial Sequence
  chemically treated genomic DNA (Homo sapiens)
tttaagaataaaacgtttttttttttttttaatatagaatattttttttatgagttttttaaaagtacgttaagtaaattaaaataaaaggaggtgggtaatgtatttgaagaaatttagttaatttaatttttgtaattttagaagtatgttttatttattttttggaattaattgtggttttattataaattgaattagatatatttgttttaatgttattttaattttgtaggtagattgtaatttagggttggtttagtttatttattttttagtttattaatttattgtttttgttgttttagtcgtgtgggtatttttttagttggaatatatagaggttgtttttttttttaaaagtttaaaagtaataaagtaagaaagagagaaaaagtaagaaagtaagaaattgagaaaaagtaagaaagtaaaaaagtaagaaagggaaagtaagtaaatatagtttttatttttttttttatagaattagagttttttgagagtgtttataggatttatttagaaaggttattttgtaaatgttttattagttacggtataatatagtttttttttagtagaaaagttttgttttttgggagtttgttttttttttagtttaatggattttgttaggggtaggatgtggtttttgttattacgggttataaaatttaggagtaatggttgtagtgatggcggttttttgtcggtttattagtacgggagtttgacggtgaggaggagagaaaggaaaattgggaaaagttttgaatgtttaataattttttagaggtaagatgagggagagagagatttagagttataattgtagaagttttttgtaaaatttaattaaaatttgggtagaaataaatattagaaataagtgttatttattaatttaaatcgttaattaaggtaaatattgttataaatttaggaaaagaaagggaggagaatggaacgaggggtgattattttagatattaagtaaattaaattattttgaaggttttgttagatatatgtattaattattggttattttagttgtatatttgtatggagaggagaatttggcgtttttaaattgattttggttggtaaagtgggaaagtagaaggatagggtggtaggttaaggggaatttaatttagaagtggttacgtggtatttacggttttgtattggttaggtggaagaaggaggaattacgtaagatttaggcgagggcgtataattatttttagttttttagttttgttttttgttttttggagtttatgtagttggataaatttgttgagttgtaacgtgaagtaatttttttcgggagggggaaggttttagggtgaatttaagttaattttagggataatagagtgggaaagtaagttgagtttttaaattttttatgtggttggtttttttttttcgtgagatttagtatttagtaggagggagacggggtagggtggggtggggataaagtgagtcgttgattttgttttttgggttataggttttgtatatttataagtttcgagggtaggttataagttgaaatttttttattttagagagaggaggttggagagtagtttagttatttaggttgggagttatttgtatttgatgagtaattttaagtgggaattattagagtgtgtgtttgtgtgaatgttagagtgtatttagagggaataaatgatttattatcggggttttaataaagttatattcgaaaagggagggagttttttatttttttttttattattaaaattttaaagaggtagaatttatttggttttttaagttaggttggaagggagttatagttaattaagtagttcgtttagtttttttagtttttttttgagtataataatatgtataaattggtaaaagggattatagattgttttgatgttaaataaagaggaaaatttttaaaatacggtaaaaattgtatttttgtttaattttttcgcgttttttttttagtataaatttaagatacgtatagttaggttttagggagaggtatataatgaaaaattattattttagatatttagatttaagtattttgtagtaagagaaaatgtttagtttttttttttgaattattttttttgtttacgtttttttgtttgttttgttgttgttgttgtttttgagatggagttttatttttgttatttaggttggaatgtagcggtatgatttcggtttattgtaatttttatttttcggatttaagtaattattttgttttagtttttcgagtagttgtgattataggtatttgttattaagttcggttatgattaaatattattttattaataataaatattgtgttttgg

SEQ ID NO: 1531 - DNA, 2378 bp, Artificial Sequence
  chemically treated genomic DNA (Homo sapiens)
ttagagtatagtatttgttattagtgaagtaatatttaattatagtcgggtttggtggtaggtgtttgtaattatagttattcgggaggttgaggtaggataattgtttgaattcgggagatggaggttgtagtgagtcgagattatgtcgttgtattttagtttgggtaataagagtgaaattttattttaaaaataataataataataaaataaataaaaaaacgtaagtagagaaagtaatttagaagaggagattggatatttttttttgttataaaatatttggatttaagtatttgaaatgataattttttattatgtatttttttttggagtttagttgtacgtgttttaaatttgtgttgaagaaaggacgcggaagagttaaatagagatataatttttatcgtgttttggaggtttttttttttgtttaatattaaagtagtttgtagttttttttgttagtttatatatattgttgtatttaaagaagggttgaaggagttgagcgggttgtttgattagttgtgatttttttttagtttggtttaagagattaaatggattttatttttttaaggttttaatgataaggaggggaataagaggtttttttttttttcgaatgtaattttgttgaggtttcgataataaattatttgttttttttaaatgtattttggtatttatataggtatatattttgatggtttttatttgaaattgtttattaagtgtaaatagtttttagtttggatggttgagttgttttttagttttttttttttggagtaagaagattttagtttgtgatttgttttcgggatttgtgggtgtataaagtttgtgatttaggaaataaagttaacggtttattttgtttttattttattttatttcgttttttttttattaaatgttgaattttacgagagaagaaaattagttatataaaggatttgaaagtttaatttgtttttttattttgttatttttggagttggtttggatttattttgaagttttttttttttcggggaaagttgttttacgttgtagtttagtaggtttgtttagttatataggttttagaaaataagaagtaagattggaaagttggggatgattgtacgttttcgtttgaattttacgtggttttttttttttttatttggttagtgtagagtcgtgggtgttacgtggttatttttggattgggttttttttggtttgttattttgtttttttgtttttttattttgttagttagagttaatttgaggacgttaagtttttttttttatataggtgtgtagttgggataattaatgattaatgtatgtgtttggtagggtttttagggtaatttgatttgtttgatatttagagtgattatttttcgttttatttttttttttttttttttttgagtttgtggtagtgtttattttagttggcggtttaagttgatgaatgatatttgtttttggtgtttgtttttgtttaagttttaattaaattttgtaagaggtttttgtaattatggttttaggttttttttttttttattttatttttgaaaagttattgagtatttagaattttttttagttttttttttttttttttttatcgttaaattttcgtgttgatgggtcggtaggaggtcgttattattgtagttattatttttgggttttatggttcgtgatggtaaaagttatattttgtttttgatagaatttattaggttgaggagggaatagatttttagaaagtagagtttttttgttggaggagagttgtattatgtcgtagttaatgggatatttgtaaaataatttttttaagtagattttgtaggtatttttaaggggttttgattttataagggaagaggtagaagttgtgtttgtttgtttttttttttttgtttttttgtttttttgtttttttttagttttttgtttttttgtttttttttttttttttgttttgttgtttttaagtttttggaggagaaagtagtttttgtatgttttaattgaaagaatgtttatacggttgagatagtaagagtagtggattaatggattaggaaatagatgaattaaattaattttgggttataatttgtttgtaaagttgagataatattagaataagtgtatttggtttaatttatggtgggattatagttagttttaagaagtaaatggaatatgtttttgaggttgtaaaaattgaattggttaagtttttttaggtatattatttatttttttttgttttggtttgtttaacgtatttttagaaaatttataagaaaggtattttgtattaaaagaggagaaaaacgttttatttttaag

SEQ ID NO: 1532 - DNA, 2469 bp, Artificial Sequence
  chemically treated genomic DNA (Homo sapiens)
ttaatattaggggtattagttagtaaaatttgttgagtttattattgaaaaatttttttatttattattgtggttataatatatagttatttggttaggaaagagtatatattatagggatttgtttattgtacgtgtgtttgagtttttttttattttttgttttttttaagaatttttttttgattggtttaattagaagcgttgattttttttatttgattttttgtaattttataatttatgttttttatttttgtgttatattgtttatttttttttggtttttttgtgtgtatatgtatatgttttggggaatggggtatttatttttgttatttattgtgttatttatttttgtatgtttatagtgtagagtatggtgttttgtatatagagtatgttcggtaaatatgtgtaataaaaagttttttgattatataatggtttgatattggtttttttattttttaaatgagttattttttaattattgatttaaatggagttgatttatttttataaatagtatttttttgatttttattgttataaaatttataataaaattgtttttttatttatttttttttattgtttatattttttttggaaatatttaaatgagggtttgttttagatttttggggaaggaaggtttgtgagtagataatagtagaattaggatgtgtgggattgtttggtggttagtagaataatgtaaattggtttttttgtttaaagttaaatcgtgtgtattttttataagtggatatagtgttttttgtgtttgaattattatagttatgtagtggtttagtgagaattttttgtttcggttattataaaaataaaatagaaatttttttgttgttaggttaggaattagattataattgatgtattagtttattagttaattttttttaagtttaatattagaataggtaaaaaaaaaaagtattagtttttaaaaattattaataatagtggtataattttgtattttattattttttttttaattattttagtgtagtagatgtaagtagagttttatgtaattatttgagataaggatgaagaattgaaagataaataagtgatttattttaatggatttgttttagataggagaaatttgtaattttttttaggcgtgttttatggatttatagtggagtgaattatagatttgtataagttttgaaattgtgggtaattttatagtttttagatcggtttttcgtaataggtagttagtttttattgggttttttggatttttattttaaaaatggagaagatagattatagttattgattagggatcgtgggaggtgttacgtgatggtgaggtattatgttagggagttgagttttgatttttttgttgggtgattttttatttttgggttgttagatttattttttggatgtcgtgagtagatgttttatattagtattatttttttgttgaagaaaggtttgtttttgtatatattttaggagggggaaatgcgtgatatatgatggtattttttggaatgtttgatttttttggaaatttttttaatatgatttagaaattggttagtttaaggttggagtattttttaagttttttttacgtttgtttttttttaagagttgtttgttaggttttaatggtttatttttaggagtgaaaatgtaaagtattttgttaggtaaataaatttattgtttttgtattgtttttttgtttgataaattttaatatttgttttttagattgaatgtaaagttggatgttgttttaaaagtgtttttgattagtttttttttttagtgagtttgaaaaagttattattgtattaatttaaaaaaatatttttttagttattgttaaatacgtttttgtaaaggtatttttttttgttttaagtggttaattttatgttatttgaaggtttatattttttatattttgaagatagttgtgagaggtttaaagtgttgtattattaggtgttgtttatttgtttgtttgtttgttttttagtgttagtatattatgagttttttttatggattagaggtaattgttgggcgtataaatttttttaaaattttataagtattaagatagttggtgagatatttagatgttttttaattttgaaattgttttttaattttgaaattatgtgatttttgaaatttattagaatttgaatttagattttaatttttagaagagatgttgggttataaatagattggttggaagttatttaaagtagttaaagatgagatgtttttgattttaatagtttttttttattttttttttttttaaggttttatgtgaagtattttttttatggtaagggagaattttaagggtaattaaatagattttgttatgagggtaagagatattgggttttaaatatataaataattcgtttatttatttgatgttat

SEQ ID NO: 1533 - DNA, 2469 bp, Artificial Sequence
  chemically treated genomic DNA (Homo sapiens)
ataatattagatggataaacgagttgtttatgtgtttaagatttagtattttttgtttttatagtagaatttatttagttatttttagagtttttttttgttatggaagaaatgttttatatagagttttgggggaaagaaagatagaaaagaattattagaattagaaatattttatttttagttattttagatggtttttagttaatttgtttgtagtttagtattttttttaaaaattggaatttggatttagattttgataggttttaagaattatataattttagagttggaagataattttagagttagaagatatttagatattttattaattattttgatatttataaaattttaaagaaatttatacgtttagtaattgtttttggtttatgaagaaagtttatgatgtgttgatattgaaaaataaataaataaataaataaatagtatttaatgatgtaatattttagattttttataattgtttttagagtataaggaatatagatttttaagtagtatagaattggttatttgaaataagggaagatgtttttgtaaaaacgtgtttggtagtaattggagaaatgtttttttaaattgatataatgatagtttttttaggtttattaaaagaagaaattaattaagaatatttttaaaataatatttagttttatatttagtttaaaagataggtattgaaatttattaagtaaggggataatgtagggatagtgagtttatttgtttgataggatattttgtatttttatttttaggagtgagttattaaagtttgataaataatttttaaagaaaaataaacgtaaaagaggtttaggaaatattttaattttgagttagttaatttttaaattatgttagagaagtttttagaagaattaagtattttagaaaatattattatatattacgtattttttttttttggaatatgtgtaaaaataagtttttttttaataggaaaatggtgttggtgtaggatatttatttacggtatttaggaagtagatttagtagtttagaggtggagaattatttagtaggaaggttagagtttagttttttagtatgatgttttattattacgtggtattttttacggtttttggttagtggttgtgatttgttttttttatttttgaaatgggagtttaaggggtttagtgagaattgattgtttgttgcgagaagtcgatttgagaattgtaaagttatttatagttttaaggtttgtgtaagtttgtgatttattttattatgggtttatgaagtacgtttaagagaaattataggttttttttgtttgaagtaaatttattaaagtgagttatttgtttgttttttagttttttatttttattttagatgattgtatgagattttgtttgtatttgttgtattgggataattggaaggagggtgataaaatgtaaggttatgttattattgttgatgatttttaaaggttgatattttttttttttgtttgttttgatgttgaatttggaggaaattggttgataaattggtgtattaattgtgatttaatttttaatttagtaatagagagatttttgttttatttttgtaatgatcgggataaggagtttttattgagttattatatgattgtggtaatttagatatagaagatattgtgtttatttgtggggaatgtatacggtttgattttggataggggagttagtttgtattgttttgttaattattaaatagttttatatattttagttttattgttgtttatttataggttttttttttttaaagatttaaagtaaatttttatttagatatttttaggagaaatgtggataataaggagaggtaagtgaggaggtagttttgttatgggttttatagtaatgaaggttaaggaggtgttgtttatggaaatgggttagttttatttaggttagtagttaagaaatggtttatttgggaagtggaaaagttaatattaagttattgtgtaattaaaggattttttattgtatatatttatcgaatatattttatgtataaggtattatgttttgtattatgggtatataaaagtgagtaatatagtgagtaataaaagtgaatattttattttttaaaatatatatatatgtatataaaaagattaaaaggaaataaataatataatataaaagtgaaggatatagattataaaattataggaaattaggtggggagaattagcgtttttggttggattaattagggaagaatttttgaagaaggtagaaagtgagggagagtttaggtatacgtgtagtgagtagatttttgtgatgtgtatttttttttggttaggtaattgtgtattatgattatagtaatgaatgaaaggattttttaatggtaagtttaatagattttgttggttgatatttttaatgttga

SEQ ID NO: 1534 - DNA, 2231 bp, Artificial Sequence
  chemically treated genomic DNA (Homo sapiens)
tgataaatggtagtttatttatgattggagaattttaggaggattagtattggttttgtttttataggttgtgaaagtttagtattattttgtttatatatttagatatttaatttatattatttaatttaaattattcgttttattgtttttttgtaaatgaatttgtggataagcgtttttattaatggaaaaataaaaggttaaaatttaatagttttaaagtttatagtatatatgggaaagttatttgaatttttagttggtgatgatagtatttgtttttagaaaattgatataatttattaatgtttagtattgaaatataagagtttattgttgttgttgacgtattgttgttattttgatattttttaaaatgtagaatttgaattattgatgttatgaggtttatttagagagtcgttaaataaaaagttagatgatgtgaggataaagaagtttgagagtttgttggtttgtaggtgattttttgtgttttttttagttagtttttaggtaggagaggttattagagtagttggaatattttttataaaatagttatataatttaaagaagatattattgaggtattatttttaggtttttttttttgaaaaaaattaaattatattttgaattttttaggattgttttttttttttgtagggtttatttttttgaataaaattagtatttgttaatgattagaatgataatgtatgttttatgtttatatttatataattgtgttttttatttaaggttttgtttaatgtaatgatttttggatttgaagtgtattaaatgttaatgttttttttaatttttaatttttttttttataaattttgaagataaatattaatattttggtattatattaaagaaatatttaattattagtattgttattttgtttttattttgtatttttaatttttaattttaaaaaataggtgaatattttttatgttggtttttatgtttatataggttattgttttgttatggaggaatttaaaggttattattggttatttatttaattttttgaatacgtttttttttgtttagataagtttggtttttttgtttttcggatatggtaatatttttattgatttttgttagtaaagttatatgttattagtttttttagggttatacgtgtagtacggtagtttttaggtattatattgattgtaaagaagggtaggaatttttgtgtatgtttgtattatttatttttggggaataaagataatataagtggatgatttagaaaggtagtgttttttttttagttatatgttaattaagtttttttatagaaaaattgaagagtttagaagttagtgggtagtattagagtaaagtattttgtatgtggatgaatttagtttatttttggaatatgcgtttggaatttcgaaattttttaattattttgattgattattgttggaatggggagaggaggtaaagaggaaatgaagataagatttagattgggatagtttgttgatggaaattgttagggtgtagattttttttaaatgtttaatagaaattttagagattagataattgtagggatttatggaatagtaagttaaatttatttttttatttattttatttttaattagagtttttttgggggaaatttagaaatggaaattgtttaagtataaatattttgtatattataaatattgttgggtttgatattttgtagggagtaaagaaggggattgtagagatgtatggatttgagtttgaaatgtggttttatttttttttggttgtgagaatttggaaaattcgttgatttattaaattttatttaattttttataagatgtgaattataatttgttttgtagagttatgtgaatttaaaattagattttatttgtaaagtttttaaagtagtatttggttaatgtattttaggttaggatattgttggtattttgtttttaagatgtatgttattgattttttttttataagaatttttagtatgaaatttattttagtgtattatagttttatttttaaaggaaatttaatttagaaattaaggtaaattttaaaagttattaattaatttttttagttttaatattatttataggaaaataggaaaagaaaatttgtagaaggaaatagtgtaaatggagaaataaattggggtgagagaggagagaataaggaagggt

SEQ ID NO: 1535 - DNA, 2231 bp, Artificial Sequence
  chemically treated genomic DNA (Homo sapiens)
atttttttttattttttttttttttattttagtttgtttttttatttgtattatttttttttataagttttttttttttgtttttttataaatgatattagaattgaaaagattagttaataatttttgggatttgttttgatttttaggttaagttttttttgaaaataaaattgtaatgtattgaaataaattttatgttaaaaatttttatgggaaaaaaattagtagtatgtattttggaaataaaatattagtagtattttaatttaggatatattggttaagtattgttttaagaattttataggtaaaatttgattttgagtttatataattttgtaaagtagattataatttatattttatagaagattaaatggaatttggtaaattaacgaattttttaagtttttatagttaggaagagatggagttatattttaaatttaagtttatatatttttatagtttttttttttgttttttataaagtgttaaatttagtaatatttatagtatgtaaagtatttatgtttaggtagtttttatttttgaattttttttaggaaaattttaattgggagtgaggtgggtagagaaatggatttgatttgttattttatgaatttttgtaattatttagtttttgaggtttttgttaaatatttagagaaaatttatattttgatagtttttattagtagattattttaatttggattttgtttttattttttttttgttttttttttttattttagtaataattagttaaaatagttaaaaagtttcggaattttagacgtatgttttaagggtaggttaggtttatttatatataaggtattttgttttggtgttatttattggtttttaaattttttagtttttttgtgaaagggtttgattagtatgtggttgggaggaaaatattgtttttttgagttatttatttatgttatttttattttttaggagtgaatgatataggtatatatagagatttttgtttttttttgtaattaatataatgtttaagaattatcgtgttgtacgtataattttgggaaggttgataatatgtagttttgttggtaagagttagtgaaaatattattatattcgagaagtagaaaagttaggtttgtttggataaggaagaacgtatttagaaggttggatagatggttagtagtagtttttgggtttttttatggtaagataatgatttatatgaatataagaattagtatgagaaatatttatttattttttaaagttagagattagagatgtaggatgaaagtaaaatgataatgttggtaattaggtatttttttaatgtaatattaaaatattagtgtttatttttagaatttgtaaaaaaaaaaattagaagttagaaaaaatattaatatttaatatattttaaatttaaaaattattatattggataaaattttaagtaaaaaatatagttatgtaagtataaatatgaaatatatattattattttaattattagtagatattagttttatttaaagaaataaattttatagagaaggaaaataattttgaaaaatttaaaatgtaatttgattttttttaaaggggaaagtttagaaatgatgttttaatagtgttttttttgagttgtgtggttattttatagaaaatgttttagttgttttgatagttttttttgtttggaagttaattaagggggatataggaagttatttgtaaattaataaatttttagatttttttatttttatattatttgattttttgtttgacgattttttaagtaagttttatgatattaatgatttagattttatattttaaaggatattaaagtaatagtaatacgttaataataataataaatttttgtattttagtattgagtattagtgagttatattagttttttgggaataagtattgttattattaattgaaaatttaaataatttttttatgtatattgtgaattttaaaattgttaggttttagttttttatttttttattggtagaagcgtttatttatagatttatttgtagaaaaataataaaacggataatttaaattaaatggtataaattaaatgtttaaatatatggatagagtggtgttgggtttttatagtttatgaggatagagttagtgttggtttttttagggttttttagttatagataaattattatttgtta

SEQ ID NO: 1536 - DNA, 2334 bp, Artificial Sequence
  chemically treated genomic DNA (Homo sapiens)
ttagattttgggaataaaattaataattttttaaatatttttaaaatatagttttgatttttattttattaaaaattttgatttaatttgaggagattttgttttattttttaaattaaatgtttttattttttttgtatcgtgaatgttttgaatcgattagtaagataagaataatattaaaattaatagtgagggtagttttagtattattttgtttttttttaagattttttttggttattttgtttttttttttttgttagattttgagtttttttttttaaaatatggtttgagtatttttttgaagaagttttttttatgttttttattttgttttaattattttatggttagcgtaagtagtatagattttatttgtattttagttatatgtgtttttgttgtttttttttgtttttttattagtttataagttttattgtataaggtttatatatttatatttattgtagtatttataattatgttgtataatattttgtatatagagggaatttaataatttttgtagtttgatttttgggtttttattttggtttttgggtaattatttattagtaaataaattagttattagtgaaatagttatggtttttagagttaattatttgtatttttattgttggaaaaaataatatatattattttttttgtagagaggtatgcggttagaacgttattggtagatttcgtttgagagttttgacgtttgtaattttgttttggaaaggtgaattaatttttattttgatttatgtgtttttttaggtttttttagtttaaatgtataaaagttagagaaagttattattataatattgataataataatgataaagatatatatatatagttagtggttgaatatttattagtaagattgttggaaattaagtcgtattatatttgtcggagtatttaggattatttatttagtgtaggtttagtagttatgtttatttttgtttattttaggtatggtttttttaggtgttagggttattttttttttttttagtggttgttttttttgttggtacgtagtatttgttttttagttttaagtttgtggggtagttaggagagttttgtttttggttttcgttggttttatattttttggcgagtggttttgtacggtagtttagttttggggaattttttaagggagagggtttttttttttttttaatttttttatttttatttaattttattttatattggttttttattatcgttagttgttgttttgttaggtattgtggaatatttatatttttttttattatagggtttggatatataggcgttggagttagatacgttgtgttttaatttttaattttttatattaattgttttttttttttgaattttaattttgttatttataaaatagagatagtataataatatttgttttatggtggtgttgttagaattaagtagtaacgttattcgtaatgataatagttgtattgattaagggatttgtacgtgttgggtgttatgtagtgttttgtatttttttttggagtttagtatggcgtttagtttagaataagtagtttgtagttttttttttttttttttttttttttttttttttttttttttattttttaaattaaataggatttgggggtgtagtatttggttttttatgggggtttttttttttttgtagtattttttttttttttataggttatttgagagaatttagatttttatttttagatttttcgtttattagaaataggagtttttttatttttttgtttaagttttttatttaatagggtagttttatttttgtttttagttaggtttttaagttttatttttatgttggggttttgtatttggtgttttgttgttttagggaatatagatggttaatagttagagataaggttagttttgtgtttttttggattatagaatgtgtttttaagagttttttttttttattttagtatataggtaggttatttgtattaggaatgttgtaaaatattgattggatatagataattaatgtttaagtataatggtttttaacggagtaggagaaggttaggaattagtagggtatagttatttttttattttgggggaggtagttaagaggaagggtttttggggaaagagggagttgtatttcgtattaggggagggggtgagtggaatattaagatttattggattttaggggttattttattgtgggttagtttttgaagaatttttagtagattttgttatatttggttttggttttggtgtatatgtttttattgt

SEQ ID NO: 1537 - DNA, 2334 bp, Artificial Sequence
  chemically treated genomic DNA (Homo sapiens)
gtaatggaggtatgtgtattagagttagggttaagtgtggtaaaatttattaaaggttttttagaggttagtttataataggatggtttttgaagtttagtaaattttggtgttttatttatttttttttttgatgcgaggtgtagttttttttttttttaggggtttttttttttgattgttttttttaggatagggggatggttatgttttgttggtttttgatttttttttgtttcgttggagattattatgtttaagtattgattatttgtgtttagttagtgttttgtagtatttttggtgtaaatggtttgtttgtgtgttgaagtggaaggaaagggtttttaggggtatattttgtggtttaggaggatatagagttgattttatttttagttattggttatttgtgttttttggagtaatagaatattaggtgtagagttttaatatggggatggagtttggaaatttggttggaaatagaaatggagttattttgttaggtgggggatttgggtaggagagtgaaaaggtttttgtttttagtgggcggagagtttgggggtaggggtttgggtttttttagatggtttgtagaagaagggaagatgttgtagagaggaaaaagtttttataagggattagatgttgtatttttaggttttatttgatttagggaatgaaggagggaggagaaaagaaagaagaagagggggaaggaagttgtagattatttgttttgggttagacgttatgttgggttttaagaagaggtataaaatattgtatggtatttagtacgtataagttttttggttagtatagttgttattattacgagtgacgttattgtttaattttaataatattattataaggtaggtattattatattatttttattttgtggatgataaaattgaggtttagaaaagagaagtaattggtgtagggggttgaaaattgaaatatagcgtatttgattttaacgtttgtgtgtttaagttttgtgatagggaaagatgtaggtgttttatagtatttggtaaggtaataattggcgatggtaaagggttagtatggagtggggttgggtgagggtaggggagttagggagggaaagaagtttttttttttgaaaagttttttagggttgggttgtcgtgtaaagttattcgttaggaagtatgggattaacggaggttagaggtaagatttttttggttgttttataggtttagagttgggaggtaggtgttgcgtgttagtaggaagagtagttattagaagagagagaagtagttttggtatttgggggagttatatttgggatggataaaggtaggtatggttgttgagtttgtattgagtagatggttttggatgtttcggtaggtgtggtgcggtttggtttttagtaattttgttggtgggtgtttagttattgattgtatgtgtatatttttgttattgttgttattagtattatggtgatgattttttttgatttttatgtatttaggttaaaggaatttggaaaaatatatgaattaaaataaaagttgatttatttttttagggtagagttataagcgttaaaatttttaggcgagatttgttagtgacgttttgatcgtatgtttttttgtaaggaaagtggtatgtgttgttttttttagtagtggaaatataaatgattaattttggaaattatggttgttttattgataattaatttgtttgttgataaatgattatttaggagttagaatagagatttaaaagttaaattgtaaaaattattaagttttttttgtatgtagaatattgtgtaatatggttatgggtattatagtggatgtgagtgtgtagattttgtataatagagtttataggttaatgagaagataggaagaaataataggaatatatatagttggaatgtagatgggatttgtgttatttacgttagttatgggatgattagaataagataagagatatgaggaagatttttttaaggaggtgtttaagttatgttttggaaaagagaatttaaggtttggtagggagaaaggagtaaggtaattaggggaagttttggaggagagtaagatgatgttgaaattgtttttattgttggttttaatgttgtttttgttttattggtcgatttagagtatttacggtgtaagagagatagggatatttgatttaagaaatagagtagaatttttttaaattaaattagaatttttgatggagtagaggttagagttatgttttggaagtgtttgggaaattgttagttttgtttttaggatttga

SEQ ID NO: 1538 - DNA, 2500 bp, Artificial Sequence
  chemically treated genomic DNA (Homo sapiens)
tattaagtaatataaaaaatgttttatataaatattatattttttagatagtttaatatattaagaatttttttgtagttatttttatgtttttattttagatattttattttgttttaaaaaaaaaaaagtggagaaaaaaagtagttatattttttattttttaaaaatggtttttttggttgaaaagaaagaaaaatagtatataataaatattttgattttgaagtgtttggattatttttttaagtattgtagtgtttgagattagtaaaaaattatttttttagaaagttattgattgtttaatttttatgagtatcgttatggaatttagagataatacgaggagatatttttcgtttacgattatagatagtggaaagaattttgatttaagtattttaatttagtaaaatagtttagtagtttgtattttggttttatttatcgtttttgtttagttagtaattaatttggagaggattttttatgttttgggaggagtacgtggaagttggtttaagttatagtgttttatttgggaaggaggtgattttgagtttgggaaaattgtcgttaatattttatagttattagttttttttttaaaaaacgaattaaaattagaaattagtagtaaatattatttttatttatgttttataaattaggaaaaattagtataaagatatgtgaaatattttatttgggatatttgaaataaaattaaatgggaaaaaaaatatttttatatgtttataatatattaattttaataattaaattttaggtaaatatttttattttaagatatagtataatttttttaaaattaaaaagtaaaataaagtaaaattatcgtgaagggaaaaaataattaatcggttatttgagtttatatttggaaaaaaataattttttaggtatttaaatgtagagttaaagagtaatgaatatgtatatagtttaaatttataaattatataatttaatgttatatttttttttttgagatttggttaataaattaaatgttgtattttgtatatgaggaattaaagtttatttattggatttagtggttttagtgtaggatatttttgtgcgttgttatagaggtaggtatgtaatttagaaaaaattgaaataggtaatttgttatgttgatagttataagagaaagatttcgtgttaacggtacgtttttaattgtgtattttttttatttatagtttgtttattagagttttgagtaggttgtttattaggtcgggagtgttgatttagaagatagatgatttttagtatatgtaaatcgagtattgtaaaagttattttttattcgtgttagtagtttatagttagtttttagtagttttgcgttttagttgtaaatattttattagattaatgtatttagtataggtagaaaattcgatttattatagttatagtaatgaatttttattacgatgatagttttaattatattatgttcggaaaattagttaattattggtttttaaagaatatatatattttatatgtagaaaacgaggtttttgtgtgtgtgtgtgtgtgtgtgtgtgtgtgtgtgtgtgtgtgtgtgtgtgtgtgttttgtgtttttttttttttagtagtttaagagaaatgtgtagtgtagttttttgtcgatatgagttgtaaggtaatgatatttttgtttttttggtagttatatttttgtaataatttgaattatgttataatggttagaatgggtgtttttaatattttagtttttattattttttttttgttgttatagaaattagattgtaatatcgtttttttgttttaattttgtagtagtgtgggttaatattaggtttataagatattggtgatttgatagagtgaatgtttgattttggataaataaaataaaaagaaatattataatagtattattgtttaggagattttgtgtgatttttagagtagtgtgtttatttaggtgtgtgtatatattatggttgtatatattaaattagcggttgtttataatatatgtgtatagtttattaaagtcggttttgattttggttttaggtttgtatgtgtgtgtgtgtaagtatttttatttattttaacgtggtgggatttgtataggatagaaatagggtaagagtgattatttatttttatgttttattgtattttttgtagtaaattaatatatatcggcgaagggattttttttttttttttttttttgtaaagtggagtagggttttttattgtttattttatttattttgggatattggtatatttataggtattttttataagatgaaatatttattttataaatatgtggtttatttttagggatgagtagtaaataaatttagtcgggattaaatattaattagggttaacgaaggtttaggttataatttggttagttattgagagtgaaaaaaattgtaatggataatttgaggtttttt

SEQ ID NO: 1539 - DNA, 2500 bp, Artificial Sequence
  chemically treated genomic DNA (Homo sapiens)
gagaaattttaagttgtttattgtagttttttttatttttagtaattggttaggttgtggtttaagttttcgttagttttggttgatatttagtttcggttaaatttgtttgttgtttatttttaggagtaagttatatgtttgtagaatggatgttttattttgtaggaaatatttgtgaatatgttaatattttagagtggatgaaatgggtaatggggagttttgttttattttataaaaagaaaggaaaagaaaagattttttcgtcgatatatattgatttgttgtagaaaatgtaatggggtatgggaatgaatagttatttttgttttgtttttattttgtgtaggttttattacgttgaggtgggtagagatgtttatatatatatatatataggtttggagttaaagttagggtcggttttaatgaattgtatatatatgttgtgggtagtcgttgatttaatatgtataattatggtgtgtgtatatatttggataggtatattgttttgggaattatatagggttttttgaataatgatgttattgtaatatttttttttgttttatttgtttaaagttaaatatttattttgttagattattagtgttttataagtttggtgttggtttatattgttgtaggattgggataaagagacgatgttatagtttggtttttatggtaatagaggaggggtaatgaaaattgaaatgttggaaatatttattttaattattgtgatataatttaggttattataaggatgtaattattaaagaagtagaagtgttattattttgtagtttatgtcgataaaaagttatattgtatattttttttaggttgttaagaggaaggaaatataaaatatatatatatatatatatatatatatatatatatatatatatatatatatatagaggtttcgttttttgtatgtaaaatgtgtgtgttttttaaaagttagtggttggttggtttttcggatatgatgtggttgaagttgttatcgtaatggaaatttattgttgtagttatggtaaatcgagttttttgtttgtgttgaatgtattagtttaatgagatgtttgtagttggagcgtagggttgttggagattaattgtgagttattaatacgggtggaagatagtttttgtaatattcggtttgtatgtgttgaaagttatttgttttttgagttaatattttcgatttggtaaataatttgtttagggttttggtgaataagttgtaggtaagggagatgtataattggaggcgtgtcgttgatacgggattttttttttgtaattgttagtatgataggttatttgttttagttttttttgggttgtatgtttatttttatggtaacgtataagagtgttttgtattaaaattattgagtttagtaggtaaattttagttttttatatgtaaagtatagtatttaatttattaattagattttagaggggaaaatgtaatattgaattatatagtttataaatttgggttatatatatgtttattattttttaattttgtatttaaatatttagaaagttatttttttttaaatgtgaatttaagtaatcggttagttattttttttttttacgataattttgttttgttttgttttttaattttaaaaaaattgtattatgttttgggataaaaatatttatttaaaatttggttattaaaattggtatgttatgaatatgtaaaagtgtttttttttttatttaattttattttaaatattttaggtagaatattttatatgtttttgtgttggttttttttaatttatgaggtataaataagaataatatttattgttagtttttggttttaattcgttttttgggaaaaaaattggtgattatggagtattagcggtagtttttttaagtttaaaattattttttttttaggtggagtattgtgatttgaattagtttttacgtgttttttttaaagtatgaggggttttttttaggttgattgttggttggataggagcggtggatgaggttagggtgtaggttgttgagttgttttgttgagttgaggtgtttgagttaaagttttttttattatttgtgatcgtgaacgagaggtgttttttcgtgttgtttttagattttatgacggtatttatgagggttagataattagtggttttttgagaaagtggttttttattgattttagatattatagtatttgagaaagtaatttaggtattttagaattagggtatttgttatatgttgtttttttttttttttaattagaggaattatttttgaagaatgagggatatagttgttttttttttttatttttttttttttaaagtaaaatagaatatttggagtgaaagtataaaaataattataaaggaatttttagtgtgttaaattatttggggggtataatatttgtgtggagtattttttgtgttgtttggta

SEQ ID NO: 1540 - DNA, 2442 bp, Artificial Sequence
  chemically treated genomic DNA (Homo sapiens)
tgttttttttttttataattttaattatttaatttatatttatttttattgagttaatgaaagtaatgttattgttggtgagagtatatttaaggaaaaatatttttttttattttatataattatattttatttttttaaatttatattgatatatagttgaaaagttggttattattttttttttttgttatttattaatggtgaagtattgtgtttttttttgtaggtgttttaagattaggatgatatggtttttttagagtgtttttaggagggttatggtgtataattttataattttagaataaggaaataaaatatttaaaataaagatgtgaagaatatttttatagatggtatttataatttttgttataaatttaaattttgatttaattgtttagtattgtttttaataatttattgtatttatttgattttagcgttaagattatattgtttttttgaggttagattgtattttaacgttttgatattttttttaaatattaataaaaaagtggattttttgaagtttagtaattattagttggttaatttgtttggaaaattgtaatttttttttaagatttttaattttttatttaggattttaatttattttttaaaagattatttttataagtagtgttttatatggtaagtattaattacgtggatttgggggtaatagttttgtttttttattttttttttaaattttggaagttaatagatgatataaagtttagtagagttaatgattttaattttaattgttattatagtttttaataattgtatatttaaaatattaattagaaattaagagttttaatttgatttcgtaaaaagtagattgagaaatgattttaggtttttattatgatttaatgggttttatgtatttagaatgattttttttttaaggtaggtaaagagttttaatagattaaatatagagaagtatgttgaaagttatggtaggtcggcgttaagtaataaaattgaatttttagtttgttcggtattagttatgtgttttttagatgtcggaagaggagcgaaggaggattagaaatttttttattttaacgatggtttttttttttgtgttttattttattttttcgtttttagttatttttagtttttaattcgggttttatatttattttggttttagagtatagatttttttgtagttgggtcggcgcgttgcggcgttgaggagttgcggcgcgttttttttatcgcgattgtttatttgttaggcgttacgtgtgggcgacgttattgggttttatgtttttatcgtcgttatttgtttacgtgagttgttttttttttatcgttttcgttttttttattacggagaaaattttgtacgtttttttttgtgaaaagtagagtttttttttttttattattattagttgatgaggaaagaaaatgtttgttcgtatatttgcgtcgtattaggaggaggagggaggttatataaggattcgggttgtttagggggtggtttgaaaaaggaggcgttcgtatttaaataagaatgtttgaattaatgtagtttaatttaaagagttaattaggagtttataggtgtttaagtttgtagtgcgttgttagtgttatgttaacgacgtattttagttatataggttgttagttttaggtttttttataaatattttatgtttttgtttttttttttcgttggtaatagttttatggtgagaaaatttacgaagagtaataggaataatttttatgaaaatacgtagaatttttgatttaaggttattggttgtaagtttagtatacgtattaagtatgggttaaagatatgtttttttttttagaaggcggatgagtaataggtgtatttttttttatttatagttgtttttaaagcgaaaaggagtgaattcgtttatgatttagaggaagagagatgggttaaaagatgttaagttaaggattaatattcgttatattttggttttttgtaagttatgtaataagaggtttgagattttattaattttggagatttatttgggtataattgaaattataataaatttggtgtttagtgttatttttttttggtagtgttataaggtaattttaagggattagtatatagatattgttttagtttttttttgttgtttattttagtttatgtagtattgattaaaaattttggaatttagattgtttaacgtttatatttatatttaatattaaaatttattattgatagtttgtttttttaaatatttatgaaatttagtttttaatttgttttttatttttatatttatgtttttattatattttgtttaagttattaattggatattttaaatatttatatgtataaaatttttgtttatttatttgttttttttttttagtgtcgaa

SEQ ID NO: 1541 - DNA, 2442 bp, Artificial Sequence
  chemically treated genomic DNA (Homo sapiens)
ttcggtattagaaagaaagaataaataggtaggtagagattttgtgtatataggtatttgaaatgtttaattaataatttaagtaagatatggtgaaaatatgaatatagaagtgagggatagattgaggattagattttataaatatttagaaaggtaaattgttagtaatgaattttgatattggatgtagatataagcgttaagtagtttaaattttaaaatttttagttagtgttgtatgaattgaaataagtagtaaaagaaaattaaaataatgtttgtgtgttgattttttgaaattattttgtaatattgttaaaggaaaatggtattgagtattaagtttgttatagttttagttgtgtttaagtgagtttttagagttggtgaaattttaagttttttattgtatggtttatagagaattaaggtatgacggatattaatttttggtttgatattttttgatttatttttttttttttaggttataagcgaatttattttttttcgttttgaaaataattgtgaatagaagaaaatgtatttattatttattcgttttttgagagagaaaatatgtttttaatttatgtttgatacgtatgttaaatttgtagttagtagttttgggttaggagttttgcgtatttttataagagttgtttttgttatttttcgtgaatttttttattataaaattgttgttaacggggaagagggataagaatatgaagtgtttatgagggagtttgaaattgataatttgtgtaattggagtgcgtcgttggtatgatattggtagcgtattgtaaatttaagtatttgtggatttttaattagttttttaaattgaattatattaatttaggtatttttgtttgaatgcgaacgtttttttttttaagttattttttgggtaattcgaatttttatatgattttttttttttttttagtacggcgtaggtatgcgaatagatattttttttttttattaattggtggtaatgagaaaaagagaattttgttttttataagggaaaacgtgtaagatttttttcgtagtaggggaggcgggggcgatgggaggagagtagtttacgtaggtagatagcggcgatgaaagtataaagtttagtgacgtcgtttatacgtggcgtttggtaagtgaataatcgcggtgagaggggcgcgtcgtagttttttaacgtcgtaacgcgtcggtttaattgtaggaaggtttgtgttttggagttagggtaaatgtaagattcggattggagattagaaatggttagggacggggaggtggggtgaagtataggggagagaattatcgttgaggtgagggggtttttgattttttttcgtttttttttcggtatttggagggtatatagttaatgtcgggtagattgagagtttaattttgttgtttagcgtcgatttattataatttttaatatgtttttttatgtttagtttattgaaattttttatttattttaaaagagaaattattttaagtatataagatttattgaattatagtagaagtttgaagttattttttaatttgttttttacgaagttaaattaagatttttagtttttaattgatgttttgaatgtatagttattagaaattgtaataataattagagttggggttattgattttgttggattttatattatttattggtttttagaatttaaaaaaaaaatgaagagataaagttgttatttttaaatttacgtagttaatatttattatgtgggatattgtttatggaaatgattttttaaagaatgggttgaagttttagataaggggttgggagttttgaaaaaaggttgtaattttttaagtaagttagttaattagtagttattgaattttaagaagtttatttttttgttagtgtttgaaggaaatattagggcgttgaaatataatttgattttagaaggataatatggttttaacgttgaaattaaataaatatagtaaattattagaaataatattaaataattgagttaaaatttaagtttgtgataaagattatagatattatttataagggtattttttatatttttattttaaatattttgtttttttgttttagggttataaaattatatattatggtttttttaaagatattttaggaaaattatgttattttgattttaaaatatttgtaagaaagagtatagtattttattattagtaagtagtaaagaaaaaaaatggtagttaattttttaattatatattaatatgggtttaaaggaataaaatgtaattatatggaatagaaaaaaatatttttttttgaatatatttttattaatagtgatattgtttttattgatttaatgaagatgagtataggttagatggttgaggttatgagagagaagagta

SEQ ID NO: 1542 - DNA, 2386 bp, Artificial Sequence
  chemically treated genomic DNA (Homo sapiens)
ataatttaattattttttagtaatttgagtattgtgttttattaaaaaatattttaaaaaatgagttatttgtagaatttataaaggacgtttttttaaaaaatgaatatattttaaattgtttatataaatagtttttaatatatatattagaattagtaagttaaggttatttttgtaatagtttatttttgataaaattatttgtgaaataaaaaaaagaaaaagaaaaaattttatttgttgagtttttgtaaaagatattgtttaatttgttagattgattttttaattaaaatttaaaataatggaataaaaatttaatagtttaaaggttaaagttagttaatgtatatttttaaatttgtaattgatttatttataagtaaaaatatttataaagtttaattgattttttatttcgtatattgagaaatagtattttgtattttttgaataatttataagtttgaattttaaggtatatatatatatgtgtgtgtgtgtatatatgtgtgtgtgtgtgtgtgtgtatatatttatatatatgttgtatttatgtttaattattttggttataaaggttaaaaggataaagtggttataagttataatgggttggagaatttggatggaatgtggatttaaattattgtgttacgttaatttgttgaaattttattgttaaaattttgtattgttaggtagtaaaatagaagaaaaaaaaataaattgagaaagtgttaatttttaagtaagtttgataaagattgagttttatatgataaatattgttagtaagataggattttgttagtggaagaagtttaaatattaataatttttgttaggttgttgatataattatggtagatattttttaagatgtcgagatgattgttggtatttgttaataattttgttatagtgatagtaataaggttatgtttggaaatgtgatagttttggttttgtgtttttttgagtaatagtttaggtgtttagagaaagtgtgggaaaatttatatttttgtattgttattcgaatatagaaaatataggaggaaaatgagttgttattttaatttttatgatgttttgttgtttagtataattttatagtgcggttttgggtttattggtttatattttgatagataattaagaaagtagtagttttttttagacggtttttttttatgatttgtattttagttagaggcgattagttataaaaaaaatatgatggaaagatggtaagaagttaattagatggatggatggttgattgatagttttttggtattacgattttagattttagattatatagtttggtagttttttataagaattaatttttttgtaggttggtaaagttgttaaatgtgggattatatatagttttatataatttttgtaaagttgtatattttttttaaataagtatgtattttttttaattagggtttgtattaaataagttttaataatttaattataatttgtattattaaatttagtaatattaaaattttagataatttgtaggtatattagttgtgttagtagagaagtgattaaaaagttgagaagtattttgagttagtagagataaagtgagttaataattataatgtttgtgtaaatatgttttggaattttgaattgtatattgtttgtttttaagtaaataaaaatatagattttaaatttttttttcgtttttagattttgtatatatatatttggttattatttttgtttagggtataatatatgtttgtgtgtttgttattttagttaattttgaaatttttaaaaaataaattgttagtgttaagtttttagtttggttatgatattttatagtttttagttaataggagttaattttttataatattttatagtttggaagttttattaatgttttttgtgtattgtatgtcgtgtgtgtgtgtgttgtgtgtgtgtgtgtatatatatatatatatatttgttatatatatattaatatatattatatattagatatatatatattaatatatatattagatatatataatatatatattgttaaaagtaaataatttgttattagttcggtatgtttttatttgtagtttgaaataagaaattttttttttaaattgtaaagatattttagatttgattttaattttgaaatatgaagggtaggtaattattttattatatattgaagttttagtaaggaatattaatttaaggtagaaacgtgagtatatttttttattgtgggtaatgaattttttataaattgaggataattattaaattaatggtaggtttgaatgtttttagttgtttaaaattaaataatatatattttaaagtttta

SEQ ID NO: 1543 - DNA, 2386 bp, Artificial Sequence
  chemically treated genomic DNA (Homo sapiens)
tggaattttaaaatgtatattgtttagttttaagtaattaaaaatatttagatttattattagtttaatgattatttttagtttgtagaagatttattatttatagtaagaaaatatgtttacgtttttgttttgggttaatattttttattggaattttaatgtatagtgaaataattgtttattttttatattttaagattaaaattaaatttgaggtatttttataatttgaaagaaaaattttttattttaaattataaatgaagatatgtcgaattaatagtaaattgtttgtttttaataatgtgtgtgttgtgtgtgtttgatatatatattaatatgtgtgtatttgatatataatatatattaatatatatatgataagtatatatatatatatatatatatatatatataatatatatatatacggtatgtagtatataggaaatattggtgaagtttttaaattgtaaaatattgtgaagagttgatttttattggttagaagttatagaatattatggttaaattggaagtttgatattaatagtttattttttaaaaattttaaaattagttaaaataatagatatataagtatatattatattttgaatagggataataattaaatatatgtgtgtaagatttaaagacggagaggaaatttagggtttatgtttttatttgtttaaaagtaaataatgtataatttaaagttttaaagtatatttgtatagatattgtaattattagtttattttatttttgttggtttaaagtattttttagttttttaattatttttttattggtatagttaatgtgtttataagttgtttagaattttaatattgttaaatttagtgatgtaagttgtgattaaattgttgaaatttgtttaatgtaaattttgattgaaaagaatatatgtttatttaaggaaaatgtataattttgtaaaaattatatagagttatatatagttttatatttaatagttttattaatttgtaaaaaagttggtttttgtagaaaattgttaggttatgtagtttgaaatttggagtcgtaatattagagagttgttagttagttatttatttatttaattggttttttattatttttttattatgttttttttataattggtcgtttttggttaaaatgtaaattatgaggaagagtcgtttagaaaaagttgttgtttttttaattatttgttagaatatggattagtggatttagggtcgtattgtagagttatgttaagtagtaaggtattatgggaattggagtgatagtttattttttttttgtgttttttgtgttcgaatgataatgtagaaatatgggtttttttatattttttttgaatatttgggttattgtttaggggagtataaagttaaaattgttatatttttagatatggttttattgttgttattatgataggattgttgataaatgttagtagttatttcggtattttgggaaatgtttgttatgattgtgttaatagtttgatagaaattgttaatgtttaaattttttttattgatagaattttgttttgttgataatatttgttatatgaaatttaatttttgttaaatttgtttaaaaattaatatttttttaatttattttttttttttttgttttattgtttagtagtgtaaaattttagtaataagattttaataagttaacgtaatatagtaatttagatttatattttatttaaattttttaatttattataatttgtggttattttgtttttttgatttttgtagttagaataattaggtataaatatagtatatatataaatatatatatatatatatatatatatatatatatatatatatatatatatatgtatgttttaggatttaaatttgtgaattatttaagaggtataaaatattattttttagtgtacgaggtggaaaattaattaaattttgtggatgtttttatttataagtaaattagttgtaaatttgaagatatgtattaattaattttgatttttaagttgttaaatttttattttattattttgaattttgattaaaaaattaatttgataagttaaatagtattttttgtaggaatttagtaagtagagtttttttttttttttttttttattttataagtgattttgttaaaagtggattattatagggatagttttaatttgttaattttgatatatgtgttagaaattatttatgtgagtagtttaaagtatatttattttttaaaggaacgttttttataaattttataggtggtttattttttgaaatattttttaatgagatataatgtttagattattagaaggtagttaaattgt

SEQ ID NO: 1544 - DNA, 2300 bp, Artificial Sequence
  chemically treated genomic DNA (Homo sapiens)
attatcgtttattggatttaaaagttttattttattttttatttttatttttttgggaagttttaggatatatttttttttttttttttaataggtacggatatttttattttatttttatttttttttattttttattatattttaagttttagggtatatgtgtataacgtgtaggtttgttatatatgtatatatgtgttatgttggtgtgttgtatttattagtttattatttatattaggtatattttttaatgttatttttttttattttttttattttatgataggttttggtgtgtgaagttttttattttgtgtttaagtgtttttattgtttaatttttatttacgagtgagaatatgtagtgtttggttttttgtttttgcgatagtttgtttagaatgacggtttttagttttatttatgtttttataaatgatatgaatttatttagatgtatttttatttttttatttattattttgaaatttttaaaatagttatttagtattttttttttaaacgtgtttgttttatttttatttaagtttgttgtaattatatattgaatatttttaaattttgtttaagttgattttattatttttgttttaaattttaattacgttttaaatgtataaaaattatgtattatatataattatgaattataaataattaaatgtatttatttttaaaaatatgattgaagaaatttttttttttcgtaattttttttttaagattaaatgagtttttagtgtttgtttgatatacggtaggtttttaataaatgaagtatattttttatatttttttaaataaatagttgtttttttaaatttagatatgagtgtttagtaggtatgtatttttttgggttggatttattttatggatagttgttaaagattgatttttttatgttaattttttgaatattgtgtttgattgtgttgtaagttaaatagtataggattaaatgtttttatttttgagttgtgaagtgttgaaattgattaagaaatgaaggtagaatgttcgttttttgggagaataattagttagtttatgttgttgttatttttggttgtcgattggaatgtagttgttaaggtagttgtttaattgtttgtttaatttgaaaggatattgttaaatggtaaatattttttataataatattttatttttgttaagaataataatagtgtattttattgagttttaatggcgtgttaaatacgatagatttattattaggtaggtttataatttggattgaatatggatgtttatttttattttttatatatttagaaaaagaataaatgggtttttaaaggaagtttttatataaaatatttttatagtttaattatttgttgaaatgatagtatattaatttgagaaaatgaaatattttaaaaggaaagatgagagtttagaaatattataggaaaaaaataaggtttaagtattttaaatttttttaatgtggtttaagagagatttaatttatatttgtttaggataggtgagggtagtagtaatataaggaaatatattatttgttgaattttttgtaatttatgggttttaggatttttgagttatgtagttaatttatattgttaattagaatgttgatattaagtatttaataaataattatgttgaatttgatagattgtgaattaggtgaggtggggtgggaggttattagttgttatttaatggtaaaatcggtatgttaaatgtaggtagttaaaattaagaaaatatatttaaatgcggaagtataattttttattagaagttagtaataattgttatttatagaagttattgtgtaatttttataaatatttattaagattgtagaggtgaggggtggtggggggtgtatttttatttattaaattttatagttaaagttgaagtagagatgtttttgaaggtgaattgggttaattaaaggtatggttagtggagattttaatttattttttttttattgtttattagatgttaattaaattataaatgataatagtttaatagtaaaatgtatgtatttttataaagttgatatgattttttggataaagatagataaagtttaatatgttggataatggttattgagggtattaagatttgtgatttttttttttagggatatagaaaaatagtaaatataaattatggatgaaatttataagattatttttatagaaagggtttagttgttggagaaaaaattggttgtgtaattgattgaattgaagttt

SEQ ID NO: 1545 - DNA, 2300 bp, Artificial Sequence
  chemically treated genomic DNA (Homo sapiens)
agattttagtttagttagttgtatagttagttttttttttaatagttggattttttttgtggaagtgattttataaattttatttatgatttgtatttgttgtttttttgtatttttgaaaaagaggattataaattttgatgtttttagtgattattatttagtatgttgaattttgtttatttttgtttaagaaattatgttaattttgtagaaatgtatgtattttgttattagattgttgttatttgtgatttaattaatatttagtaaatagtagagaaaaagtaggttagaatttttattggttatgtttttgattagtttagtttatttttaaaaatatttttgttttagttttggttgtggggtttaataagtgagaatgtattttttattattttttatttttgtagttttgataaatgtttgtggggattatatagtaatttttgtgaatggtagttattgttgatttttaatagaaaattgtattttcgtatttgaatgtgtttttttaattttgattgtttatatttagtatatcggttttattattaaataatagttgataattttttattttattttatttggtttatagtttgttaaatttaatataattgtttgttaagtatttagtattaatattttaattaataatgtagattaattgtatgatttagaagttttgggatttataagttgtaggggatttaatagatgatgtatttttttgtgttattgttgtttttatttgttttggataagtatgagttaagttttttttaggttatattagagagatttaaaatatttaaattttattttttttttgtgatatttttagatttttatttttttttttgagatattttatttttttaagttaatatgttgttattttaataaataattaagttgtagagatgttttgtgtagaggttttttttgggagtttatttattttttttttaaatatatgaaaaatggaaatgagtatttatgtttagtttaggttgtgaatttgtttagtaataaatttgtcgtgtttggtacgttattggagtttaataaaatgtattgttattgtttttagtaaaagtaaaatgttgttatagaaaatatttgttatttggtagtgtttttttaagttgggtaaatagttaaatagttgttttaatagttgtattttaatcggtagttaagagtggtagtaatatagattggttgattatttttttaaaggacggatattttgtttttattttttgattagttttaatattttatagtttagaaatgagaatatttaattttgtattgtttagtttgtaatatagttaagtatagtatttagaaaattaatataaaggggttagtttttgataattgtttatgaaatgaatttaatttagagaaatatatgtttgttgagtatttatgtttaggtttaaagagataattgtttatttggaggggtatgggaggtgtgttttatttattgagaatttatcgtgtgttaggtaagtattgggaatttatttagttttagaaaagagattgcgagaaaagagaatttttttaattatgtttttaaaaataagtatatttaattatttgtaatttataattatgtataatatataatttttatgtatttaaaacgtggttaaaatttaagataaaaatagtaagattagtttgagtaaggtttgggggtgtttaatgtgtggttatagtaggtttggatggggataaagtagatacgtttagaaaagaaatattgagtaattattttaaaagttttaaggtgatgagtaaaagaatagaaatgtatttagatgagtttatgttatttgtagggatatggatgaagttagaaatcgttattttgagtaaattatcgtaaggatagaaaattaaatattgtatgtttttattcgtaggtgggaattgaataatgagaatatttggatatagggtggggaattttatatattagggtttgttataggatgaggggagtggggagggatagtattaggagatatatttaatgtaaatgatgagttaatgggtgtagtatattaatatggtatatgtatatatatgtaataaatttgtacgttgtgtatatgtattttagaatttaaagtataataaaaaataggaaaaaataaaaataaaataaaaatattcgtatttattaaaaaaaaaaaaagaaatgtattttagagttttttaaagaagtgggagtaaggggtgagataggatttttaaatttaataaacggtggt

SEQ ID NO: 1546 - DNA, 2441 bp, Artificial Sequence
  chemically treated genomic DNA (Homo sapiens)
gttttattttggtatataaatttaaaggataggaaatggaatagaataataaaaataaatttttaaatttagaattattataaatagagtagtataaagaggtagaaagttttattttatggtatgttgtatttgttttaaatatttgatttaaaattagatattgttggaaatattatatgatttttttattggtaggagttattttgaaatgattgtaatataaataggagtagagaagtttattaaatttttttttaaggatatttatgaattagggtattataaaattggaaatattgaaaaggtttttaaagatattgtttaatagtgaaagaaacgaagaagaggttatatttttgtttatttttcggttttttttgtaggttttttttttttatattttaaagaagttgttattagttttaaaaaaaaaaaaaaagtttcgggaaggtgattagggagggtgacgtagagttttgttaataggttaatttaagaatagttgttaaaattatatagaggagagttaatcggggagataattatttgttgtgttgtaggagattattaagtgagttttttaaggttataaatttaattatttagttgtatgaaatagttaattggtaagaaaatagttatgattttttgtttatttatgtttttgtttataggttattttttagattgaatggttgaatatagtattatagatttttatattataggaatgaaagtaaaatgtttttattaataataaatgttttttatcgtaaataataatttaaatttttatttttataaaagtttgatatataagaaaaggaaataaattagattttgtttatttaatgagataaatattttttttaagtgtgtatgttgcgtgtttttagttagtaagattttttttttaaggaatgatgaaagttaaaatattttttaaagtataattattaatagaaaataggaagttaatttatttgttttttgtgttagtattttattatttttttattcgtgtttttgttttttaggagggttaattgttgagtttaggtttttagaagggtattgaattgttttagggtttgttttagttgagttatttggtttgagaatttttgtttcgaaagggttatttggttgattaggttttttaaatagttttgcgtttggaatatattgtttttttattgtttttagtcggtacgtagggtttgtattttcgtgtgtatgagtttatatttattggtagttgtgttttgttttatttcgggagttagcgattttattttgttgagacggtttgtattaatttttttggaatttattagtttttgtaatggaatattattatggtaattgaagagtttgtgagttatttggattgtaagtttttaattgtgtatatagggggattttgttttgttaggaagttttaataagtgtgttataaggatttagaattaatttatttgtttatttttaaattataatagcgggagttgttattacgagtgtttaaggtttatggtaaaaaaatttcgagaatttttaatattttgaaatagattaaatagagattttgaaattaggtattattcgtatacgtgaaaatgtttagtgatttaagtgtttgtttgtggtggattgtttttgtgaatgattaaatttatattttttttaaagtggatgtttaagtaaataaagatcgtggtagaattgtgttttgtttacggtttttatatttaatttattttttttaatagggtggtggtttaaattatatttttattttattaggaattaagtagatttattatagtaaaagaatgagttttattcgattttaaatattttaatattaagtaaatatttttgtagtatataaaatgaataatttatttatagattgatttatttaaaagtttaaagtaatttttagattgagtatatttattagtatttttttattttaaaaaagttattagaaatttaatagtttagttatagttaagttaataatttagttcgattttaaagtatataaatattgtaaaggaaaataagataaaattaaattatattgttaaattgatataattgtagtatttttgagaatagatttttttattaaaattttttttggtgaaataattattcgatgtttatatatttatatatttattgttaaaggtaggattttgttaatattattataaaattatgattttattatcggattaaatagaaataaaagataattaggtataaaaatgtttaagaagaaaattaatgattaattagtaagtaaagaaatattggaatgttaagtatgaagtatgtttaataaattatgttaagtataaagtatgttttaattagtttatataatatagtttgtattttattaaattaatttgaaataaatatat

SEQ ID NO: 1547 - DNA, 2441 bp, Artificial Sequence
  chemically treated genomic DNA (Homo sapiens)
atatatttattttaagttaatttaatgagatgtaaattatattatatagattagttaagatatattttatgtttaatataatttattaagtatgttttatatttaatattttaatgtttttttatttgttaattggttattgattttttttttgaatatttttgtgtttgattattttttatttttatttaattcggtagtaaagttataattttgtaataatattaataaaattttgtttttagtaatagatatgtaaatatataaatatcggatgattattttattaagaaaaattttagtaagagaatttatttttagaaatgttgtaattatattaatttaataatgtgatttaattttattttgtttttttttatagtatttgtgtgttttaagatcgagttaaattgttaatttggttatagttaaattgttaaatttttagtgatttttttaaggtaaaaaaatattaataaatgtatttagtttagaggttattttaaatttttgagtaagttagtttatgaatgaattatttattttatatgttataaaaatgtttatttagtattgaggtatttggaatcgagtagggtttatttttttgttgtgatgagtttgtttgatttttagtagaatggaagtgtgatttaagttattattttgttgaagaagatgaattgagtatagagatcgtgagtagaatatagttttgttacgatttttatttatttgagtatttattttgagggaaatatgggtttaattatttataggagtaatttattataggtaaatatttgagttattaaatatttttacgtgtgcgaataatgtttgattttagggtttttgtttagtttgttttaggatattgaggattttcgggatttttttgttataagttttaggtattcgtgatgataattttcgttattataatttaagagtggatagatgaattgattttgggtttttgtggtatatttgttaaaattttttggtaggatagggtttttttgtgtatatagttgaaaatttgtagtttaagtgatttataggttttttagttattatggtgatattttattataggagttgatagattttagagagattggtgtaagtcgttttagtagagtggagtcgttggttttcgaagtgaaatagaatataattgttagtgggtgtgagtttatgtatacggagatgtaggttttgcgtgtcgattggaagtagtgggaagatagtgtattttaaacgtagagttgtttggagaatttggttagttagatggttttttcggagtaggaatttttaggttaagtggtttaattggagtaggttttggaatagtttagtgtttttttgaaaatttgggtttagtagttaatttttttggaaggtaagaatacggatgaggagatagtggaatgttggtataaaggataagtaagttggttttttgttttttattggtggttatgttttaaaaaatgttttgatttttattattttttaaaaaaaaaattttgttaattaaaaatacgtaatatgtatatttggaagaagtatttattttattaaataagtaaagtttgatttgttttttttttttatatattaaatttttgtaaaaataaagatttgggttattatttgcggtaggaaatatttgttgttagtggagatattttatttttatttttatggtgtaagagtttgtaatattgtatttagttatttagtttgaaaaatggtttgtgggtaggggtataaatagatagagagttatagttgtttttttgttagttaattattttatataattaaatgattgaatttatagttttaaaagatttatttggtaattttttatagtatagtaaatagttattttttcgattagtttttttttgtgtggttttgatagttgtttttgaattagtttgttaatagaattttacgttattttttttggttattttttcgagattttttttttttttttgaagttaatggtagtttttttagaatgtgagaaagggaagtttataagggagatcgaagaatgagtaagagtgtaatttttttttcgttttttttattgttaaatagtatttttgaaagtttttttaatatttttagttttataatgttttgatttatggatgtttttaaaaggaaatttagtaaatttttttgtttttatttatattataattattttaaaatagtttttgttagtaagaaagttatgtagtatttttagtagtgtttggttttaaattaagtatttgaaataaatgtagtatgttataaaataaagttttttatttttttatgttattttatttataatgattttaggtttgggggtttgtttttgttattttgttttattttttgttttttagatttatgtattagaataaagt

SEQ ID NO: 1548 - DNA, 2311 bp, Artificial Sequence
  chemically treated genomic DNA (Homo sapiens)
atatttgtgtttatttatttttttttgttttttataagaataattattattgtgatttttttttatattttattatttatttttttaaaagaatattttttattgtttaaacgttatataattataaaagtagagagattatatttatttttagttttagaaattatgaattgatagttaattttttttatttatatttttatttattttttttttaatttttttgttaaattatgttatttagatgtcgggtattatattataggattttttaatatattatggaaattgattattataaagtttttattgttagttttttttttttttaggttatggttgtttttttttttttggaatattttgatgttaaatgatgttttaggaattataaaattaaagtaagaagggaggtataagtttatttattttattattttaaataatgtaattgtaataaaaagtattttattttttttttttttatatttttttgaatttgtttgtattaattgaagtttattttttattttgattttgtttgtagaaatgtttatttttggggaattggttttagttttatttcgttttaattaggttaaaaaggatgatagttttttttttagtttaaaggaagtagagagtagaaataaatttattgaaaattattatgttagtagattaaatttttgtgaagttggagggtttaatataaattatagtaaatatagttttagttattttagttttagatatgttagtataaaaatttttttttttatttttatttgtgtttttgtatttatatttatattggataatatgtaaagatttatatatattttttttatttttaggaatttttgttttataataaagattaagagttttttatagtagatttataagtttacgttttttgtatttgggataattattttttattattttaagaattgttaatttagaattttttatttagtagtgtagtaatttaaggaaaagtgttgtttatttttgttagtgggttagtagattttttagcgtcgtttgtttttttttcgttttttttaggatgttttcgtattgttgttgtagagtcgtagttttttgaatataggaatttttgtttataatttttttggtattggttgagaaggtagtgatcgcgttgtttagtgattttagggtttggtagagattttaagaagagtgcgagaagaatgtagtgaaagtataggagttaacgaggtttgtatttttttttgatatcgattatcgtaaaatatttttttttagttataataaataggaatagtattaagaatgggtataaatatatagtttgatagaagaaatgagatttagtgtttaatagattagtagggggattataggttataataatttattttatattttaaaatagttagaaaatagtttgaatgttttttgaataaataaaatataaatattttaggtgatgaaggttttaattttattgattttatttttataaattatatgaatatattaaattattatatgtgtatttttaaaaataaataagagttatatttattttaaaaggtttgtgtttatgatttgtagtaagatatagtgaaaatgagaagaaagtgattttataaatatagaaattaaaaacgaaaatggagatatttttttaaataagaatgtattgttatttatttaaaaatttttaatttttttttaataatttaggtaatttgtgaagattattagttattttatgttaaatacgtatttaaaaattttatttttaatttataaaatttatatgtaatatgttataattattttaaaaaatatatataaaaagaattatggttgaagaagttattgtttattttaatagtaataataataataataataataataataataatgatatagtgttttagaatgtggtaggttttgtattatttgttttttatgtattgattttttttatttttttgagaattttaagaggtatgttattttattatttttattttatagattaggaaattaagatatagaaaaataatttgttttaggaaatttaaatatcggaaaagtagaatattagtttttttggttttttattattaatttagttgtttataaaaataattttattatattgaatttttttatttttttttattttttgtattaagaaattataaataagtaacgtaaaagtgtatttttattattaatatttaaataatagaaattttatttttttttttagatggtttttgttaatggtttgtttttt

SEQ ID NO: 1549 - DNA, 2311 bp, Artificial Sequence
  chemically treated genomic DNA (Homo sapiens)
agaaaataagttattgataaaggttatttggaagagggagtgagatttttattgtttaaatattgataatgagaatatatttttgcgttatttatttgtaattttttaatataaaaaatgaggaaaagtaggagaatttagtgtgatgaaattatttttatagataattaagttaataatggaggattaaagaggttaatattttattttttcgatatttagattttttaaagtaagttgtttttttgtgttttgattttttaatttgtaaaatgaaggtaatgaaataatatattttttagggtttttaggaagatgaaaagagttaatatatgggaagtaggtaatgtagggtttgttatattttgaggtattgtgttattattattattattattattattattattattattattgagatagatagtagtttttttagttataattttttttatatgtattttttggagtgattatagtatgttatatgtgggttttgtaagttaagaatagggtttttaaatacgtatttagtataaaatgattaataatttttataagttatttaaattgttaagggaaagttgaaagtttttagataaatagtagtgtatttttatttgaagaagtgtttttattttcgtttttgatttttgtatttatgaagttattttttttttatttttattatgttttgttgtaaattatgggtatagattttttaaaatagatataatttttatttgtttttgggggtgtatatgtgataatttaatatatttatataatttgtaaaagtaaaattagtggaattgggatttttattatttaaaatatttgtgttttatttatttaagaaatatttaaattattttttagttattttgaaatataggatagattattgtaatttatagtttttttattaatttattgaatattaagttttattttttttattaaattgtatatttgtatttatttttagtgttatttttgtttattatgattgagggaaaatattttgcgatgatcggtgttaaagaaaaatgtaggtttcgttggtttttgtgtttttattgtatttttttcgtattttttttaggatttttgttaggttttggagttattgagtagcgcgattattgtttttttagttagtgttaggaaggttgtgaatagagatttttgtgtttaggaggttgcggttttatagtagtaatacgaggatattttaaggagggcgaaggagagatagacggcgttggagaatttgttggtttattggtagaggtgagtagtatttttttttgagttgttgtattattaaataggaaattttggattagtagtttttaaagtgatggggagtagttattttagatgtaaaagacgtgaatttgtgggtttattgtaggaaatttttgatttttgttataaggtaaagatttttgagagtggagaggatatatatgggtttttatatattatttaatataaatgtgagtgtagggatataaatgaaaataaaaggagggatttttgtgttggtatatttaagattgagataattgaggttgtatttattatggtttgtgttggattttttaattttataaaggtttaatttgttagtatgataatttttaataaatttgtttttgttttttgttttttttaggttagagaaagaattattattttttttgatttggttagagcggggtgaagttaaagttagttttttagaaatggatatttttgtagatagagttaaagtggaaggtgaattttagttaatataggtaagtttaaggaagtgtgaggaaggaaaaaataaaatgttttttgttatagttatattatttaaaataataaaataaataaatttgtatttttttttttgttttggttttgtgatttttgaagtattatttgatattagggtgttttaaaaagaagaaagtaattatgatttgaaagggagagaaattaataatgagaattttgtgatgattaatttttatgatgtgttagaaaattttgtaatgtaatgttcggtatttgaataatatggtttggtaaaggagttgaggaaaggatgggtaggaatatagatgaaagaggttggttattagtttataatttttgaggttggaaataggtataatttttttatttttgtaattatatgacgtttgggtaataaagggtgtttttttaaagaaataagtaatagaatgtagaaagaagttatagtaatgattatttttatggaagatagaaaaaaatgaatgagtataaatgt

SEQ ID NO: 1550 - DNA, 2454 bp, Artificial Sequence
  chemically treated genomic DNA (Homo sapiens)
ttttgggattaagggattgttttattttagtttttcgagtagttgggattataggtgcgtgttatttagtttagttaatttttgtattttttgtagggatagggttttattattttgtttaggttagaaggattgtttgagattagtttgggtaatataacgaatttttgttagaaagggaaggggaaaagaaaggaaaggaaaagggaaaggaaaaaagaaaggaaggaagaaagagataaatataattgtgttatttagagaatagaggtattattgggtatggtgtcgggagtttgtagttttagttattgggggagttgaggagggaggattttttgagtttaggagatggaggttgtagtgagttataattatattatcgttttttagtttgggtgatatagagagattttgtagtaaattttaaaaattaaaaataaaaaagagaatagagatgttaaaaatttttaaggaattttattttgtgtttaaattacgagaattatttgtggttaggtgtgtttatggttgtattaattaaaagcgtgttatagttttattattggggaggttaaagagggaggatttttttgagttttggagttcgaagttaatttgggtaatatagttaggttttataattttttttttatttattttttttttttattatgtaaattttattatatagattttataatagaaaaaaaaaagaaaaagaaagaaaaaaggcgggcgtttattttgttttgtatttagtagttttaggtaagtgatagaataatttgaaaatttggtttagagggaggaaacgtagtggttagggattagaagcgcgtgagggatttatgaagtatttattttgtaagtattagtttttttttttgggagagatattgggtttgtttacgtttttttgagtttatggttaagattttcgttgggtattagcggatttttggtgtttagagttcggttttttttatcgggtgcgttgggaaaagggttgtttttgatagaagggatattttaagagtagtttaggaatcggtgtatttgggcggtttcggaagaagtcggggtttttggaggcggaggcgaggtttgggatttaataagaagggcgcggttagagaggaggggttggttaaaagtttttgaaataaggtttaggtagaatcgcggttttagttttttagttttagttcggtttttgggtttgttgtggtgtttttgttttttgtaggatcggtcgtagtatggacgtttttaggcggttttcgacgttcgtgtaattgatgtagttaaaagtaatgttagtggaggtgttcggttatttttttaagcggtttttttggttttattttgagtttttgaagaattcgaaggtagttcgttttgaggtttggttggtggaaaagattttcggtgagtggattaagaaggggtagtttttatgcggtttttttttgttatttatatttatagtttatatattttggttgcgttttagggcgatttttattagtagttaatgttttttggttgttttttttttttattttttttttttaagattttcgggagttatcggttttttatagtttttttgttattcgcgtaggtcggggcggagaacgtatttcgtacgtttagggtatgttttaaattttgatttacgtgaatcgattggattttaacggcgaggttgagattttggtatttgggaggtttttttattaggaggatataattaagatgattatgaatttggttgattattatcgttagttttaggcgaaaggtacggggttgggaatagggttatttggagtaaattttggtttcgtaggagtgattttggggttttttggttgttggggcggtagtttcgtttttttagtcggtttgcggttggtgggtgggggagggggcggttttcgttgttacggatttagaaggttaaattgaattttcgttttgggatttttggtttttattttcgtaggtcgtttgggtgattgtttttttttggagaggatatagagatatagttgtggtttttgtatattgttttttttttaggtttaggaaaggttttcgtttaggatgtcgttatttagaaggtcgagatttagcggtttttaatagaagttcgggaggtcgggacgtagcgttcggtggaggttcgggaggtcgggatttagcgttcggtggaagtttaggaggtcgggatatagggtttttcggtggaggtgtaggaggtcgggatttagtagtttttttaggttgttaataagtcggggatttagcgatttttcgaagttgttagtaaggtagtgatttagcggtttcgcgaggatgttcgggatttagttattagattatgaaggtattttaggttttggagttagagttagttaggggttaaagtgaaagttcgtattttcg

SEQ ID NO: 1551 - DNA, 2454 bp, Artificial Sequence
  chemically treated genomic DNA (Homo sapiens)
cggaaatacgggtttttattttaatttttgattggttttggttttagggtttgagatgtttttataatttagtaattgggtttcgggtattttcgcgaaatcgttgggttattgttttgttggtagtttcgggggatcgttgggttttcgatttgttggtagtttggagagattgttgggtttcggttttttgtatttttatcggagaattttgtgtttcgattttttggatttttatcgaacgttgggtttcggtttttcggatttttatcgaacgttgcgtttcggtttttcggatttttattgaagatcgttgggtttcggttttttgagtggcgatattttgggcgagggttttttttgagtttggaagaagagtagtgtgtagaggttatagttgtgtttttatattttttttaaaaaaggatagttatttaagcggtttgcgggagtaggagttagaaattttagaacgagggtttaatttggttttttggattcgtggtagcgagaatcgtttttttttttatttattaatcgtaggtcgattgggagggcgagattgtcgttttagtagttaggaaattttaggattatttttacggagttagggtttgttttaggtagttttatttttagtttcgtatttttcgtttggagttggcggtgatagttagttaggtttatgattattttgattgtgtttttttggtaagaaggttttttaaatattaagattttagtttcgtcgttagggtttaatcgatttacgtgaattaagatttgggatatattttggacgtgcgggatgcgtttttcgtttcggtttgcgcgggtagtagagaggttgtgagggatcggtggttttcgggggttttgggaggggaaggtggaaggaggagatagttagagggtattggttattggtgaggatcgttttggaacgtagttagaatatgtgggttgtgggtatgggtggtagaaagaagtcgtatgggggttgtttttttttggtttatttatcgaagattttttttattagttaaattttaaggcgaattattttcggattttttaggaatttagagtggaattaggagaatcgtttagggaggtgatcgagtatttttattggtattgtttttggttgtattagttgtacgagcgtcggaaatcgtttgggagcgtttatgttgcggtcggttttgtaggagataaggatattatagtaaatttaaaggtcgagttggagttgggagattagaatcgcggttttgtttgggttttattttaagggtttttggttagttttttttttttagtcgcgttttttttattgggttttaggtttcgttttcgtttttaggagtttcggtttttttcgaggtcgtttaagtgtatcggtttttgggttgtttttagagtgttttttttgttaggagtagttttttttttagcgtattcggtaggaggaatcgggttttgggtattaggaattcgttggtgtttagcgggagttttaattatggatttaggaaggcgtgggtaagtttagtattttttttagaggaaagaattaatatttgtagaatgaatattttataggttttttacgcgtttttgatttttggttattacgttttttttttttggattaggtttttagattattttgttatttgtttgagattgttgagtatagagtagaataagcgttcgtttttttttttttttttttttttttttttttgttatagggtttgtgtagtgagatttgtatagtaaaaaaaaaaaatggatagaaaaaaagttatggggtttggttatgttgtttaggttggtttcgaattttagggtttaaaaaaattttttttttttagtttttttagtagtgggattatagtacgtttttaattaatgtagttatgaatatatttaattatagatagttttcgtggtttggatataagatgagattttttgaaaatttttgatatttttatttttttttttatttttaatttttaaaatttgttgtagggtttttttgtgttatttaggttagggggcggtggtgtgattatagtttattgtagtttttattttttgggtttaagagattttttttttttagtttttttagtagttgggattataagttttcgatattatgtttagtgatgtttttgttttttaaataatataattatatttgtttttttttttttttttttttttttttttttttttttttttttttttttttttttttttttttttttgataagggttcgttatgttgtttaagttggttttaagtaatttttttggtttgggtaaaatgataaaattttatttttataaaaaatataaaaattagttggattaggtggtacgtatttgtagttttagttattcggaaggttgaggtgggataattttttgattttagag

SEQ ID NO: 1552 - DNA, 4898 bp, Artificial Sequence
  chemically treated genomic DNA (Homo sapiens)
aatttatgtatttttttttcgggagggttttatttttttagtgttttgattttattttttaggtattgagattatagttgtggtttagttgtagaagttagtttagtagattggttttttgttagagataggaagtgggggaagagttgtgcgttttgttggttattaaggaggggtgggcgttagaggttggagttgggttagattttgtggttttgcggaatgaattgtaagggaggagttgtgagttggtttgttttattttgaagggtattgtgaggggtagagttcgtgtaaggtagttttgttttttttgttgtttggaaggttttggggtggagagtggggaataagttttggaaggtaggaaagaatattgaggtgggagtttggaaagttgggatttggtaaggttttgttattaatttattatatgatttgtattagtttttttttttttttggtttttgttttttaatttttgaaattggaaaatgtattgtattttttgtggtagatatatttttagggaatatattagtagataagttagtttttgtttttagggttttttattttattaatagatgagtaaatatagaataggttaagtgttgaaaaagtttgggtagaataataaaatggtgttgggggtagagagtgagaagtttgggacggttttttttagaagttgatataagtagaagaaacgaggaaagggttaatgtgggtatttaggggatgtatattttgggtagaggaaagagtaagggtaaaggttttgaggcgagaaggtgtttggtaaattaatcgagaaaaggaagtagtatggttggtagggaataagtaaggggagatgagggttaaggtaggtggggtttagtttatggagattgagggattttgcgttttattttgaattgatcggtgggtttcggggaagttgggtttgggtttgggtgtagagtttatttggtgttgtgtatatgtgtgtgtgtgatagtgttgggtgggggaatatttttgatttttttttatttattttggttttttggataggttttttaggaagagataataatagggtcgggtttagggtgaggtatgtgaaatttggagtgaatgaggtatttggtttaggtttaaaatttaagggggtattaaaaaatttagtaattaagataaaataatatttttttgtaatatgtataaaaatttaaattaatgttaaaaagtttatgataaataaaatgttaatattttagataaagataggatttgattttgaatttgcgtgattaattattttaattttggttttgtttttaatataattttatttaaaaaaaataaggtagttggtttaaagaattgtagtttgtttatttggtatattaaaatattgttttaaaatattttttattagtttgggtacggtggtttatgtttgtaattttagtattttgagaggttaaggtaggtagattatttgaggttaggagttttagattagtttggttaatacggtaaaatttcgtttttattaaaaaaaattagttaggtgtggtggtaagtatttgtagttttagttgttttaatttgggaagtggagattgtaatgagttgagattttattattatattttagtttggcggatagagtaaaattttgtttttaaaaaaaaaattttttattttggtattttcgaaattttgtatattaggtgagtgttttatttattttattttagttttggttttgggttttagtgtttattttttttgaggttgagaggtaaagggatttttttaaagaaatatagtagatggtgggtttggaaattgggtttttatgttaggtttttagtttggttattatattttattatgttttgaattggaatgttgattttaatgtgttgatttttaaaaattttttatttaagtataatagttatataaataagtgtttgtattataaatgtttagtttgttgtatttttataaaatgagtatatttgtataattagtatgcgtgattaaatttaaagtataatttatatttttaataaaatagatattagtattgggttagatttagaggatttttgagattaagtaggcgatttggaatagtaaggtttcgggattgagttgatgtagagtttaggggttttggattgagacgagaaagtagggggaggggtgtagtattgaggtttggggttcgggagggggttttatacgcgggaggaaacggagagagacggtgaggattgttttcggaggtgggtgaggtttagcgtgcgcgtttaggtaagtaggtaagaatgtagtagtcgttaggtttaggcgcgggcgcgtttcgttcgggtgatttagttcgtgttaggaagcgggagttggtttagttttttagagttttcggatagtagtcggatttcggtcggtttttggggtattaggatagattttcgcggttagtagttcggtttggggggcggaatattttttttttgtttcgttttattttttttcgggtcgtaattattttagtttatcgttgggacgtggtcgcgggtgtcgagagcgttgtcggcgtcgtgggggttatttcggttttggtttcgacggcgttttaggatttgcgatagtcgtaagtagcgattatgggggttaggagagtttaagaagtggggagttgggacgttcggttttttgcgttttagttttttatttttagattcggttggattcgggattagaaaaggtggtttggtgtcgtcgttgttttttagtgtgtttattggttttcgtggcggggagtttagacgcggtttttaggcggttttagataagtacggtcgagacgttgttattttagggggttgttttatttgagtattattttacgggttcgtttagttttatttggagagtcgtaggttttaaagttttttttattttcggggattaggtttcggggtcgcgttgagggtttttgaatttttttggattgtttggtagcggtttttttttattattacggtttattatttagacgcgtcgttcggttggttttatcgggagaggttttttttttttttttttttttcgaatttttattttagaagttttcggatttagtttggattttaaagaagggttgaattcggaggatttttttttgtttttaaagtcggttttttgatatatatttttacgtatagttggtaggggtaggagggtcgaggatgttttgggttgttgcggtatagggtaggttggttggttattaatcggatttttcggatagataattttggcgttgtgggcgggtggtttgggagtttagatttttgtttttggtttaggatttcgggaggagatcgagggggtgggtaaaacgtgattgagaaatttgatcgcgtttatttttggggtaaagagatttggaggtcgtaattatttagatagttttacgaagtggttgaggttttttttttttttttgattttttagaaatttttgtagagtttggataggtaaaggaaaacgtgtagttcgcggattttcgggttttagagagtagggagtcggggagattgaggtttcgtttcgagagcgcggaggaagcgcgtttagtcggttttttgtgggggttcgggtttcgggcgtttcgcggatagacgtgttcggtttttggttgggttaagttcggcgcgggggaggggattcgtagaggggcgattgagaaggcgaggagggggcggggagagggtgggttagggaagaggggaggggagaggcgagtaggggaggagcgaggggggttggagggagagaaggaagaaggaaggggcgaacggcgtgagttggcgtcgaaatgggagaaagtagcgagtgagaggggaaggggcgttaggcgagtattcgggagttagcgggatttgggtaggggcgttcggagtaggcgcgtatggcgggtttcgcgcggggattcggttggaagagagcgtagtacggttcgtacgagtgagtggacgtgggaggcgcgtatttgcgggggaatcgttttttgttcgttttcggcgtcgttcgttgagttttgtttttcgtaggttcggggtcgatgtattaggtgagcggttagcgtttttttggttgcgacgcgttttatggagtttttagcgtagtttcgggtttaggtaggatcgggagtggcgagcgaagttggataggggcgggtgggcggttgaaggggttagttattagttttttttttcgtttttagacgcggggagatcgttttagggagtttggtgggggtagggacgaaaagtttgggtttgaggatttggtttaaggagagtagggggttgggcgagggaggtagggttttgaatagaggttgcggttgcgttaagttggttttaatttttcgtaattttcgatattagatatatatatatatatatataaatatatatatatatatttcgcggtgtttgttcgtttgggatttgtgttttaattgtttttgtttagtgtgtaaatatttgtgggggtttggtgtgggggagggggcgttgtttgaatttttttttatttttttttttttagtttaattagagtttagcgtttttcgaaaatttttgtttgtcgcgagcggttgtaggatttagtttttttttttttttttgttattttttttttttcgttttttttttttttcgtgtcggttagttttcgtcgtttttgttttgtgtatatatacgtattttaatttagtgtttttagtttaagtgaaatgtttcgtttcgcgtttggcgtcgtttgtaatttattcgcgatttttgggggagttttttacgttaagtacggtttgtgattttttg

SEQ ID NO: 1553 - DNA, 4898 bp, Artificial Sequence
  chemically treated genomic DNA (Homo sapiens)
tagggagttataaatcgtatttggcgtgagaggtttttttaggaatcgcgggtaggttatagacggcgttaggcgcgggacggggtattttatttgggttgaagatattgggttggggtgcgtgtgtgtgtatagggtaggggcggcggggattggtcggtacgagagggaaggaaggcgagggagaagggatggtaagaaagaggggaggggttgggttttgtagtcgttcgcggtagataaaagttttcgggaagcgttgggttttggttgggttgggggaagggaagtagagaaagatttagataacgtttttttttttatattaggtttttataaatatttatatattgggtagaaatagttgagatataaattttagacggatagatatcgcggagtgtatgtgtgtgtgtttgtgtgtgtgtgtgtgtgtgtttggtgtcgggagttgcggggagttggagttaatttggcgtagtcgtagtttttgtttagggttttgtttttttcgtttagttttttattttttttggattaagtttttaaatttagatttttcgtttttatttttattaagttttttggaacggttttttcgcgtttggggacggagaggagaattaataattggtttttttagtcgtttattcgtttttgtttagtttcgttcgttattttcggttttatttgggttcggggttgcgttgggggttttatagggcgcgtcgtagttagaggggcgttggtcgtttatttggtatatcggtttcggatttgcggaaaatagggtttagcgggcggcgtcggaggcgggtaaggggcgattttttcgtagatgcgcgttttttacgtttatttattcgtgcgagtcgtgttacgtttttttttagtcggattttcgcgcggggttcgttatgcgcgtttgtttcgggcgtttttgtttaggtttcgttggttttcgggtgttcgtttggcgttttttttttttttattcgttgtttttttttatttcggcgttagtttacgtcgttcgtttttttttttttttttttttttttttagtttttttcgttttttttttattcgttttttttttttttttttttttggtttatttttttttcgtttttttttcgtttttttagtcgtttttttgcgggttttttttttcgcgtcgggtttggtttagttaggagtcggatacgtttgttcgcggggcgttcgaggttcgagtttttataggaagtcggttgggcgcgtttttttcgcgttttcggagcggggttttagttttttcgattttttgttttttgaggttcggagattcgcgggttgtacgtttttttttgtttgtttaaattttgtaaaagtttttggaaaattaggagaaagagagaaattttaattatttcgtggaattgtttgaataattgcggtttttaaatttttttgttttaaagatgggcgcgattaagttttttagttacgttttatttattttttcggttttttttcggggttttaagttagggatagggatttgggtttttaggttattcgtttatagcgttagagttgtttgttcgggaaattcggttagtgattaattagtttgttttgtgtcgtagtagtttagagtattttcgatttttttgtttttattagttgtgcgtgggaatgtgtgttagaaaatcgattttgggggtaaagagaggtttttcgaatttagtttttttttgggatttagattgaattcgagggtttttaagatgagggttcggggagaaaggggagggagggagtttttttcggtggggttagtcgggcggcgcgtttggatggtgagtcgtggtggtaggaagaagtcgttgttaggtagtttaagagggtttaggggtttttagcgcgatttcggaatttggttttcgagaatggggaagattttggagtttgcggttttttaggtggggttgggcgggttcgtgggatgatgtttaggtggggtagttttttggggtgatagcgtttcggtcgtatttgtttagggtcgtttaggagtcgcgtttgggtttttcgttacgagggttagtgagtatattggaaggtagcggcggtattaggttattttttttagtttcgagtttagtcgggtttggaagtggagagttgggacgtaggaggtcgggcgttttagttttttattttttggatttttttagtttttatagtcgttatttacggttatcgtaggttttggggcgtcgtcggggttaggatcgggatggtttttacggcgtcggtagcgttttcggtattcgcggttacgttttagcgatgggttggggtggttgcggttcggaggaaggtggggcgggataagaagagagtgtttcgttttttaggtcgggttgttagtcgcgggggtttgttttagtgttttaggagtcggtcgggattcggttgttgttcgggagttttggagagttgagttaattttcgttttttggtacgggttgagttattcggacgggacgcgttcgcgtttgggtttggcggttgttgtatttttatttgtttatttgggcgcgtacgttgggttttatttattttcgaaggtaatttttatcgttttttttcgttttttttcgcgtatagggttttttttcgaattttagattttagtgttgtatttttttttttgttttttcgttttaatttagggtttttaaattttgtattagtttagtttcggagttttattattttaagtcgtttgtttgattttaaaagttttttgaatttggtttagtattaatgtttgttttgttggaaatgtaaattatgttttaaatttaattacgtatgttggttatataggtgtgtttattttgtaaggatgtagtaagttgaatatttatgatgtaggtatttgtttgtatgattattatatttgaataaaaagtttttaaaaattaatatattaaaattaatattttagtttagagtatgataggatatgatggttaggttggaggtttggtatgggagtttagtttttagatttattatttattatatttttttggggaaatttttttgttttttagttttaggagggatgagtattggggtttaggattaggattggggtgaggtaagtgagatatttatttggtgtgtaagatttcggggatgttaagataaggaattttttttttggaggtaggattttgttttgttcgttaggttggagtgtggtggtgagattttagtttattataatttttattttttaagttaaagtagttgggattataggtgtttgttattatatttggttaattttttttagtagagacggggttttatcgtgttggttaggttggtttggaatttttgattttaagtgatttgtttgttttggttttttaaagtgttgagattataggtatgagttatcgtgtttagattgatgaggaatattttaaggtaatattttaatatattaaatgggtaaattatagttttttgggttagttgttttgttttttttaaataaagttgtattggaaataggattaggattaaggtaattaattacgtaagtttagggttagattttgtttttatttaaaatgttggtattttgtttattatagattttttggtattaatttggatttttatatatattgtaggaaaatattgttttattttaattattgagttttttgatgtttttttaagttttgaatttgagttaagtgttttatttattttaggttttatatgttttattttagattcggttttgttattgtttttttttgaaggatttgtttaggaagttagggtaaatgaggggagattaaaggtgtttttttatttaatattgttatatatatatatatgtatagtattaagtgggttttgtatttaagtttaggtttagttttttcggggtttatcgattagtttagaataaagcgtaaagttttttagtttttatgaattgggttttatttgttttggtttttatttttttttatttattttttgttagttatgttatttttttttttcggttaatttgttaggtattttttcgttttagggtttttgtttttgtttttttttttgtttagaatgtgtattttttagatatttatattggtttttttttcgttttttttgtttatgttagtttttaagagaggtcgttttagattttttattttttgtttttaatattattttattattttatttagatttttttagtatttggtttattttatatttgtttatttgttggtagagtgaaaggttttgagagtagggattggtttgtttattagtgtattttttagagatgtgtttgttatagagagtgtaatatattttttaattttagaggttggaaaatagaggttagagaggggaaagagttaatgtaagttatgtagtgagttagtggtaaaattttattaaattttaattttttagatttttattttagtatttttttttgttttttagggtttattttttattttttattttagagttttttaggtaataaaggggatagaattgttttgtacgggttttgttttttataatattttttaaagtggagtaggttagtttataattttttttttgtagtttatttcgtaagattataaggtttggtttagttttagtttttggcgtttatttttttttggtggttagtagaacgtatagttttttttttattttttgtttttggtagagggttagtttgttgggttggtttttgtagttggattataattgtggttttagtgtttggagaatggggttaggatattgggagaatgggattttttcggaagagggatgtataaatt

SEQ ID NO: 1554 - DNA, 2417 bp, Artificial Sequence
  chemically treated genomic DNA (Homo sapiens)
ggtcgagacgggtagattacgaggttaggggatcgagattattttggttaatacggtgaaattttatttttattaaaaatataaaaaaattaggtaggtttggtggtaggcgtttatagttttagttattcggtaggttgaggtaggagaatggcgtgaacgcgggaggtagagtttgtagcgagtcgagatcgcgttattgtattttagtttgagtgagagagcgaggttttattttaaaaaaaaaaaaaaaaaagatattcgattttatttttatttaatgttaaatgaggttggaggtgaatgttttttttattatatttaatttatttttttttcgaattgattattttttaattgcgtatttttttttttgtttaggaaattattgtatttaggttaatttaatttatggggaaggtggtaaggagggtagaaagtgtgtgggtttaatattagagtttaaattttttttttattgtttattagttgtgtaattttggatagattttttagtttttttaagttttagttttttttgtttgtttgtttgtttgtttttgagataagagttttgtttttgttgtttaggttggagggtaatggtttaattttagtttacggtaattttcgttttttgggtttaagtaatttttttgttttagttttttaagtagttgggattataggtttttgttattatattcggttaattttgtatttttagtagagacggggtttttttacgttggttaggttggttttaaattttcgattttaggtgattcgtttattttggttttttaaagtgttgggattataggcgtgagatattacgttcggtcgttcgttatgaaatgggggtaaaaattgtttataggtttgtggagagaagattataaatttgtaaagtttttagtattgtgtttagtatgtggtaggtgtttattaaatcgtggttgtttttattatgatgttaagtatgggaatacggaggatatagttggagaggagatttgatgatttttttggtggagggtggttagggaaggagtggaagagagagttggggagaggaaattgtggttataaagaggaagagagaggtagagttggaggtgatattaggggagagagaggagtgggttcggcgatggttatgttgggcgaggtgtggagagtatagttgtgttatttattagttgtttttagtttagataatttttgtgtttattttatttttgtttgtttatcgtttttgtcgggttggatatttttattattacggttatcgttgttatattgtcggttgttattttttgttttatttttttttttgtttatgatatggtagaaggtggtaagggaagtagttgtttttcgttagtagtttttttgttattgaaggttgaagttgtttataggtatgggtaaagagtttaggttttaaagatagatgagttgggtttcgtttttagttttagtatttaggagcgggatgattttagtaagggagatgatttagttaaagttttagtttttttatttgtatagtagggataatagggttgttgagaagaaggaatgagattatgcgtggtaagtatttagtttagtataatgtttggtatatagtaagtgtttaatatacgttcgtgttcgttatttttaaggttaaataggtttgtgatttgtgtagttatatagggttttatgtttaggacgggttttaaatttggttaatgttttgttattattattttgaaacggttttttttttttttttttaagagatagggttttattttgttgttaagattgtaggattgtagtggtatgattatagtttattgtagtttcgaatttttgagtttaagtgattgttttattttagtttgttgagtagttaggaatataagtaggtattattagttattttattttttaattttttttttttttattattttttagagatagggttttattatgttgtttaggttggtttcgagtttttggtttgaagagattttttcgtttttgttttttaaagtgttgggattataggtatgagttattgtacgtagttttgaaatttttaatagtttttgaataagggttttgtaaattatgtagttagttttggttattattaatatatatttattgagtttgttggttggtagtggttatagaaggggatatttgtttagtagtttgttaaagatgtgggatattagacggttttgggagttttaaaggagggatttaaatatagtgatgtggtattatgttaggttgttagtaattagagattaagagggtagtgagatttttatatatatttttattggggtcgggtatagtggtttatgtttgtaattttagtattttgggaggtcgagatgagtagatta

SEQ ID NO: 1555 - DNA, 2417 bp, Artificial Sequence
  chemically treated genomic DNA (Homo sapiens)
tgatttgtttatttcggttttttaaagtgttgggattataggtatgaattattgtgttcggttttagtgagagtatgtgtgggggttttattgtttttttagtttttaattgttggtaatttggtatggtgttatattattgtatttaaattttttttttgaggtttttaaggtcgtttaatgttttatatttttaataaattattggataggtgtttttttttatagttattgttagttagtagatttaataaatatatgttaataatagttaggattagttatatagtttgtagagtttttgtttaaaaattattaagaattttaaggttgcgtgtagtggtttatgtttgtaattttaatattttaggaggtaaaggcgggaggatttttttaggttaggaattcgagattagtttgggtaatatagtgagattttgtttttaaaaaataataaaaaaaaaaaaaattaaaaaataaaatagttggtggtgtttgtttgtatttttagttatttagtaggttgaggtgagataattatttgaatttaggagttcgaggttgtagtgagttatgattatgttattgtaattttatagttttggtaatagagtgagattttgttttttaggaaaaaaaaaaaaaaatcgttttaaggtggtggtgatagagtattaattaagtttgggattcgttttgagtatgggattttgtgtggttgtataggttataaatttatttggttttgaaaatagcgaatacgaacgtgtattgaatatttgttgtgtgttagatattgtgttgggttgggtgtttattacgtataattttattttttttttttaatagttttgttatttttattgtgtagataaggaaattgaagttttagttgagttattttttttgttgaggttatttcgtttttaagtgttagagttgggaacggaatttagtttatttgtttttggagtttgagttttttatttatgtttgtggatagttttagtttttagtggtagggaggttgttggcggagggtagttgttttttttgttattttttgttatattatgagtaggaaggaagatgaggtaagaaatagtagtcgatagtgtggtaacggtgatcgtggtggtaagggtgtttaattcggtagaggcgatgggtagataaaaatgagatgggtataggaattgtttgagttggaggtagttgatagatagtatagttgtgttttttatatttcgtttagtatggttatcgtcgaatttattttttttttttttttgatgttatttttagttttgtttttttttttttttttatggttatagttttttttttttagtttttttttttattttttttttggttattttttattagggaggttattaggttttttttttagttgtgtttttcgtatttttatgtttagtattatagtaagagtagttacgatttagtgagtatttattatatgttaggtatagtgttagggattttataagtttgtaattttttttttataaatttgtaagtaatttttatttttattttataacgggcggtcgggcgtggtgttttacgtttgtaattttagtattttgggaggttaaggtgggcggattatttgaggtcgggagtttgagattagtttgattaacgtggaaaaatttcgtttttattaaaagtataaaattagtcgggtgtggtggtaggagtttgtaattttagttatttgggaggttgaggtaggagaattgtttgaatttaggaggcggaggttgtcgtgagttgagattgagttattgttttttagtttggataataagagtaaaatttttgttttaaaaataaataaataaataaataaaaaaaattgaggtttagagaggttaagagatttgtttagggttatatagttggtgagtagtgaggaggagatttgggttttggtgttaagtttatatattttttgttttttttattattttttttatgggttgggttggtttgagtatagtggttttttgagtagggaaggagatacgtaattgagaaatggttagttcgagggaggaataaattgggtatggtgagagagatatttatttttaattttatttggtattaggtgggggtggagtcgggtgttttttttttttttttttttgagatggagtttcgtttttttatttaggttggagtgtagtggcgcgatttcggttcgttgtaagttttgtttttcgcgtttacgttatttttttgttttagtttatcgagtagttgggattataggcgtttgttattaagtttgtttaatttttttgtatttttagtagagatggggttttatcgtgttagttaggatggtttcgattttttgatttcgtgatttgttcgtttcggtt

SEQ ID NO: 1556 - DNA, 2464 bp, Artificial Sequence
  chemically treated genomic DNA (Homo sapiens)
atttttgttataaaaatttagttttttaagtatggtatattttttttttaagggttagaaatgaattttaaattattttgttgtatttttttattagaggaagaattgtttttttttttttttttttttttttttttttttttttttttttttttttttttttttttttgagatagagtttcgttttgttgttttagttggagtgtattggtaaaatttcggtttattgtaatttttattttttgagtttaagtgattattttgttttagttttttgagtagttgggattataggcgtatgttattatgtttagttaatttttgtatttttaatagagatagggttttattatgttggttaggttggtttcgagtttttgattttaagtgatttatttattttagttttttaaagtgttgggattataggtatgagttatcgggttaggtaggaattgtttttttttttttttgttatttagaaattagtaaattttatgatggttatttatttataatttatttttaagaatattttgttaatgatattttaagtaagatgtgataatagttatataaagtagtttatagtatgtagtgtgttttaatgtttttgagaagtagtaataatttttgtttttagatggtttttagttttttttcgtgttatttttttgttttagattgtggtttaattgtttataaggatttaacggtatgtaaatagttgttagttggtttttttaaaagaggtattgttgattggaaagattggtttatatttaaattttgttttttttgtaaatgttagatttttttaatagtattttagaggaaattttgttttgaatatagttattgaatttgattagattatagatatagtattatttatattgtttaatgttaagatatagtatttttgattttttgtatgttataacgttttgaagattgagttattgatgagaaatttttgtagttatatatttttttatagtttttgttttttatttaagtaggttttagggtttatggtaagatgatttttttggggagaaagagtttgagatttagaaatttaatttgtataatgaattttggtttttttttttttttagggatttgattttttttttttttttttttttttttttgttataggattttatgttttattttagcgtagtttggttgattgatgttttattttttatatgtattgatatgacgtgtgattgtttaggtatagttggagaagttggagaagatagtattttatttttttttttagaattaattattgattggagggttaatgttttaattttgatgtgatttagtaggttatgcgagggttgtttttaataggagtagtgtttttttttttttgcgtagtttttgatttagttcggtatgttttttggtgatattgttgttcgttatatggtttagtgttgtaaatatttttatataattatatttgtttatttaatttttaagtgtttttttaatagagaaaataattattttatgagtttaaaatttgtaaattttttgtattttttaaaagattttttttaattataaaaattttttttatgttttattttaatattttataaattttgtttagtttgttgattttgtatttgaaatttatattataataaaataaagataaaatttaatatttttttttagatgtattgttaagtattttaatatagtttgttgaatattttttttttttttgttgatttgaaatgttaatttttttatatattaaatttttatatagatatatggttgtggttttgtttaatatttttttttattgatttgttggtatatttttatgttattatttatgtttaattattgtaggatgaatatatatagatatatgtatatttatttgtttatattagagtagtttttttttattgtttttgttttttaaaattattatagttatttttgtttatttattgtttagtatattttgtttttagtaatcgattgtaagaaatgaatgtaataatttttttaaatggttttgatgttgaaaagattgtaaaaaaatgaagtatatattggttaatttagtatattttttgaaagatattgtttaagattttatattgattttgtaagattattttagggaaataagtgtgttattgtggtggatatatttattataattttattatttgaggatgtattttattattttgatgatggttttaaatttattttattttaatataaagtggattttgtaattatagtttttgtttattaattgtgatacgtggattttattattttgttgtttttgaggtattttttgtatttgtttttattaggtttatgaaatttgtgaattgggtatttttattgaatttttaattttttattatttttaaacgatcgaataggttaaaaatgttgtagattg

SEQ ID NO: 1557 - DNA, 2464 bp, Artificial Sequence
  chemically treated genomic DNA (Homo sapiens)
tagtttgtagtatttttagtttattcgatcgtttgaagatgatgaaagattaaaagtttagtaaaaatgtttaatttataaattttataaatttaatggaagtaagtgtaaagaatgttttagaaataatagggtgatggaatttacgtgttataattagtggataagaattatgattgtaaagtttattttgtgttagaataaggtggatttggagttattattaaaatgatgagatatatttttaaatggtgagattgtggtgggtgtatttattataataatatatttatttttttggaatgattttgtaagattaatatggaattttaaataatattttttaaaaggtatgttaagttggttaatgtgtattttatttttttatagtttttttaatattagagttatttaaaaaaattattatatttattttttataatcgattattggaagtaaaatatgttgaatagtaaatgagtaaggataattataataattttaaaagataagaataatgagagagaattgttttgatatagatagatagatatatatatatttatatatatttattttatagtaattgaatatagatggtggtatgggaatatgttaatagattagtggaaaagaatattggatagagttatagttatgtatttgtatggaaatttggtgtatgagaaaattggtattttaaattagtagagaaaaaagaaatatttaataaattatgttgggatatttggtaatgtatttgagggaaaatattaaattttatttttattttattgtaatgtaaattttagatgtaaaattaataagttaaataaaatttataaagtattagaataaaatataaggggaatttttgtaattgaagaaagttttttagaaaatataagggatttgtagattttgagtttataaagtgattgttttttttattaaaaagatatttaaaaattgaatgaataaatgtaattatataaaaatatttgtagtattgggttatgtggcgagtagtagtgttattaggaaatatgtcgagttgggttaggaattgcgtaaggaggaggagatattgtttttgttgaaggtagttttcgtatgatttgttgaattatattaaggttgaagtattggttttttaattaatgattagttttgggagaggggatgaggtgttgttttttttaatttttttaattgtgtttgaatagttatacgttatgttagtgtatatagagaatgaagtattagttaattaaattacgttggagtggagtatagagttttgtgatagaagaggaggaggaagagaaagaagaattagatttttaaaggagggaaaaagttaggatttattatataaattaaatttttaagttttaggttttttttttttaaggaaattattttgttatgagttttagggtttgtttgaatggagagtaagaattataggaggatgtgtagttgtaaaaattttttattaataatttaatttttagaacgttatgatatatagaaaattaaagatgttgtgttttagtattgagtaatatgggtggtgttatgtttgtagtttggttaaatttagtaattgtgtttaaaataaaattttttttggaatattattgagaaaatttggtatttgtaaaaagggtagagtttaaatatgagttagtttttttaattaataatattttttttaagaaaattaattaatagttgtttgtatgtcgttgaatttttgtgagtagttaggttatagtttaggatagaaagatgatacggggaaggattgagggttatttgagaataaaagttgttgttattttttagaggtattgagatatattgtatgttgtagattgttttgtgtaattgttgttatattttgtttgagatgttattggtagaatgtttttaaaaataaattatagataaatagttattatggagtttgttggtttttagatagtaaaagagaaaagaagtagtttttgtttggttcggtggtttatgtttgtaattttagtattttgggaggttgaggtgagtagattatttgaggttaggagttcgagattaatttggttaatatggtgaaattttgtttttattaaaaatataaaaattagttgggtatggtggtatgcgtttgtaattttagttatttaggaggttgaggtaggataattatttgaatttaggaggtggaggttgtagtgagtcgagattttgttaatgtattttagttggggtaatagagcgagattttgttttaaaaaaaaaaaaaaaaaaaaaaaaaaagaaaaagaaaaagaaaaaagaaaaaaaaaagaagtagttttttttttaatgaaaagatataataagatagtttgaaatttatttttggtttttagagaagaagtgtgttatgtttggaagattggatttttataatagagat

SEQ ID NO: 1558 - DNA, 2443 bp, Artificial Sequence
  chemically treated genomic DNA (Homo sapiens)
agaggttgtagtgagttgagatcgttttatcgtattttagtttgggtgatagtgcgagattttattttaaaataattaaataaataaatatatatatatatatatatatatatatatgggtcgggtattgtagtttatatttgtaattttagttttttgggaggttaaggtgggtggattttttgagtttaggagtttaagattagtttggttaaattttatttttataaaaaatataaaaattaatttagcgtggtggtgtgtgtttgtggttttagttatttgagaagttgaggtgagagaattattagagtttgggaggttgaggttgtagtgagttgtgtttatgttattgtattttagtttgggtaatagaatgaaattttgttttaaaaaaaaatattttatagtaatagaagggaatttttatggaaattatggattttgggtgataatgataaatttgtgtagatttattgattgtaagaaatgtgttattttggtgagggttgttgataaggggtgcggggtaggggtagggggtagtaagcgggggtagggaatttttttttttttttttttaatttttttgtgaatttaaaattgtttttaaaaattaagtttttaatagaaataaatatataataaattttaaaaatattaagatttgaatgtcgaaaaaatttgtaattgttttaataattatagataataatagtatatagattatattataatcggcggttttttcgtatgtagttcgttttattcgtagtgtgaaagttttattagtttcgattttaagtagtgcgttttttttaatttttttttacgttttggtttttattttatttttgaggtttatagttgtttaagttatggtatgtgtagagagagatttttttttgttgattgtatgaaaaattgtgtaaaaggggttgttatttaaaaaagcgtgtgatattgggagagattttgtatagtgagtagggttttttatgagtttattttggattttttattgagaataggatgttttgttaaggatgggtaaagaggggtatagtagaaagataaaaggatgtgttagttataaaaattacgtgggttaaggatagggggttgtaatgtaaagattggaatttgtagtacggtaaattagagcgtggtaagattagcgttttagattttagataaggttatttttttttttaggaaagacgatttttttattaatataagcgtttggcgtttttttttttcgtttaggcgttttggttggaacgaggaaatttaaaagtgttacgaaagaataaaagtggtttaaattttgaaaatttttaaaattaaaagattgtaatttaaaggaagataaagagtatgatttttaatttttttaagttattttatttatttttagtgttaaaaatttaatgttagttttatatagtaatttatttattgtagttgaaatttgaggtgtgaaaagtttcgtgttgataaagatttgtattagttgttgtcgttaaataatatgtaaaaatttgtagtttaattttagttttagaataaataagcgtttttttaaatttatttaggagcgtaggttgttattaggtttataggtgtgttttgaaattagatattattaagaaattttatcgtgttaaaatgaataaggagtcgggacggtataatttattattttttaatgtgttttgggaattgttttaataagtgtggaagtgttttagcgagatgttgtatttagtttttattgtgtatatattaagttagcgtgcgtgtgtgtgtatgtatatatgttcgtgtttgtattttatattagaaggttttaggaaaagagtgataaataagatgaagcggtaagagggtattaaagattataattaaaggcgtttgagagtagttagttggttttagtttatttttttaattagttttatttattttgttgtttcggtgtagtagatattgtgtagggtttcggtagagatataggggttacggagatataagttattttcggggaatttttagtttaattaatatataaatagtagtgatattcggtagaagcgttataaggtagggtaggttataaggtagggtaggtgaagtgttttggtggttttgggtgatagttattgttatatattattttttaggagttttggggttatttgaaaaaaaaagagatttgatgaattagttttttttttaggggtgaaagttgtttagttttttgtggtaaagaaatataaaatgaatggaaaaaagaagaggttatatgggtgaattattaaatgtaaggagtggaaagatattatatttgtgtaaggaatatataaagatttttttaatttttagttataatatttataatgataaattatatattagttttgtgaattttatgtgtaat

SEQ ID NO: 1559 - DNA, 2443 bp, Artificial Sequence
  chemically treated genomic DNA (Homo sapiens)
gttatatataggatttataaggttagtgtgtaatttgttattataaatgttatgattaaaaattagaaaaatttttgtgtgttttttatatagatgtaatatttttttattttttatatttaataatttatttatataatttttttttttttttatttattttatatttttttgttataagaaattgaataatttttatttttggaagaaaaattagtttattaaattttttttttttttagatggttttaggatttttggaagatgatatgtggtaataattgttatttagagttattaaagtattttatttgttttgttttgtagtttgttttgttttgtagcgtttttgtcgggtgttattgttatttgtatgttaattagattgggggtttttcgagagtggtttgtattttcgtgatttttgtgtttttgtcggggttttgtatagtatttgttatatcggagtagtaaaataaatggggttggttgaaggagtaagttaaggttagttaattgtttttaagcgtttttaattatggtttttggtgtttttttatcgttttattttatttattattttttttttgagattttttaatatagaatgtagatacgaatatgtgtgtatgtatatatacgtacgttggtttaatatatgtatagtggaagttgaatataatatttcgttgggatatttttatatttgttaagatagtttttaaaatatattaaaaaatgatggattgtgtcgtttcggttttttgtttattttagtacgatagaattttttgatagtgtttgattttagagtatatttgtagatttagtgatagtttgcgtttttgggtgggtttggaaaagcgtttatttgttttgaagttaaaattaaattgtaagtttttatatgttgtttagcggtagtagttgatgtaaatttttgttaatacggaattttttatattttaggttttaattatagtaagtggattattatgtaagattggtattgggtttttggtattgaaaatgaatgaagtagtttggagaaattaaaagttatgttttttatttttttttgagttataattttttaattttaagaatttttagaatttgggttatttttgttttttcgtagtatttttgagttttttcgttttagttaggacgtttggacggaaaagggaagcgttaagcgtttgtgttggtgaggagatcgttttttttggagagggaagtggttttgtttggagtttgaaacgttaattttgttacgttttagtttgtcgtgttgtaagttttagtttttgtattgtagttttttgtttttggtttacgtggtttttgtagttggtatatttttttgtttttttgttgtgtttttttttgtttatttttgataaaatattttgtttttagtgaaagatttaggatgaatttatgggaagttttgtttattatataaggttttttttagtgttatacgtttttttagatgataattttttttgtataattttttatataattagtaggaaaaaatttttttttgtatatattatgatttagatagttatgggttttaaaaataagatgggaattagaacgtaggggaagattaaaaaaaacgtattgtttaaaatcgaagttaatgagatttttatattacgaatgggacgagttgtatgcgggaaaatcgtcgattgtaatgtggtttatgtgttgttgttatttatggttattagaataattataaattttttcgatatttagattttagtatttttagagtttattatgtgtttatttttattaaagatttaatttttaagagtaattttaagtttatagaagaattaagaggaaggaagagagagttttttgttttcgtttattgttttttgtttttgtttcgtattttttattaataatttttattagaatggtatattttttataattaatgaatttatatagatttgttattattatttaaagtttatagtttttatgagggtttttttttgttgttataaagtatttttttttgaaatagggttttattttgttgtttaggttggagtgtagtggtatgaatatagtttattatagttttaattttttaggttttagtgatttttttattttaattttttaagtagttgggattataggtatatattattacgttgggttaatttttgtattttttgtagggatggggtttggttaggttggttttgaatttttgggtttaagggatttatttattttggttttttaaagagttgggattataggtatgagttatagtgttcgatttatatatatatatatatatatatatatatgtttgtttgtttgattgttttgagatggagtttcgtattgttatttaggttggagtgcggtggggcgattttagtttattgtaattttt

SEQ ID NO: 1560 - DNA, 2189 bp, Artificial Sequence
  chemically treated genomic DNA (Homo sapiens)
tgttattgtattttagtttgggtgatagagcgagattttgttttaaataataataaaaattaaagtatttattagagtttttggaatatattatttgtggataaggggaattattgtatatatagatttttgtgaagaatattgttaataatttaagagtaattatttatttagggtttataatgagtttagtattggagttttttgtttatttttggaaattttttgtttagatgtaaatatagttgaatttttatttttttttgttgatagttatttatttatattttttttattagagatagaaagaaaagaataaagattaaaaaattttgttgattattttttttttttattttttgagaagtgttaatagaattgaaaatattagtaaggaaaaacgttttcgaggaatagagttaattggatttttaaaatgttgttatgaaaggtgtatttttgggatatgaatttgattttttttttttttttttttttattttttttttttttttttttttttttttttgttttttaaaattattcgtattttttttatgaggtatgtagattttggattatttttttattttttagttaattgtattttaaaatagttttaataaggttgggtacggtggtttagtttgtaattttaatatttggggaggtcgaggcgggcggattatttgaggttaggagtttgagattagtttgattaatatggatttcgtttttattaaaaatataaaattatttcggcgtggtggcgtatgtttgtaatcgtagttattagggaggttgaggtaggagaatcgtttgaattcgggaggtagaggttgcggtgagcggagatcgcgttattgtatattagttagggaaacgagagtgaaatttcgttttaaaaataaataaataaataaataaaaaacgttttagtaatagtgtttttaagaatttggttttttagttttttggtagagaagatttattgttgtcgttagtttttaagatggtatttgttggaggcggtaggtagaggttttaagtgtggattttaattttcgtggggattgaatttttgcggttgttgtttgtttaggtacgtttgttttttatgaattttttttatttatagggttttaaattttatgtcggcgggaggaggaaggagattgggtataatttattagattttcgattgtaagagttggaggtcgtttgcgggtttatttgtattcgggtttgtttttatttttttagaatgtaaattttttgagggaatgtgtcgtcgttattttttagttttttgagtgtatttagtttttttttaatttaaaattttttatttacggtaattgtgagaatgataagaattttttttattttttatatcgtaaatagttgtaatgtttagtgggatttatttttgtcgttattaattttgttattttagttacgtgagtttttcgtttgttagttaagtaaaatggtttttttgtagtcgtacggttttttggtttttgtttagggtttcggggattttttttagttattgttttgtatttatttattagatcgtcgttttggtgggcgtttttggttttgtttttcgcgtttagtttgttattgcgcgtttagattcggaattttagtttcgaagttttcggtggtcgggaataaagtcggttttgtttattgttgtttggtaaagtaggcgtttgttagtatttattgaatacgtttatgtgtttagaaacggttttattggttgggattatttttttcgatgtttatttgtttagaattttttttttgggatgtcgatttttttaatacgtgttaggagttttttttcggttcggaatttttagagtgtttatagtggatagggtatttggatatattttagattaatttacgttttttcggaggattttagaggttggaagtttttttaagattaggggcgtagtgtttttttggtttgcggaagagttagaggagtggggataatatttaatattagtttttattatcgttagcgcgatttttcgtcgtcgttttatttatttgacgcgcgtagtggatcgcgatttaggggtatagggtttttcggggattagcggttggagcgtttcggtcgagtattcgtagtttcggcgtcgcggtttcgtttcggtttcgtt

SEQ ID NO: 1561 - DNA, 2189 bp, Artificial Sequence
  chemically treated genomic DNA (Homo sapiens)
ggcggggtcggggcggggtcgcggcgtcgggattgcgggtgttcggtcggagcgttttagtcgttggttttcgggagattttgtgtttttaaatcgcggtttattgcgcgcgttaggtgagtagagcggcggcggggagtcgcgttagcggtagtagaggttgatgttgaatgttgtttttatttttttgattttttcgtaggttaggggagtattgcgtttttaattttggaggggtttttaatttttggggtttttcggggaaacgtgggttagtttggggtgtatttaggtgttttgtttattgtgggtattttggggatttcgggtcgaggaagggtttttggtacgtgttgaaaaagtcggtattttagaaggaagattttgggtagatgggtatcggggaaggtagttttaattaatgggatcgtttttgagtatataagcgtatttagtgggtgttaataagcgtttgttttgttaggtaatagtgagtaaaatcggttttgttttcggttatcggaagtttcgaggttggggtttcggatttgggcgcgtaatgataaattaagcgcgggggatagggttaggagcgtttattagggcggcgatttggtgggtaggtgtagggtaatggttggaaagggttttcgaagttttgagtagagattaaagggtcgtgcgattgtaggaaggttattttgtttggttgataggcggaaaatttacgtggttggagtagtagggttggtgacgataagggtgaattttattaagtattgtaattgtttgcggtgtgaggggtgagggggatttttattatttttataattgtcgtggataaagggttttgggttggagagagattgggtgtatttaaaggattgaaagatggcgacgatatatttttttagaggatttatattttggaagggtggggataggttcgggtatagataagttcgtaggcggtttttagtttttatagtcgaaagtttgatgagttatgtttagtttttttttttttttcgtcggtatgaggtttggggttttgtggatgaaggaagtttatgggaggtaaacgtgtttgggtaagtaatagtcgtagagatttagtttttacgggggttagaatttatatttagggtttttgtttatcgtttttagtaaatgttattttgaggattagcggtagtagtaggttttttttgttagagaattggaaggttaggtttttgagggtattgttattaaggcgttttttgtttgtttgtttgtttgtttttgagacggagttttattttcgtttttttggttggtgtgtaatggcgcgattttcgtttatcgtaatttttgtttttcgggtttaagcgatttttttgttttagtttttttagtagttgcgattataggtatgcgttattacgtcgggataattttgtatttttagtagagacgaggtttatgttggttaggttggttttaaatttttgattttaggtgattcgttcgtttcggtttttttaagtgttgggattataggttgagttatcgtgtttagttttattaaggttgttttgaagtgtagttggttggaaagtggaagaataatttaagatttgtatgttttataaaaggagtgcgaatggttttgaaagataggaaaggaaagggagagagaggaaagaaatagagaggaagaaaggaaggaaattaaatttatattttaggaatgtattttttatgataatattttggagatttaattaattttatttttcgagggcgtttttttttgttggtatttttagttttattaatattttttaaaaagtgaaaggaaaaaatagttaatagggttttttggtttttatttttttttttttatttttagtaagggagatgtgggtgagtggttgttagtaggaaaaggtgagagtttagttatgtttgtatttgagtaggaaatttttaaggatgagtagggaattttagtgttgggtttattgtgagttttgaataagtgattgtttttgggttgttagtagtattttttataaagatttgtgtatatagtggttttttttatttataggtgatatgttttaagagttttagtggatattttggtttttgttgttgtttgaggtagaatttcgttttgttatttaggttggagtatagtggta

SEQ ID NO: 1562 - DNA, 2367 bp, Artificial Sequence
  chemically treated genomic DNA (Homo sapiens)
tggtttatagttttgtaggttgtataggaagtatggtgttggcgtttgtttttggtgaggttttaggaagtttttaattgtggtggtgggtgaagggggttaaagtattatatggtaagagtgggagtaggagaggagggggtttttagacgtttaaatatttagagtttaggtgaattgattgagtgagaattaatttatattaaggggttggtgttgaattgtttatgatatgattgatttatttttgtgatttagtattttttattaggttttttttttaatattggggattatattttatatacgttttggagggatatatatttaaattatattagtatatatggtttttaaatgttatttagtttttttttatgcgatgttagaaggttgacgtttgggggtgtgtagttttttaggatattttttttgaagggttgtagtaatattttaagtgttatatatttatgtgttatgttagtgttagttttaaggatgtgtaatagttaagggttgagttatttgggattaaatattcgttttgtatagatagtgtttatggtgtggattaatttgtttttgtttgttgttgggattgggtgtcggttgttgtcgtttttatttttcgggagtttttgttggttttatagggtagtattatatgaaggttgtttttcgatgtttagcgttgaggtgtgaagattgtattgtgttcgagatacgagttttacgtggttgttgttttttttatacgttttgtgatggatttttttttattaggtggttttttgtttgtggttagtatatatatataggatatgaaagatatagggtatgattataagttatgtatttttttagggattaggatatatagagagagttttttttgttgtttttcgtttatattataacgaatatttagttggagagttaagagaggggttagggttgagaggttaagagttttggggtttttgattatttttcgtcgtcgggagaaagaggaatttgtaaggtttaagcggatggtatggatgtatgtaatgaagatcgggaagtagattttgggtgggagagttgttttaagtagaaaaatagttaatttaaatttatttttggttgagtttgagcgttagagtaaggtagggaagagtgttcggaatgttgagttagtttaggttgttgtaggttgtattgtatggattttagtattagtaatgtgtgtatagaaaagtcggtttttttcgttgttatcgattgtttattaaagtgaatttgggtagcgtcgattttgttgttgaaagtatttgattttttgttgtatggattttttttttagggttaattgtgattgtagatttaattatcgagaaaatttgtattttataggataatttttttggttttatgtttatattaattgaaatattagatagatttttgtaagtattataggtatgtttggtttttaagttttagtagagatttttttttttattaataatatgaaatagatttaaaagaaatataataaagtaatgtttttttgattttttttgtgttgattttgtatttttttaaattgatattaatttttaagtatatttaattttaagttttttaataaataatatatttagtagaaatttatttatatgttatttataatttggagaatttttgtttatgttgtttttgttgtaatggggagttatagtattttgattatagaaatatatattaaaattatgattagaatgtaagtaaaaaaataatgtggtatgtagttgtttaatagtattggatgtaaaagaattaaatagtataatatataataatataaaagataatttttaagtatgtgttaggttttttttgatgaattgtaaagaagggataataatatatattattattatttgttattattttattaaagaagtttggttttggtttttagtggatagaggtatagataggtggagttgtatttgtggatgtatacgtatgtatatatataagttcgtatgtttagatcggtagttttgagtatttaggttagttaatattattttattttttatgttttagttgatattatttttgaattataaaataaaatgtttaaatattagaaaataagtattttatgttttttttggaggtaggaatatttttttattggttgataaagtgtattttatatttgaagttagatttttatttttttatgatgaggattgtgatttaatacgttagttggttttggtttttttgatttaaggatatataatattttaagagtatttggaatgtttagtttaattaagatggttttagtatgaatgggaaatcgggata

SEQ ID NO: 1563 - DNA, 2367 bp, Artificial Sequence
  chemically treated genomic DNA (Homo sapiens)
tgtttcgattttttatttatattgaaattattttagttaagttaagtattttaaatatttttgaaatattgtgtgtttttagattaagagagttaggattaattgacgtattgagttataatttttattatggaagaataaaaatttaattttagatatgaagtgtattttgttaattaatgaaaagatatttttgtttttaagagagatatagaatgtttgttttttgatgtttagatattttattttatagtttaaaaatagtattagttgaaatataaaaaatgggatgatattaattggtttgagtgtttaaggttgtcggtttagatatacggatttgtatgtgtgtatacgtgtatatttataggtatagttttatttgtttgtgtttttgtttattggaggttagaattagatttttttaatgggatagtagtaaataataataatatatattgttattttttttttgtaatttattagaagaaatttggtatatatttgggagttgttttttgtattgttatgtattgtgttgtttaatttttttatatttagtgttgttagatagttatatattatattgtttttttatttatattttaattataattttggtgtgtgtttttatagttaaagtattgtgattttttattgtaataaaagtaatataagtaaaaattttttaaattatgaatagtatgtgagtggatttttattgaatatattatttattaaaaagtttaaaattaagtatgtttaaaaattaatgttagtttagggaaatgtaaaattagtataaaaaaaattaggagaatattattttgttgtattttttttaagtttgttttatattgttaatggaaaaaaaaatttttgttgaagtttaaaaattagatatgtttgtggtatttataaaagtttgtttggtgttttagttggtatgggtatgaaattaagaaaattattttatagggtataagttttttcggtgattaagtttgtaattatagttggttttagggaaggaatttatgtagtagaaaattagatatttttaatagtagagtcgacgttatttagatttattttggtaagtaatcggtgataacggaaaggatcggtttttttgtgtatatattgttggtgttaaggtttatgtagtgtagtttgtagtagtttgggttggtttagtatttcgggtatttttttttgttttgttttgacgtttaggtttagttagaggtagatttgagttggttgtttttttgtttagagtagtttttttatttaggatttgtttttcggtttttattatatgtatttatgttattcgtttaggttttatagatttttttttttttcgacgacggaagataattagggattttagaatttttgattttttaattttgattttttttttagttttttagttgagtgttcgttatgatgtgggcggagggtagtagggagaattttttttgtgtgttttgatttttgggaaaatgtatggtttgtagttatgttttgtgttttttatgttttatgtgtatatgttaattatagataagagattatttgataaaaagaaatttattataggacgtgtgaaggaggtagtaattacgtggaattcgtgtttcgaatatagtgtagtttttatattttagcgttgggtatcgggaggtagtttttatgtgatgttattttatgaggttagtaagggttttcgggaaatgaaaacggtagtagtcggtatttagttttagtagtagataggagtaggttaatttatattatggatattgtttatgtaaagcggatatttggttttagatggtttaatttttggttattatatatttttaaagttgatattggtatagtatatgggtatgtaatatttaaagtattgttgtaattttttaggaaggatgttttggaaagttgtatatttttaggcgttagttttttgatatcgtatgaggaggggttaaatgatatttggagattatgtgtgttgatgtggtttggatgtgtgtttttttaaaacgtatgtgaaatgtgatttttagtgttagaggggaggtttggtgggaggtattagattatagaagtgaattagttatgttatgaatagtttagtattaattttttgatatgagttagtttttatttagttagtttatttgagttttgggtgtttaaacgtttgggaattttttttttttttgtttttatttttgttatgtgatgttttggttttttttatttattattataattggaagttttttgaggttttattagaagtagacgttagtattatattttttgtatagtttgtagaattgtgagtta

SEQ ID NO: 1564 - DNA, 2309 bp, Artificial Sequence
  chemically treated genomic DNA (Homo sapiens)
atataatttgttggttttgttgttagttttaatttattgattttattattgttttggggttagttttttattttttagttgtttaaattttttattttatatatttgaattttatgataaattatttttaatattgttttgtttgtaattttattatttttggatttttgtttattgaatttgtttggttaaattttatttttttttatttttgtgtgtaattatataattggttattattggtaaaaattttaaaattatttatagagatagtttagtaggtcgtattatgttattagttagttttatgcgttttttttatggttttttatttattttttggttgatattggtgttttttttttttttttaatttgtattagttcgggttttattttttcgttgagtattagttttgtttttttttggtttttggtaaggtgggggtgatttgaaggaagtttcggttttttttttttgttttgtttacgggtgtttcggtttttgtatttagggttttgttttttatattggggattacgatgtatattttcgtttcgtagagttagttcgtggtttggtttgttcgtttcgtgtgtagttttttgttagtatagttttgtttatttttaattttattgttttttttttggattttttttattagtaaatatatatgttgttatttgttttattttaaaatataattaaaataaaatagagtattttggattgtattttttgttagttattattttcgagtttttggtttgtgtagttgattttacggttaggtttttttttacgttttcgttattttaaatgcgggtatcgcggcgttaaatttgttttttttattgttgttaataatcgtagtttggtcgaatttagtgatttatttttgttttaattttttttggtttttcggtagcgtttaacgtgtgcgatttttttttttttttgtttttagtttttttcgggattcgcgaggcgtttttttttttattttttttttaggagtgtgtttttagtttcgtatttgttttttttatttttagtgtattttcgtcgtaggtattattttttgatttgttatgttattcgtttttttttttattgtatttacgttttattatttgttttggttcgtataatgttagttttgtaaggggtttttttaaggttttatttttaattgattaatgtcgaggatggggagtaatgcgtgtattagagggggttgggtatacgtaggtttgttgttggatggaggagaggtagtattttttgtatgtttgggtggtttttatttttaggtttgcgataagtattttttatttttttattttttgacggagttagttttatttattacgtggacgtgggtgttgtttgtggattaaggttagtgttttgttggttttttttattgtttggtattagtattatatagattaatagattttgttgtttttcgttcggaggggttggtgttgtggttggggtatcgttttgggtaggtttcgttttaggttatgtagtttttaggtttttttttgggaggggttggtttttataaagggggaaaattatgaaatggtaaatttgagttacggtagtatagaggatagtttttgaaggtataagtaggaagggtataatgttttttaaaagagaaaattatatggattttattgatttattattgagttttgagattattgatatttatatatgtgtttacgttgttgtgagttatggggaaaaatggaggagtaaaatgattaagtggtagggtttgtaagagttttttattgtagggatgggttgttttgaggagatattgtttaggtttgggtgtttcgggttaaagttttgatttttgtagggttgtgttttgtggatgatatgtggtattggattgtttattgataggtaggaattatgtattgagaggtgggaattgttggtcggggggtgggaattgttggtcgaggggtgggaatcgtttgttgaggggtgggaattattggttggggagtgggaattgggtattgagaggtgggaattgttgattaggaggtgggaattgttggttcgggggtgggaattatgtattgagaggtgggaattgttgattaggggatgggaattgtttgttgaggggtgggaattgtgtattgagaggtgggaattgtgtattgagaggtaggaattgttggttagggggttggaattgtttgttgaggggtgggaattgtttattgagaggtaggaattgggttgagtgtttagtttttttgttttgt

SEQ ID NO: 1565 - DNA, 2309 bp, Artificial Sequence
  chemically treated genomic DNA (Homo sapiens)
gtagaataggaaaattgagtatttagtttagtttttgttttttagtgggtagtttttattttttagtaggtagttttaattttttggttagtaatttttattttttagtgtatagtttttattttttagtgtatagtttttattttttagtaggtagtttttattttttggttagtagtttttattttttagtgtatagtttttattttcgggttagtagtttttattttttggttagtagtttttattttttagtgtttagtttttattttttagttagtagtttttattttttagtaggcggtttttatttttcggttagtagtttttatttttcggttagtagtttttattttttagtgtatagtttttatttgttagtgagtagtttagtgttatatgttatttataggatatagttttgtaagggttaggattttggttcggggtatttaggtttgggtagtgtttttttagggtagtttatttttatagtgagagatttttatagattttgttatttggttattttgtttttttatttttttttatgatttataatagcgtggatatatgtgtaagtgttagtgattttagaatttagtgatgagttagtaaagtttatgtagtttttttttttggaaagtattatgttttttttgtttatgtttttaggggttgttttttgtgttgtcgtgatttaggtttgttattttatgattttttttttttgtgagaattaattttttttagaaaggagtttgggaattgtatggtttggggcggggtttatttagggcggtgttttagttatagtattagttttttcgggcggagaataataaggtttattggtttatgtaatgttggtgttaaataataagaaaaattaataaaatattgattttggtttatagataatatttacgtttacgtggtgggtgggattggtttcgttagaggatgggaagatgagaagtgtttgtcgtaggtttggagatggggattatttaggtatgtaggggatgttgttttttttttatttaataataagtttgcgtgtgtttagttttttttggtatacgtattgttttttattttcggtattgattaattgaaaataagattttggaagaattttttgtaaagttgatattgtacgagttaaggtaggtaataaagcgtagatatagtgagggagggggcggatggtatgataagttagagggtgatgtttgcggcggggatgtattgagaatagagagggtaggtgcggggttggagatatatttttgagagggagatgggagagagggcgtttcgcggatttcgaggaaggttgaagataggagaagggaggggtcgtatacgttaaacgttgtcgaaaggttaggagagattaagatagaaatgaattattggattcggttaggttgcggttattgataatagtgggaagagtaggtttggcgtcgcggtgttcgtatttggggtggcgagaacgtgaaggaggatttggtcgtggggttagttgtataggttaggagttcgagggtggtggttggtagaaagtgtagtttaaagtattttgttttgttttgattgtgttttaaaatgggataaataatagtatgtgtgtttgttgatggggagaatttaggagaaaaatagtgaagttgagggtgagtagagttgtgttggtagaaagttgtatacggggcgggtaggttaggttacggattggttttgcggggcggggatgtgtatcgtggtttttagtgtggagggtagggttttggatataggggtcggggtattcgtggatagggtagggggaggagatcgagattttttttagattatttttattttgttagggattaggagagagtaaggttggtgtttagcgggagggtgaggttcgagttggtgtaggttgaggagagggagaaggtattagtgttagttaggagatgggtaggagattatgagggaggcgtatgaggttggttggtggtatgatgcggtttgttggattgtttttgtgggtggttttgagatttttattagtgatgattagttgtgtaattgtatatagagatggaagagaataagatttaattaagtaagtttaataaatagaaatttaaaaatggtgagattgtaggtaaggtagtgttaaaaatgatttgttatggaatttaaatatgtaaggtggagagtttggatagttggaggatgggagattgattttaaaatagtgataggattaatgggttagagttggtagtagggttagtagattgtat

SEQ ID NO: 1566 - DNA, 2697 bp, Artificial Sequence
  chemically treated genomic DNA (Homo sapiens)
gttggcggggttcgtttttttttttgtttttatttggagaattttgggggaattgttggttagagtttttaggtatgtttagaatggattattttttttagggtttacggaatcgtataagttatttaggttttttcggatttttgtagagtcggtggtgggtatagtaaatatttaggttttttgtatttttttgagttttgttttttttattttttatttttttttagatttttttttttattgagttttttttcgtttcggcgaggagggggcgtcgagggggcggggcgtcgtgcgggggtcggaggggagggggcgtcgtggggcggggtttggcggcggcggcggcggcgcgcggggattcggaggtattgggcgcgcgcggtttcggttcgggacgtttcgggacgtttcggggtcgggtttcggttgcggttgttgttgcggcgttcgcgtttcggtgcgtttcgttttttgtgttcgtcgcggagcgtagtttgcgcgttcgtcgtgcgtttttagtttttttttttgagttcgtcgcgatgggagttgcgcggggattttcggttagatttcgtcggttgtttttgtttagcgttttgttgttgtcgttgttgggcggtgagtattcgagagttgggggtatagagtttgggaagcgcgggagtttcgtgggtaaaaggttgcgttcggggcggtgggtttgggcggttggaacggttttggagtagtggagaggttcgttgggggtgtaggtttgcggcggaagggcgtaaggagttcgggtgtcgggaggttggcgaagtttttagggacgcggttagggtattttttttattcgcgtcgcggggacgtatttttagtttttttgagtttttttggtttgagtcgagagtttgttcgagaattgtcgagagttgttggttttcgggtttagatggggagttttttgtcgggggagaaaagattattcgtatttatcgtggggagcgcgatggagaaaaaggaattttttattttattcggtagggtcggtttaggtaagagttgttggtttggggttcgatgtcggatagatttgcggcgcgtaaagcgcggagttttgttatttacgtcgattcgacgttttcggtttttttttttcgagtttttgggtaaagttgagattttagatggttttgcgggtgagggcggaagaagggaagagttaggggtcgtttttatttatggtttttagttattggtttggaattttgcgtttatttcgtgttagggtcgaattcggggattcgagggttttaggttgtcgcggtgattaatgtgtgaaggtcgttgttaaaatcgggtatggtttggttgtaaaggtgcggacggggtttgttttgtttttttttggatttttattttgattgtttttatagaggaaaggaagtatttttaagggaagaaaggtaaaaagagtttattttggttttttttgggggggggttttagtattttaacgagggtgtggtttttattattagggtagatagtatcgtttttttaattttcgtagtttttattttttggtttggttatatttaagagttattattgaggtgttgaagtgttttataggaaagtattaagttattcgtatattttaaatagttcggattggaaataaagttttcgattttttataatattttttggtggttttcgaagtagtttttttttggggagttttgtcgaggagatttgttttaggtgattattttttattttttttgaaggtggtaatgggaagggtatgggtaaggaattgtttttttaatatttttttggtttgttagttgtggaggggttttggtgttggtggaattaatattttttttgtttttagttgtaaaaggagaggtaaatgtaatttaggaaagagattaatttttagggatttggaggaggtgtttttggagttgtttcgttttttttgtgatgtgtgtggtggttattgttcgtggtagaatttatatttgtttttagaggaagtatggaagtttttttgtatagttaggatgggggtttagttatttgggcgagtagtttaagtttataggttttttggttgttttggttgggttttggtgtgtgggtttgtttaatgaggttgtttttattgttgttgtttagggtattagagttaaggggagtttttggtgaagatggggtttttgtttaataaatgttgaatttttaaattttttttatgagaagatgattttgatgttaattgatttaatttggtgattggttggtgtttagtgtgtgtgcgcgcgtgtgtgtgggggattttgttgggggaagttagggtaggttgagggtttaggataggaggtttgtagtttttttaggggtggggggatgttttgtgtttaataaaggaatattttaatgagagttttaaattaattttattaaatgtgttttgttgtggaatttgtttatgtgttgtaaataattttagtggaggtcgaggcgtttgttgttttttagtgaaattttgggatttaatttatttttagacgtatgattttaggggtaacggttttttaatagattatagtagatgtttgtattttattgtttaattgtgtaattaattggagttgtagtgagattttattgttaataaggttggagtaagga

SEQ ID NO: 1567 - DNA, 2697 bp, Artificial Sequence
  chemically treated genomic DNA (Homo sapiens)
tttttattttagttttattaatagtgggattttattataattttagttaattatataattaaataatgagatgtaaatatttattgtgatttattaaaaaatcgttgtttttgaagttatgcgtttgggggtgggttgagttttaggattttattagaagatagtaggcgtttcggtttttattgaaattgtttatagtatatggataggttttataataaggtatatttggtggaattgatttaaggtttttattaaaatgtttttttgttgagtataagatatttttttatttttgaggagattatagattttttgttttaagtttttagtttgttttaattttttttaataggattttttatatatacgcgcgtatatatattaaatattaattagttattagattaagttaattaatattagagttatttttttatggaaggaatttaggaatttagtatttgttgagtaagagttttatttttattagaaattttttttgattttagtattttgaatagtagtagtgaaggtagttttattgggtagatttatatattaaaatttaattaggatagttagggggtttgtgagtttgggttgttcgtttagatggttgggtttttattttggttgtgtaaaaaaatttttatattttttttgggagtagatgtggattttgttacgagtaataattattatatatattataagaaaaacggggtaattttagaaatattttttttaaatttttggagattggttttttttttgggttatatttatttttttttttataattgggggtaggggagatgttgattttattagtattaaaatttttttatagttggtaggttagaaagatattagaaaggtaattttttatttatgttttttttattgttatttttaaaggagatggaaggtgattatttaggataggttttttcgatagagttttttaagagaaagttgtttcgaggattattaaggagtgttgtggagggtcgggggttttatttttagttcgggttatttgggatgtgcgggtggtttggtgtttttttgtaaggtattttaatattttagtgatgatttttaggtgtgattaagttaggaaataaaagttgcgggagttgggggggcggtgttgtttgttttggtgatgagggttatattttcgttaaaatgttaaggtttttttttaagaaaagttagaatgagttttttttgtttttttttttttagaaatatttttttttttttgtgaggatagttaggatggaaatttaggaaggagtagaataaatttcgttcgtatttttgtagttaggttatgttcgattttggtagcggtttttatatattagttatcgcgatagtttgggattttcggattttcggattcggttttggtacggagtgggcgtagggttttagattagtagttagaggttatggatgggggcggtttttaattttttttttttttcgtttttattcgtagggttatttggggttttagttttgtttaggaattcggaggagggaagtcgggaacgtcgggtcggcgtaggtaataaagtttcgcgttttgcgcgtcgtaggtttgttcggtatcgggttttaaattagtaatttttatttgggtcgattttgtcgggtggggtggggaatttttttttttttatcgcgttttttacggtgggtgcggatggttttttttttttcgataagaaattttttatttgggttcgagagttagtaattttcggtagttttcgagtaaattttcggtttagattagaaaaatttagggaggttggaaatgcgttttcgcggcgcgagtgggaggggtattttgatcgcgtttttggaggtttcgttagtttttcgatattcgggttttttgcgttttttcgtcgtaagtttgtatttttagcgagtttttttattattttagggtcgttttagtcgtttaaatttatcgtttcgggcgtagttttttgtttacgggattttcgcgttttttaagttttgtgtttttaattttcgggtatttatcgtttagtagcggtagtagtaggacgttgagtagaggtaatcggcggggtttggtcggggattttcgcgtagtttttatcgcggcgggtttaggaaaaggagttgagggcgtacggcgggcgcgtagattgcgtttcgcggcgggtataggaggcggagcgtatcggagcgcgggcgtcgtagtagtagtcgtagtcggagttcgatttcgaggcgtttcgaggcgtttcgagtcggagtcgcgcgcgtttagtattttcgagttttcgcgcgtcgtcgtcgtcgtcgttaagtttcgttttacgacgttttttttttttcggttttcgtacggcgtttcgttttttcgacgtttttttttcgtcgaggcggggaggagtttagtagggggaggggtttggagagggatggagaatagagagagtaaggtttagggaagtgtaggggatttgagtatttgttgtatttattatcgattttgtagggattcgggagaatttaagtgatttgtgcgatttcgtggattttggggagaatggtttattttgggtatatttggaggttttggttaatagtttttttagaattttttaggtgggggtaggggaagaggcgggtttcgttaat

SEQ ID NO: 1568 - DNA, 2405 bp, Artificial Sequence
  chemically treated genomic DNA (Homo sapiens)
tgtgtaagtttcgattaaatatagagtttttattttttgtgtaagttatttaagagaaaggattttattttttaatttttatttttttagtagaagttattattgttagtttaattttaaatttatatataaattacgaagtttaataattttttaaaaataagttttttaaaaatattttttttgaaataatgttttattgattttgaaaattttttttagttgttgttatgtttaatattttttattgatgatatatgtggtgatgatggtagtgtaaagaaaaagtttgaggaaatatatacggtgttgatattttattaaaatgaatgtagtatttatttataattgtaatttaatttttaagtaaaaatttgattttttattattatttttttaagtttggtttattataggtttaaagtttgtatgaatttatatagttgttttgaggttttgtatatttttttgttttcgattgtttgatttttttttaaaggggtatttttgtattgaagtaaaatataattattaatattagtttcgggggaaaaagaaattaataaatttatagtttgaaatgttttaatattttgtatttaaaattttgcgtattttttagaagttataaaaataaaagttattttttgtaaaaaaaaaaaagaaaaaaagattgagaataaattgttatgattttagaaaacgatagtagacgtgtaggtgttaatattagagagtttattttcgaataaaatggtgttttttaaatagcgattatttatatgttttagaatttttttttgggtatgggtgtttttatattgttttattattataagatgtaagtcgtgtagtagaatgttttttgtatggtatttagttaaaagtgaaataagttgtttattgatagagaggttatttatagaatatatttatttatattagtgttaggtagtaattgaaaggtaatgtaaagaagtaatttttttttattttgtttggagtaattttgatttggagagttatgtatatattttacgttaaggaggtgatgaaagttttattttttatagcgatgatatttggaagaagatataattgttatcgtgagttttttaattatttttggagattaagtgtgagacgtagtagtgtaggatgattggattacgtaaaacgagatagatgttatttgtgagttacgcgtaagttgttaagtgttaaaatgaatatttttattaaacgatggagtttttatattatttgtagtttggttagatttgaaagatgagttgattgtttttagatagtgcggtaaataggtagggatttggaattttttttggttgtatgagtaattattgttttatatttaaattagaaatatgggtttttagttaggttttgagattgtttttaaaggatgttgttgtatttatgttgaagcgtggtttgttttttttgttttatttataagggttatagagttttgagaaagaaattattagttttttttatattatggtaaagaaatgtaaaatttatgattttttgttaggaaataaaagggtttttatattttaaaataatggttataatattgtgggtagaatgtttttaagaattgttaggaggtagtattggagttttgtttttttgcgttttgaggttttagaattaattttttatttataatttatttttttatttttttattggtattaattttattattatttttattttaatttttaattgttgtgattatatagtaatatagtaatatattttatagagtttatggggtatatgatatattttgatataggtatttaatatgtaatgattatattaaggtaagtgggatttttattattttaagtatttattttttgtgttataagtaatttaattatatttttttagttatttttaaatgtataattaaattattattgattatagttattttgttgtgttattaaatattagattttatatatttttttttttttttgtatgtattaattatttttatattttttttttttttttattattttttttagtttttggtaattatttttttattttttattttaatgagtttaattgtttttatttttagtttttataaataagtaggaatatatgaagtttgtttttttgtgtttggtttattttatttaatataaggatttttagttttatttatattgttgtaaatgataggattttatttttttttttggttgaattttattttgtatttgtattatatttttttatttatttgtttgttgatggatatttaggttgttttttaattttggatattgtgaaatatgttgtaatatatatgggtatgtagatattttttcgatagattgatttttattttttgg

SEQ ID NO: 1569 - DNA, 2405 bp, Artificial Sequence
  chemically treated genomic DNA (Homo sapiens)
ttaaagaatggaaattagtttatcggagaggtatttgtatgtttatgtatattgtagtatgttttataatatttaagattaagaaataatttaaatgtttattaatagataagtggataaagaaatgtggtataggtatagaatagaatttagttaaaggaaagaatgaaattttgttatttgtaataatatggatggaattggaggtttttatgttaagtgaaataaattaggtatagaaagataaattttatatgtttttatttatttgtgggaattaaaaatggaaataattgaatttattgagatggaaagtaaaagaatggttattagaagttgggaagggtagtgggagaaaagggggagtgtggggatggttaatgtatataaaaaagagagagaatgtataagatttagtatttgatagtataatagagtgattatagttaataataatttaattgtatatttaaaaataattaaaagggtataattggattgtttgtaatataaagaataaatgtttgaggtgatggaaattttatttattttgatgtgattattatatattagatgtttatattaaaatatattatgtattttataaattttatggggtatattattatattattatgtaattatagtaattaaaaattaaaataaaaataataatagagttggtgttagtaaaaagatgggagaatgaattgtaaatgaaggattggttttggagttttaggacgtagagagatagagttttaatattgttttttggtagtttttgaaaatattttatttataatattgtggttattattttagagtatgggaatttttttgttttttaataaaaagttataagttttatatttttttgttatgatgtgaaaggaattgatgattttttttttagaattttgtggtttttgtgagtgaaatagagaggataggttacgttttaatatgaatgtagtagtattttttggaaataattttaagatttaattgaaaatttatgtttttaatttaagtatgagatagtaattatttatatagttagagaggattttaagtttttgtttatttgtcgtattatttaaaaataattaatttattttttaaatttgattaaattataaatggtatgagaattttatcgtttaataaggatgtttattttggtatttagtagtttacgcgtggtttatagatggtatttgtttcgttttgcgtaatttaattattttgtattattgcgttttatatttagtttttaggagtaattgaaaagtttacggtgataattgtgtttttttttagatgttatcgttataaggagtggggtttttattatttttttgacgtaggatgtgtatatggttttttaggttagagttgttttaagtaaggtaaagagaaattatttttttgtattgttttttagttgttgtttagtattggtgtaaatgaatatgttttataaatggtttttttgttagtgggtaatttgttttatttttggttgggtattatatagaaaatattttgttgtacggtttgtattttgtggtaatagggtaatataaaggtatttatgtttaagaaaggattttaaaatatgtaaatagtcgttgtttagaaggtattattttattcggaggtaagttttttggtattagtatttgtacgtttgttatcgttttttgaaattatgatagtttgtttttaattttttttttttttttttttttgtagggagtggtttttatttttgtaatttttaaagggtgcgtaaaattttaaatgtaaagtgttgaaatattttaagttgtaggtttgttagtttttttttttttcgaggttagtgttaatagttgtgttttattttagtgtaaaaatatttttttaaaaaaaaattaaataatcgaaaataaggaaatatgtaaagttttaaagtagttgtgtaaatttatataggttttaggtttataatgagttagatttaagggaatgatagtggaaaattagatttttatttaaaaattaaattataattatgagtgagtgttatatttattttagtaaaatattagtatcgtgtgtatttttttaagttttttttttatattattattattattatatatgttattagtgagaaatgttgagtatgataatagttaagaaaaatttttaaggttagtaaaatattattttaggaaaaatatttttaaaaagtttatttttaaggggttattaaatttcgtaatttatgtatagatttgggattgaattagtaataataatttttgttgaagagataaaaattagaagataaaatttttttttttaagtagtttatataaagaatgggggttttatatttagtcggggtttatata

SEQ ID NO: 1570 - DNA, 2393 bp, Artificial Sequence
  chemically treated genomic DNA (Homo sapiens)
attaatattattagatgtgggattttttaatagtagagattaaagttgagtttttaatatagtattattttttcgggaatattagttaattatttggtgatagattgattatattaggttttttatattatagaaggagaattgatttgttttttttggaatagatattattttgaatatggattagttttttttgttagaatatgtattagttagtattatttgtatttataaaattgatggattgattttttagaaatttattggttttattaggtaatttatgattacgaaatatgtgggttatggtaataagttggtaagaggtttattaaaaatttagttatagatggtattaattaggggataatattttaaaaggatagattttattttatagaatgttagagggagagagggagatagggagagagggattgatatatgggtattgttttttttattagtttaggattaaggaatggttgtgaggtgattttttttattattttatagttaataatttaattgtaggatttttgtttttcgttttaattttgagttttgttggttgtgtgttttagtgttaataataatggagtttttgaattggtagttgaaataagtatttggttttttggggttttttttgttattgaaataaagaatagtatttaattgttgtagttatagattttgattataaaagggaaattagattgttattaaataatagggttagggaagtttgtgtttaaatttaggagattttttgagatgtcgtttaatatttttatgttttatattaaaagttaatggaatatgtagggggcggtttgagaatttagaatatgttttgttttttattatttttattttatttttttttagggaggtagcggacgttggagttttttaggttagaagtttaggggtaggggtatggtgggggcgttttttttatttcgagaaaacgtagcggtggttacggggaggggcgttattatgtagtatttaggtttggattttagttagtagtattagtttttttttattttcgggtagcgatatcgttggtgtagatcgttttaggtgcgttttcgtttagttttattgtttttagttttagtttgggttcgtttttagtttgttggagttgttggatgtgtttaggtttttaggtattttggtttttttttattcgtttcgcgaagatcgagggaaagtagacgcgttttcgcggtaattcggagtttgtagttcgtagggattttatcgttttaggtgtaggcgtgtatatgttagttgtagaaaatattatattaaattagtttgagggagttaaagtaaattataatattttaggcgttagagatttttttattatagaatttgtttgtttggatagtatgatattttttttataagattttattaataagttgtataaatagtttataggtttagtattatatatttgagaaaagagtttttttaacgttatattaaaattttttttagttaatagaaatagaggttagaatattatagagtaaaatttagaaagtttgaatacggaaggaaattttatatattaggtttcgaatggtttggtgttagttatttttataaattttttgtgtttttattatataatatttttcggcgtttttgtttttgatgttaatattagagatgtatgaattgaatcgcgttaaagttagaattcggtttcggttatattaggtatggtttaggtaattttagttatttaggaggttaaggtaggagaatcgtttgaattcgggaggtggaggttgtagtgagtagagattgtgttattgtattgtagtttgggtaataagagtaaaatttcgttttaaataaataagaaaataaaaaatattttttaagtgtattgttttttaatagaattaatggagttgttagttttttttagaaattttttttttatggaaatgtgttttttttgttaattaggaagtttgttgaatagattttttggttataaatttttaagagtggttaaagtattttaatggatagataagaaaggtaaagatgaattttttattttttttggtttttgtatagtagttgatttagttatatttaaatttttatttatattgaaatttatattaaaaataaataaataaaaaataaataaaaaataaataaaaaataaataaataaaaaataaataaataaaaaataattttaaaattaaatataaattagattttatatttatagtttgggatgttaaaaagaaaagttgttttgggatatgttgaagtaaaattgtgtgtatgggggatttggttgttaatatattttgttgagttaaaaattgtgtttagatgagtaag

SEQ ID NO: 1571 - DNA, 2393 bp, Artificial Sequence
  chemically treated genomic DNA (Homo sapiens)
tttatttatttgaatatagtttttgatttaataaagtgtattagtagttagattttttatgtatataattttgttttagtatattttagaataatttttttttttggtattttaaattgtaggtgtaaaatttagtttgtgtttagttttagagttgttttttgtttgtttgttttttgtttgtttgttttttgtttgttttttgtttgttttttgtttgtttgtttttggtgtaggttttaatatgaatggaggtttaggtatggttggattaattattgtataaaagttaagggaagtggaagatttatttttgttttttttgtttgtttattaggatattttaattatttttgggaatttatggttaggaagtttatttagtagattttttaattggtagaggaagtatatttttataaaagaagagtttttggaggaagttagtagttttattagttttgttggaagatagtgtatttgaaaggtgttttttgtttttttgtttgtttgagacggagttttgtttttgttgtttaggttatagtgtaatggtataatttttgtttattgtaatttttatttttcgggtttaagcgatttttttgttttagttttttgagtagttgggattatttgggttatgtttagtgtggtcgaagtcgagttttgattttggcgcggtttagtttatatatttttgatgttgatattagaagtagaaacgtcggagaatattgtatagtagaaatataaaagatttatagggataattaatattaagttattcggagtttgatatgtgaagttttttttcgtgtttaggttttttgagttttgttttatggtattttggtttttatttttgttagttgggaaggattttaatgtaacgttaagaaaattttttttttaggtgtgtgatattgagtttataaattgtttgtgtagtttattaataaaattttgtggaaaaggtgttatgttatttaaataggtaaattttgtaataggagagtttttgacgtttgaaatattatagtttgttttgatttttttagattggtttggtgtgatattttttgtaattggtatgtatacgtttgtatttggggcggtggggtttttgcgggttgtaggtttcgggttgtcgcggagacgcgtttgttttttttcggttttcgcggggcgggtggggggaggttagggtgtttggaggtttgaatatatttaatagttttagtaggttgagggcgagtttaagttggggttgaggatagtagagttgaacgaagacgtatttgagacggtttatattagcggtgtcgttgttcgaaagtgagagaaggttgatattgttagttggaatttaggtttgggtgttgtatggtggcgttttttttcgtgattatcgttgcgttttttcggggtgagaaaggcgtttttattatgtttttgtttttggatttttggtttaagaagttttagcgttcgttatttttttgggagggagtggggtgggggtggtggggagtaggatatgttttggatttttaggtcgttttttgtatgttttattgatttttagtatgggatatggagatattaagcggtattttagagaattttttgggtttagatatagatttttttagttttgttgtttagtagtaatttaattttttttttgtaattaggatttatggttgtagtaattgagtattgttttttgttttagtggtaggagaagttttaaaaggttaggtgtttgttttagttgttaatttaagggttttattgttgttggtattaagatatatagttagtagggtttagagttgggacgggaagtaaaagttttgtaattgagttgttagttatggaataataaggggaattattttataattattttttgattttgggttggtggaagaaatagtatttatgtattaatttttttttttttgtttttttttttttttttggtattttgtaagatagaatttatttttttagggtgttgttttttaattggtattatttgtagttgagtttttggtaagttttttattagtttgttattatgatttatatgtttcgtggttatgggttatttggtaaggttagtgaatttttagggaattagtttattagttttgtgagtgtagatggtgttggttagtatatattttggtagggagagttaatttatatttagaatagtgtttattttaaggaggataaattagttttttttttatgatgtaaggggtttgatgtaattaatttgttattaggtggttggttgatgttttcgggggaatggtgttatattggagatttagttttggtttttgttgttggaagattttatatttggtaatgttggt

SEQ ID NO: 1572 - DNA, 2378 bp, Artificial Sequence
  chemically treated genomic DNA (Homo sapiens)
attggttttgaatttttggttttaagtgatttttttgttttagttttttaaagtgttgggattataggtatgaattattatatttggttatttaatttatatttttaagaaaatattgagattagtagaagtagttatattatttttgaaaatataaaagttataatatatttttttttttaaaaaaaaaatttgtaaaaattttgtaataaatttattttacgggtatgttttgattgagatagttggaaatttataattatttttatttaatttaatattgtaaatatttattgtatgtttattacgtgttaagtattatattaaaagttgggaaaataaataatttatgtatttgttttcgagttattattagatagggtaagtgtggaggttatttggatttaagaaaggaattttagtatttttaagtggatttagtaagtgttttttttcgttgtaaaatttttaaatttttacgtttatttgaaatagaatttaatttataaatatataatttttagaatatatttattatatagggaaaagtatttaagcgtatttgttgtttagtttaaaagtatgagatttgatttgtttgttatatagataaaatatatttagtataggagagtttatttttaatttggttacgtgattttaatatttttttttaatgtttatttttaagtttagaataatagaaataaatattcgtatattggtttttttaaaattttatatttggaattgtattttttttatgttaattataaatgtaattttttattagtttatttattaattttttttaaaaataaatttagattttttttattttttataattaaaattttttaattatagaggagagttgtgtgtatttatttagttatgtttttgttttttttttttttttttttttttttgtttttattttttttttttttttttttttttttttttttagttttttttttgggatatcgagggataaagttgtaaggtattattatagattttttattttttttttttgtttattagaacgttaataagagatataatatttagaaaatagagagtagagatttttttggattaaatagtattttttttttttgtttttgtttttttgtgatttaagggagaaatgattttttttttttaagtgattttatttttttttgttaagaattcgtggatatgttatttggttagagtttagtttgtagttattacgtaggtaatttatttacgttagattataatttatttaattcgtttgtgttttagttaaatgtgtattagagtaaaagtttagatttgattatgggtaagtttaatgattaatataagttatttaggttttttttttagggtttgttagtaatgattaaaggaaaagtgttttatatttttttttatttattgtatgtgttttagataagaattttaagtaaaagtttatttagtgagataaataggtatttaatattgaaagaatttgttagtaaattagcgattgaatagagggtttaagagaaaggattattagagggtagatttttatttatgaatagttttttattttttatttcgaagagtgattcgtaaatattaggttatgggttgttatttatatatttattgtaggggtatgggtttaaagaagtatagaagggaagtaatttggtttaagttttgttgagaaagggttgattgattttttttatttttttattttttatttttttttttgattttgtttttttaattaagaggaggtttttgatttgtatttattattttttagtcgtatttagattatgggttttagttatcggttgaattggtgggtttaggaaggttaataatatttttttatttggtttatgtttgatttttttgtttttgttttattgtttattttgatttatattttttaatttttgattatgtttgtttacgtttggcgatatttgattagaagacgtttttattttttatttttttttttttttttgagggagaagttattttggtaaaatttgatagttttgagtttttatttttaaggattagtagtagatttggagaagtatttttagtaaaattagattaaagttatggaaatacgattataattttgatgatagtagtaaaattattttttagaaagtgtggaagtttatattaattttgttgtatattatagtttggtaattcgtgataagttgaaaaatttttgtagttttgaagttagtggtgtagagagagggtgtttggttagattggggtaggtagggggttagttattttattattttgtttgtttgttgaattttttttagtttttattttggattttttttatg

SEQ ID NO: 1573 - DNA, 2378 bp, Artificial Sequence
  chemically treated genomic DNA (Homo sapiens)
tatggaagagatttagagtggaaattgagagaggtttagtaggtaggtagggtggtggggtgattgattttttatttgttttaatttggttaagtattttttttttatattattagttttagggttataaaaattttttagtttgttacgggttgttaaattgtgatatatagtagagttgatgtaaatttttatattttttagaggatagttttattattgttattagagttgtggtcgtatttttatggttttaatttggttttgttggagatgtttttttaggtttattgttggtttttgaaggtggagatttagggttattaaattttattaaaatgattttttttttaaaggaaagggagaggatagaagataaggacgttttttggttaggtatcgttagacgtagataaatatgattaggaattgggggatgtgaattagaatgggtagtgggataggaatagagaagttagatatggattaagtaagaaggtgttgttgatttttttaggtttattagtttaatcgatgattgaggtttatggtttgggtacgattggagggtgatgagtataagttaaggatttttttttggttaaaaaagtaaggttaagagggaggatgaggagtagaaaaatgaagagaattaattaatttttttttagtaagatttggattaagttattttttttttgtatttttttagatttatatttttatagtgggtatatgaataatagtttataatttggtatttacgagttatttttcgggatgaagagtgagagattgtttatgaatggggatttgttttttagtggtttttttttttgagttttttgtttaatcgttgatttgttggtaaatttttttaatgttgaatgtttgtttgttttattgggtggatttttatttaaaatttttatttggggtatatgtagtaagtggagaaaaatgtaagatattttttttttggttattattaataagttttgaggaaaaagtttgagtggtttatgttaattattaaatttatttatggttaggtttgaatttttattttggtatatatttggttgggatataaacgagttaggtgagttatagtttaacgtgagtgagttatttgcgtggtggttgtaggttgagttttaattagataatatgtttacggatttttgatagagagaaataagattatttagaaagaaaggattattttttttttgagttataaggagatagaaatagaaaaaaaaggtattgtttgatttagaaaagtttttgttttttgttttttaggtgttgtattttttgttaacgttttggtgaataaaaggaagaaatgggagatttatagtagtgttttgtaattttgtttttcgatgttttaaaggagaagttgagagggaagggaggaagaagggaagagggagtgagagtagagagaggagagagagagaggagaataaaaatatgattaaataaatgtatatagtttttttttgtggttgaaaaattttagttatgagaaataaagagagtttgagtttatttttaggaagaattagtggatagattaataaaaaattatatttataattgatatgaaaaagatgtagttttaaatgtagggttttaagaaaattagtgtgcgaatgtttatttttattgttttgagtttgggagtaggtattaagaagaaatgttaaaattacgtagttagattgaaaatagatttttttgtgttgagtatattttgtttgtgtaataagtaagttagattttatgtttttggattaagtagtaaatacgtttgggtatttttttttatgtggtagatgtattttgaaagttgtatatttataagttgaattttattttaaatagacgtaaaagtttgggaattttgtaacgaaaaggaatatttgttgaatttatttgaaaatattagaattttttttttaaatttaagtagtttttatatttattttatttggtaatgattcgggggtaggtatatagattgtttgtttttttaatttttagtatagtgtttagtacgtagtgggtatataataaatgtttgtagtgttgaattaaatagaaatgattatagatttttagttgttttaattagaatatgttcgtaaggtgagtttattgtaaagtttttgtagattttttttttgagggggggagtatattgtagtttttatatttttagaaatgatgtaattatttttgttaattttagtgtttttttaaaaatataaattaaatggttaggtgtggtggtttatgtttgtaattttagtattttgggaggttgaggtagggagattatttgaggttaggagtttaagattagt

SEQ ID NO: 1574 - DNA, 2351 bp, Artificial Sequence
  chemically treated genomic DNA (Homo sapiens)
gattttttattgtgtttttgatatttgggtttaggttttttttattatttttttaattttttttttttttaaggtatttttaattattttattttgtttaaaattttgtaatatttttttattgtttatagggtataatttaatagttttatatagtaaataaagttgttcgtaaattagatgttttttatgtgttaggttttattattttttttattaatatttttatttcgttttgattatttaagggttttaaaagtattatattgttttttattttttttttttttttatattttttttgtttaaaatgttttagttttttttgtagggtttttttagtattatttttgttttttagattttgattttaggaattttaatgttgtattatatgatttgtttgtttgtttttgtgtttattttttcgttggattgtaagttttttgagagcgagtttagtattttttattttggaatttttatatttgtgatattgtataagttaaaatagatatttagtgagttagtagttatgttttataaagttttttttatatttattattttatttgatatgtttagaaatggcgttttttagaaattaggtgtaattggtagagtaggtttgaggtatttttatattgttaaatgataaaattaaaattaagaaatatttagaagtggtagattagggttatataaagaaaaatagtagaagattttttttaaatttttgtattatttttatattattttttttgttagattatgtgatttttgagtataggattaaaagtaaaagaaattggaaaataaaggtaaattatatagtaagaaagtagaaggatttttagatgtaatataataaatgaatttattttattatttttttgttagttattttttaaaaaatttatttttataaaagaattttttgaagtgttttttatttttaaattaaataaaaaaatttttaaaatttatgatttatttatttttttgttttttatagtttttagttttaaatttttaaaatgttattaagtattatatttaattttataataaatttatattttaggtaggatgttgtttataggatttatgttgggtgatgtttgggtgatttaaatagggaaataatatttttttaagttatattagtttttaacggtgttattggttacgcgtagagaggtaaatttatgagtagtattggggagttaatgaacggttggttagatggtgtttgttagaaggtgttgattttttagataattgggattgttttttgggagtaaatgagaggtgtagtagggacggattgtattttaattatatagaaatagatagatttattgttaatgaaaataattatatagttaggtatatttttttttttttgattttgtttgttttatttggtagatatagacgaggatttagttgaaattataatattatattaaacgacgtaatggagtaaatatgaaaagttatttataaattattagtatttttaattaggaaaaattaaatagaataaggaaaaataatgtaaattagtggtaaattaatttggaattaataagggtattttgattgttatagtatgaattatttgaaaataaataaaatttgaaatataatagtgatttgtagatgttattgaaatatttaaattggtggagtttattaaggatattttggtatttttgattttttagtataatatatttgaaatgaattatttttattaatttgattatttttatttgttgttttgttgaattgcggaagtttttttattatatgtttagtgatatttttggtaggtaaattttgatatttaatgtttatattttagtagatataataagtagaaaattttattgatttttttgttgttattagagaatattatttaaatatttgtttgtttgttgtggttatttttaggtattgtataaaattagttaaataaatgttattataaaattatggatagtttgtttggttatagtaatagatttagtagattgggtaattttattttttattagttatgtgattttaggtaagttgtttagtttttttttgttttggcgttttggttaaagtgaagattttatgaaatgaatgtaaagagtttgatatagtagttagtatgtagttaattttcgtaatgttttttttttttgattataaagagtttttagtttaggttatttatttattttttttttatgtttttattttttttgattgtatatattgggtttgtttttaattttgtgtttattttaaataggtttttagaaatttagagcgatgtatttgaaaatttg

SEQ ID NO: 1575 - DNA, 2351 bp, Artificial Sequence
  chemically treated genomic DNA (Homo sapiens)
taaatttttaaatatatcgttttgaatttttagaagtttgtttaggatggatataaggttgaagataaatttagtgtgtgtaattaaggaggatggaaatataagaaggaaatgaatgaatgatttggattgagagttttttgtagttaggaaagagaagtattacgagagttgattatatgttagttattgtgttaaattttttgtatttattttatagaatttttattttaattagggcgttaaggtaaggagaggttaaataatttgtttgaggttatatagttggtaagaaatagagttgtttaatttgttgagtttgttattgtgattaaataggttatttatagttttgtgatggtatttatttaattgattttatgtaatatttaagagtaattataataggtagataaatgtttaggtaatattttttgatagtaataaaaaagttaatgaagttttttatttattatatttgttgaaatgtgggtattgagtattaaggtttatttgttaaagatgttattaagtatgtaataggaaaattttcgtagtttagtaaagtagtaagtgaaaatggttaaattagtaaaagtggtttattttagatgtattatgttggaaagttaaaagtgttagaatatttttaatggattttattagtttgaatattttaataatatttgtaggttattattgtattttaaattttatttatttttaagtagtttatgttatagtaattaaaatatttttattaattttaggttagtttattattaatttgtattatttttttttattttatttgattttttttaattaagaatattaatagtttataggtagttttttatatttattttattgcgtcgtttaatatgatgttatagttttagttagattttcgtttatgtttattaggtaaaataaataaaattaaaagaggaaaaatatgtttggttatgtgattatttttattagtagtgaatttgtttgtttttgtgtgattgagatgtaattcgtttttgttgtattttttatttatttttaggaaatagttttagttgtttaaaaagttaatattttttgataggtattatttggttagtcgtttattaattttttaatgttgtttatgaatttgtttttttacgcgtgattagtgatatcgttgagagttaatgtggtttaaaggaatattgtttttttgtttggattatttaggtattatttagtatgagttttatgggtaatattttatttgggatgtaagtttgttataagattaaatgtaatatttgataatattttggaaatttgaagttgagggttgtaaagagtaaaaaaataaataggttataaattttgaaagtttttttgtttggtttgaagatagaagatattttagaaaatttttttgtgggagtaaattttttgaggagtgattaataagggagtgatgagatagatttatttattgtgttgtatttgaaaatttttttgtttttttgttatatgatttatttttattttttagttttttttgtttttaattttatatttagaggttatatagtttagtaggagagataatgtgaagataatgtaagagtttgaggaaaattttttgttatttttttttatgtaattttagtttattatttttgaatattttttaattttggttttattatttgataatgtaaaaatgttttaaatttgttttattagttatatttggtttttaaaaggcgttatttttaggtatattaaataaggtaatgaatgtgaaaaaagttttgtaaaatatagttgttggtttattgggtatttgttttggtttatataatattatagatgtagagattttaaaataaaaggtattaaattcgtttttaaggagtttataatttagcggagagatggatataaaagtaaataaataaattatgtgatgtaatattaggatttttaaaattaaggtttaaagagtagagataatgttggaggagttttataaaggaggttgggatattttgggtagaggaaatgtggaaaaaagagagaggtgagagatagtatggtatttttgaaatttttaagtagttaaaacgggataaaaatgttggtagaagaaatggtgagatttgatatataagaagtatttggtttgcgaatagttttgtttgttgtgtaaagttgttgaattgtattttgtgggtaatgggagggtgttgtagagttttgaatagaatgagatgattggaaatgttttgaaagaagggaaggttgaaggaatgatgagaggggtttaagtttaggtgttagaggtatagtaaggagtt

SEQ ID NO: 1576 - DNA, 2435 bp, Artificial Sequence
  chemically treated genomic DNA (Homo sapiens)
atttttttaaatatatttggggtagaggtattggaaaaaagcgaaaatgtgaattaaaggaaagaaatattgtaatttaggagaatgttttttgttaggtatttatagttaaggtagtagggtgtgcgtgtatatatatatatatatatatatatatacgatgttatttttgttttagtgcgagatagttttacgggtgtcgggtatggtgatatataatggatattaaaatcgtatagttagttttagtaaattaggtaaattagagattatttgatggtattttattgttgttattgtaattatcgtaattttttttggtaatggtgtttcgtgatgaagtgttgtttttataggataattgtgaaagatatcgaaagatttagggatgtagtatttggttttaaaagttttttagatttaaattggtattttattttattttgaaaatttatgagagatttagattatgtcggtttaaatggaaaggtgaaagtagggtaattttaatttatgaattatttaattttagtttggtgaaattgttatttatgaattgatgttttgatagttttttcgtagagtttttattacgtttgttatttttatttttttatttacgattttttttttagttatcgagtttgttttttagggtttagttttataaattaagtattttaaattggtaataatttaaatgtgtcgttgtttcgaatcgttgtttttataggttgtttttttttgttttttttaaattattaaaaattatatttatgatgatatttgttgggtttttcgattagatgaattaaaatatatatatatatatatatatatatattatatataagggtattattgcgaagaagagttatgtttcgttaatattataagagaagagaaagtgatgttttttgtttttttttttgttgttagtatgatttattttagttgtatagtattacgtagaaaggagttagggttaaaggcggtttgtttggtattttgatttttagttagagttgatgaggattgtatggtaggtaggttaatttagataattgtatatttagcgagtacgattatttaggaaaataaggaaaagtcgttggatgatcgaaattagattgttattttttcgggttttatttgtatatagattgtagtcgtaacgattttttatttgatggttggttgtgttattgttagtcgatagttgtttcgtatttagagaggattgggagtgatttaggttagggagtttggttttttttttaaatcgtgcgttaattgaggagtggggatttgcgttagtttcgtgattagttttaaatgtgagttggggagttatatagtattagtgcggtgagtcgttcgtataggttttagttagataaattatagtaagtatttttttttttgttttagtttttatttttgtaggtagagtagcgtggtataagaagtttttaaattatttatatatatggtgggagattagtcgtgttttattagaggcggtttggttataagttttcgagtagtatttgtttagttgaaaatttacgttgttaagttagaagttatcgtgtatatttaggatgtatttttgtttttggttaaataaaggtaaatattttttatgtaagatatgttaagtagtagtaggagaagaaaattttaaaattttgttgttttgtgtttagttgtttgtttttgttttgttgtattgcgattgggaaattgtaggagttggagttggtagttgcgataatgtagaaagtagtagttttgatatagtagttagttgatttgcggggtgttattatttaatgttttttgtagaattagattagtttttaaggtggtattagatagatgatttttaatggaaagagaggtttaaggagtgtagtttttttttatttatatttggtagggatattttatattgttttttttttaagtagagtttttaatttatagtttttaggatttaattatttttgttttgtttgttaagatggtaggtaatttttagggtgattattttaatgtgaatataagttaaagttatcgttgtttttttcgttttggttggttttagcgttgtgagaatgattgcgggagaatttttgtttatattttgtttgaaaaatatattttttttttaataggtagaaatggttttaagttatttgtatgttgtaatgaattagttaattgtatttaatagaatggtaagagtaagagggaaaattcgaaggtaaattagtttagtattagttttaaattatggtttagttgttgtaaggtagtgtgtatgttttatcgtgaaacgtaggttgtataatttaattaatttgataatggagtaaaagttttatatggtattattttagtggtttgaggaattgttaaaataagaaggt

SEQ ID NO: 1577 - DNA, 2435 bp, Artificial Sequence
  chemically treated genomic DNA (Homo sapiens)
gtttttttattttagtaattttttaaattattggggtaatattatataaggtttttgttttattgttagattaattgggttgtataatttgcgttttacgatagagtatgtatattgttttatagtaattggattatgatttaaggttagtgttgaattaatttattttcgagtttttttttttgtttttgttattttgttaggtataattgattagtttattatagtatataagtagtttaaggttatttttatttgttaaaaaagaagtgtgttttttaaataaaatgtgggtaggaattttttcgtaattatttttataacgttgaaattagttaaagcgagaggggtagcgatggttttaatttatgtttatattggggtggttattttaagaattatttgttattttagtaagtaggatagaaatagttaagttttaaaggttatgaattaaaaattttgtttgagagaaaagtaatgtaagatgtttttgttaggtgtggatggagaaaaattgtattttttaagtttttttttttattgaaggttatttgtttggtgttattttagaaattggtttgattttgtagaggatattgaatgataatatttcgtaagttagttgattgttgtgttagagttgttgttttttgtattatcgtaattgttagttttagtttttgtagttttttagtcgtaatgtagtaaagtagaagtagataattaggtataaagtaatagagttttaaagttttttttttttgttattatttagtatgttttatatgaggagtatttatttttgtttagttaggagtagagatgtattttgaatgtatacgatggtttttaatttggtagcgtgaatttttagttgagtaggtattgttcggagatttgtaattaaatcgtttttgatggagtacggttggttttttattatgtgtgtgaatagtttgggggttttttatgttacgttgttttatttgtaggaataaaggttaggataaaggagaggatgtttgttatggtttgtttggttggggtttgtgcgagcgatttatcgtattgatgttgtgtgattttttagtttatatttaaggttggttacggggttggcgtagatttttattttttagttagcgtacggtttaaaggagaaattagattttttgatttaaattatttttagttttttttggatgcgggatagttgtcgattagtagtgatataattagttattaagtggagaatcgttgcgattgtagtttgtgtgtaggtggagttcgggagaatgatagtttaatttcggttatttaacggtttttttttatttttttaaataatcgtgttcgttaagtatatagttgtttggattagtttgtttgttatgtagtttttattaattttggttggaaattagggtgttaggtaagtcgtttttagttttggtttttttttgcgtgatgttatgtagttaggatgggttatgttgataataaagaaggaagtagaaagtattattttttttttttttgtgatgttagcggaatataattttttttcgtagtgatgtttttgtgtgtggtgtatgtgtgtgtgtgtgtgtgtgtgttttaatttatttaatcgaagagtttaataaatattattatggatgtgatttttaataatttggaaaaaataaaaaaagatagtttgtggagatagcgattcgaaatagcggtatatttaggttattgttaatttgaaatatttggtttgtgaagttgagttttaagggataagttcggtaattgaggaagagatcgtagataaagaaataaaaatgataagcgtaatggaggttttgcgaagggattgttagagtattagtttatggatggtaattttattaggttgagattgaataatttatagattgaaattattttgtttttatttttttatttaagtcggtatgatttgaattttttataaatttttaagataaagtaaaatgttaatttgaatttgaagagtttttaaaattagatgttgtatttttgaatttttcggtattttttataattattttatgagaatagtattttattacgaagtattattattagggaaaattacggtgattataatagtaataatagaatattattaaatgatttttaatttatttaatttgttaagattgattgtacggttttgatatttattgtatgttattatgttcggtattcgtgaagttatttcgtattggaataaaagtggtatcgtgtgtgtgtgtgtgtatgtgtgtatgtgtacgtatattttgttattttaattgtgaatgtttagtaaagaatatttttttaggttataatattttttttttttggtttatattttcgtttttttttaatgtttttattttaaatgtgtttggggaaat

SEQ ID NO: 1578 - DNA, 2423 bp, Artificial Sequence
  chemically treated genomic DNA (Homo sapiens)
gtatttgttattatttatttataatagtaaagatatggaattaatttaaatgtttattaataatagattagataaaatatggtatatatgtattatggaatattatgtagttataaaaaaaaataagattatgttttttgtagggatatggatggagttagagggtattatttttagtaaattaatgaaggaatagaaaattaaatattatatgtttttatttataagtggaggataaatgatgagagtatttggatatatagaggggaataatatatattggggtttattagagggtggagggtggaaggagggaggggattaggaaaaataattattgggtattaggtttaatatttgggtgatgaaataatttgtagaataaatttttatgatataagtttatttatataatatatttgtatatgtatttttgaatttaaaataaaagttaaaaaaaatagaaaaaaaagaggaatgtttgtaatttttgtaaatatattattttttaaaagttatttatttttttaaagtattgtatttagaatgttagattattgtttagaaagttggtaatattagtattcgttatttttttatttatcgtgtaagagatttttatattagacggagtttaggttgggaattattattttttttaatttttgttaatttgataagtgtggaatgtgttttttcgtatttatatttttttgattattggtgagagagaatattgtattttattatagatgttatttgattttttgttttatgtttatttttttttgttggtttggtagtttttttttattgatatataagtatttgaaattatttttaaggatttgtattaatttgttgtttttcgtatatattgtgattatttttttttttcgagttagtttttttttaattttttttgagagattttagatggtcggtttattttttgatttatttttaagtttaaataatattagaaataatatttgaaatgtttagattaatttttttgtagtgattttattgggaggttgtattagtatttagatatttttatatattgaggaaaaatagatagtcgtgtttaaggattttagagggtttgttattatttatttataatttttttagaatttatgagttttaggtttttattgtagtggtaagcgttgagtgtttacgggggtgtgtgtgggataggatgtggtttgagttttgtgatttttatttcgattttatgcgtcgggaatttttgtagttttgtgattggtttgtgggggtttgggttaagtttttgttaagatattaaaagattgtagaggtgggtaaagattttaggtttttagattagtaatttataaatattagttatgattatatagttaagggtcgtttatttgttttttttttttttagtttgttttgtgtaaataagttttaagtaggagaagatgaaggtgagtgagttttagagagggtatggtagttatttttttgttttatttttagattttgttttttatttttttttgtaagattttaatttttgttttttttttttttgttagtttttttaaattttgtttttttttttttttgaattttttttatttttatggatgggtattttttgcgttgaatatgattagggaagaaagggtttttatatgattagggaagaaagggtttttatattttttttaggtggaggttttttggagatttttttggttatattagtttttgttttagagttgggtttgaggttgggatagcgatgggttttagagtaggtggggattggggtttggaggagaagttgagtggatttgttttagatatagtttagtaataattttttgaagaggaggaaaaaacgaatgtggaagttttaaggatggataaaattagagagttattagagaaatataaaatatgaaaaaaaaaattagagttttaaaataattggatttggagttaggtattttggattttggttttagttttatgtttaatttatggttcgttattttattgataagatatatgtgtttggtagtagaaggggtagtttaggaaaggataataatgaatgcgataatttggaggtagaaaataattatgaagttaggtaaaggtaaatttttatttatataatgggttattatttttgattttggataaattaatttttgttattttattgtaaatttatgggtaatagtaattattttatgggtgggtgaataataattattatgtatataatatattttataaaatgtagttttaataatatttttttatttttcgtttttaaaattaattagataatattttgggtgaatttttattttgagaattgatatggtttttatgttatttgtggtgtttaattgagtgtggagattttgggt

SEQ ID NO: 1579 - DNA, 2423 bp, Artificial Sequence
  chemically treated genomic DNA (Homo sapiens)
gtttagagtttttatatttaattaagtattataggtaatataaaaattatattaatttttaaaatagaagtttatttaggatgttatttagttaattttagaggcgagggatggggagatgttattagaattgtattttgtagaatgtattatatgtataataattgttatttatttatttataaggtagttattgttatttataaatttataatgagataatagaggttaatttgtttaaagttaaaagtggtaatttattatgtaaatgaaagtttgtttttatttaattttatgattattttttgtttttaagttatcgtatttattattatttttttttaaattgttttttttgttgttagatatatgtgttttattaataaggtaacgagttatgaattgggtatagaattgaggttagaatttaagatgtttgattttaaatttagttgttttagggttttgatttttttttttatgttttatgtttttttgataattttttgattttatttatttttaaaatttttatattcgttttttttttttttttaaggggttgttgttgagttgtgtttgagataagtttatttagttttttttttaaattttagtttttatttattttaaagtttatcgttgttttagttttagatttagttttgaagtagagattgatgtggttagagaggtttttaggggatttttatttgaagaaggtatggagatttttttttttttagttatatggagatttttttttttttagttatatttaacgtaaggaatatttatttataggaatgaagaagatttaaggagaaaaaaaagtaaggtttaggggaattggtaaagaagaagaaagtaggagttggagttttataagaaggagtggagggtagggtttagaagtaggatagaagagtaattattatgttttttttgaagtttatttatttttatttttttttgtttgggatttgtttgtataaagtaggttaggagaaggggaagtagatggacgatttttaattgtgtagttatgattagtgtttgtagattgttagtttgggggtttgaggtttttgtttatttttgtagttttttggtattttggtagggatttagtttaagtttttataggttagttatagggttgtaaggattttcgacgtatgaggtcggggtgaggattatagaatttaaattatattttgttttatatatattttcgtgagtatttagcgtttattattgtaatgaggatttgggatttataagttttgggaaaattataaatgggtgatagtaagttttttgaggtttttaaatacggttgtttgtttttttttaatgtatggaagtgtttagatgttgatgtaattttttagtaaagttattgtaaaagggttggtttagatattttaaatgttatttttaatattatttgagtttaaaaataaattaaagaatgggtcggttatttaggattttttaaaaagagttaggaggaaattggttcgaggaggggaaatagttataatgtatgcgaaggatagtaaattaatataaatttttagaaatgattttaagtgtttatatattagtaagaaaaaattattagattaatagaaaaaaatgggtatgaggtagaaaattaaatggtatttgtggtaggatatagtgtttttttttattaataattaaagaagtataaatacgaaaagatatattttatatttattagattggtaaaagttaaaaggaatggtgatttttagtttgggtttcgtttggtataggagttttttatacgatgggtgggggaatggcgaatattaatgttgttaattttttggataataatttgatattttgaatgtagtgttttaaaaaagtaaataatttttaaaaaataatatatttataaaaattgtaagtattttttttttttttttattttttttaatttttattttaagtttaggggtatatgtgtaggtgtgttatataggtaaatttgtgttataggggtttgttttataaattattttattatttaggtattaagtttagtgtttagtagttattttttttgattttttttttttttttattttttattttttaataggttttagtgtgtgttgtttttttttatgtgtttaggtgtttttattatttattttttatttataagtgagaatatgtggtatttggttttttgtttttttattagtttgttaaggataatgttttttagttttatttatgtttttgtaaaggatatgattttgtttttttttatgattgtatagtattttatggtgtatatgtattatattttatttagtttattattggtgggtatttaggttgattttatgtttttgttattgtgaatagatagtggtaagtat

SEQ ID NO: 1580 - DNA, 2464 bp, Artificial Sequence
  chemically treated genomic DNA (Homo sapiens)
tattgttttttattatttttagatgaggttattaagttgtaggaaaataagtttagggtttttattgattttatattatgatgatttgtataattgttttattatatattataatgtaataataatagaaataaagtgtatgataagtgtaatgtatttaaattattttgaagttatttttttttattggtttatggaaaaattattttttatgaaattggtttttggtgttaaaaagatttggaatagttgttttaatttttttattatttttatttattttttgtatgttgttttgggttaagggttgtggaaatgtttatggggtttttgttttattattttaaattatgtgtaaattttaagaaatttgtgagataaagtatttggttagtgggaaaaaaaaaattgataacgtttttaatattaattggagtgatagtttggtaattggttttttgagaaagttttagtatattttgaaaattggtaggtagttttagagtgagttaattagttaggaatgatttttaatatttattatttttaatagtttatttttggagaaaagatagataatgaatattgggaaatttatggtgttgtaatttgatttttgtgttatttgggggaaatgaggaagatgagttataatttattatttaaagttttttttttataatgtgttgttgtgaaagatttgataaataatgattgtttttttagggattaatttaattaaagaagtagaaaataggaagaatagaaaatttgtgtgattaagtaatgtttaattttatttgaaattggttttattattttggtgataggaatagaaggttttatggagtttttttatagtaagaaattaggtttgtaatagggtgtaatagagtgatattttatatttgatgttttgtaaatgtagagtttgtaaatgttttttttttgatgtttttttaaggtaagttataaatgaagttttattgttttaaaaaagtagtttgttaatagttgtttaggttttttatgggattgcgttttattgagtatttgaagaaagtatttattggaaatgggtttttttgggagattgtttggatttcgagtgtttggcgtttatgtttttatatttggttgttgttttttgtttttttttggttgtaggtgtgagtgtttgtttgtttaaatttcgtttagtattgtttggaaaaataaaataatatggttatttgtttgggtattgaatgttttttttgaattttggttttgtttattggtttagaggcggaatgggtggggtaagtttcggtgtgagtttgggaagtttcgagaagacgttatgggttgggtttgttaggttggggttgtttttggttttaatttttttggaatgttttgagggttaggagcgttgttattgatggttatgggagttgttaggttgtggtttttttttttatagagaatgttagaggtattcgggaaggtatttgttagggttttgatagatgtaaagtaagttttatttatgttgtgtttttatttggatatttggaaggtgtttagtatagaaaagttacgagttagatgagatattagtttgatgtcgattttttttttaataatggttgtttgttttcgttttgatgtttgttagtaggtaaagggggtgtgtttttgggatttgggtagtagtagtttttgggaaatttagggtttgttatttgtggttatttgatttttggtaaattatttaatttttttattttatattttaaggatagtaaatttatgtagtagttaggttgttagaagaaatgatgttgataattaaatgtgaagttttgatatggttttttttcggtattatagttatttgttttttaaagaattggtataatgttgggggtagaaaaattatattatgtagtgatgttgtttagttaggtatataggtagagaagagttgtttttatttttagttttttaggtttgtttagggttgtttagtgtggttgattttgttttgtttattgttatgtaatttggaatttataatattattgtatgatgtgtagatttggaatttattgtagtattttttttttgaaggttgtattgtgtagtagtttttaaatttgagtatgtattagaattttttggtggtagtgttaaagtagattgttggattttatttttagagtttgattttataggtttggggtggggtttaagaatttgtatttttaatatgttttgaggtgttgttgttgttattggtttagggaatatatttagagaattattgttttagtgtgttggaaggagtaggagttttggagttaagtagatttaaatttagttatggtatttatttaatgttgtgattttgagaggttttttttaatttttttaagttttagtgaattcgtttgtaaaatgggaataatatttattttaa

SEQ ID NO: 1581 - DNA, 2464 bp, Artificial Sequence
  chemically treated genomic DNA (Homo sapiens)
ttgaagtaagtattatttttattttatagacgagtttattaagatttggggaaattaagaaaaattttttaaggttataatattaagtaagtgttatagttggatttaaatttgtttaattttaaagtttttgttttttttagtatattagagtagtggttttttaagtatgttttttgaattagtagtagtagtagtattttagaatatgttagaggtgtaaatttttaggttttattttagatttatggaattagattttgagagtggggtttagtaatttgttttaatattgttattagggggttttgatgtatgtttaagtttggaaattattgtataatatagtttttaagaaaaagatattatagtaggttttaggtttatatattatgtagtgatgttgtaggttttaggttatatgatagtgagtaagatagggttagttatattgagtagttttggataaatttaaggagttaaggatagagatagtttttttttatttgtatgtttgattgagtaatattattgtatgatgtggtttttttgtttttaatattgtattagttttttaaagagtaagtagttatgatatcggaaaagaattatattagagttttatatttggttgttaatattattttttttaataatttaattgttatatggatttgttgtttttgagatgtggaatgaaaaggttaggtaatttattaagggttaagtgattataggtgataaattttgggttttttaaggattgttgttatttaggttttaggggtatattttttttatttgttggtaggtattaagacgaagataggtagttattgttggggagggagtcgatattaagttggtattttatttagttcgtgatttttttatattgagtattttttaggtgtttaggtgagaatataatatggataaggtttattttatatttgttagagttttggtaaatgttttttcgagtgtttttggtattttttgtgagaaagagagttatagtttgataatttttatagttattaatggtaacgtttttgatttttaagatattttaaaaggattaaaattaagagtaattttaatttaatagatttagtttatagcgttttttcgaaattttttaaatttatatcgaaatttgttttatttatttcgtttttgggttaatgggtaggattaaaatttaggaagaatatttaatgtttagataagtaattatgttgttttgtttttttaagtagtgttgagcgaggtttaaataaataagtatttatatttgtagttaaggaagggtaagaagtagtagttaggtgtgggaatatgaacgttagatattcgggatttagatagttttttaggagagtttatttttagtgaatattttttttaggtgtttagtgaagcgtagttttatggggagtttgggtaattgttggtaagttatttttttaaagtagtaagattttatttatgatttattttgagaaagtattaaaagagaggtatttgtagattttgtatttatagggtattaggtgtggggtgttattttattatattttgttataagtttggttttttgttatgggaagattttataggattttttgtttttattattagggtggtggagttagttttaaataaaattaaatattgtttagttatataagttttttattttttttgttttttgtttttttgattaaattagtttttaaaggagtaattattatttgttaaattttttataataatatattataaaaggaggattttaaataataaattatgatttattttttttattttttttaaatggtataaaggttaagttgtagtattatagattttttagtgtttattatttgttttttttttaagggtaggttattaaaggtagtgagtattaaaagttatttttaattaattagtttattttggagttatttgttaatttttagaatatgttgaagtttttttagagagttaattattaaattgttattttagttaatgttaaaaacgttattaatttttttttttttattagttaaatattttattttataagttttttaggatttgtatatagtttgagatggtagaataaagattttatgaatatttttatagtttttagtttaggataatatataagaagtgagtgaaggtggtgggagggttagagtagttgttttaaatttttttggtattagggattagttttatggaaaatgatttttttatggattagtgagggagggtggttttaggatgatttaagtgtattatatttattatgtattttatttttattgttattatattataatatgtaataaaataattatataagttattataatgtagaattagtgggaattttgagtttgtttttttgtaatttgatggttttatttgggggtgatgggagatagtg

SEQ ID NO: 1582 - DNA, 2499 bp, Artificial Sequence
  chemically treated genomic DNA (Homo sapiens)
atgattttatattttgtttttttaggaaaaagaatgtttaaaaaattaaaatacgaagaaatttgggtataaattattgaaggttttagagtttgttgtatttatttaaatattattgtttttatatatgtataattattttttttgagtttaaaaaatgggtggaaaatttaatttttttattttaatttgagattttttttataaaagtttattgaagaaattttttttatttttgggtagtaattaaggaatattttagttaagtttttaaagagtgggtttatttttttaattgtattttaatttatatttatttttggttaaaataaaagtataaataagatttttttaatttaattataagttagatttgtagtaaattttttcgttttagattatttttttttttatagtttttagataaattgattttgatttagttagtaatttaatgaaatttattagttgattgtaagaagttcgtttatatatattagttatttttttagtaaatatttatggaaaataaaagtaatgttttttttataaataaattttattttttttttgtaatttaaggcgggttgttagatcggttgtataatagatattggggagtttattggtcgggagttttaagaggagagtagttattttagttttttttatttaattttggttttacgttagaagttgtgtagtagtgtagtagaatagggtttggtaaaatttttgttagtaaagcgttttttgtgtcgggttgtggttcgttatcgatatttcgttcgttattaaggttgggttttttattgatttttttttttttttgtttttataggttcgcgcggtcggatattgtgggtgtgcgtgttggatttttttcggatgtttttcgattaatatggatgttttattattttttgtagtggaaggttgttttttggcgtagtgagtgaagaatatgtagcgattgttaatgggtttgggaagcggagatttttttttttttttatgattatgtcgtgatcgtgtttgcggttattattcgacgtatttttatttttattcgaatttaggagtcgaacgttagatcggggaagtgggtgtcgtgcgtgtgggtatagaaatattatgaagattattttttcgattttaagtaatttagtttttaggcgtatcgttaaatttttgttttgtttattgtggattggatatttttaaggaattatatatgtattaagatttggtaagattttttattttttttggttgtttggtattcgtttttaggtagtcggatgtaaataggcggttcgttttgtttggcggtgggtttcgtggattttgatttgtttattgttttgtcgttttttggggtttttaaagaattttttgtgtttttatttttttttttttttatttttatttttagtcgcgggagggtgaagggagggttaatgtgtggtagtggtttttgtattatttttttatagtagtttgttacggagatgatgatgacgatggaggtacggttagtcgttattttcgtttgtttttttcggcgttttgcgagtttggaggggtgcgcggttcgcgtaaaagtgcgcgtcggggttgtacgttttttagtttgcggggttggtgagttaatatttggtaattttttggcgagttgcgtttgttcgttttcgttagtgattagggtagtttttacgtgtaaatgaaaggtattaatttttttgatttttttttttagagagttttttcgattgtttttatcgtttttttagtttttggtgtttttattgggatgtagagttttaaaaaatgttttaagattcgaggttttatttaatatagggaggttgttatttagttggaacgaaatagcgttaaaattagaacggtattttgtttgtttttaatttgttgagttttttttttatagttttttggacgttatggattaattaatgaaggatagtatttggggcggtggggaagagtagttgtttaaggagggttgattaagtttgtattttttattttggtaagacgaaagacgttaggtagttatatttttttatggaaatgtattgtttttttaagaattagggtttttttggagtttgaaggaaaatttaaacgtgggattttagtggaaattttggttagagggttagagtgattgtttggagaaaatgaagcgtgggcgatgtttaggttttttggatggttaaaggagttttagtaggagtagaattagttagggaaagttttttaaagtagataagaggaagaaaggagaaagttaataggataaatgtttttattgtaggtattttttttgatagtttaagtggatttagattaaagagtgtaggatattatgtaattttgagtatttgtttttgagataaaagtagatatattaagttattcggttaaatttaaattgaagagtgattgtttgtattttttattatgttaatagta

SEQ ID NO: 1583 - DNA, 2499 bp, Artificial Sequence
  chemically treated genomic DNA (Homo sapiens)
tgttgttggtatgatagaagatgtaggtaattattttttagtttaaatttgatcgagtgatttaatgtgtttgtttttattttaaagatagatgtttaggattatatggtgttttgtattttttggtttgaatttatttgaattgttagaggaagtgtttataatgggagtatttattttgttggttttttttttttttttttttatttgttttagggaattttttttgattagttttgtttttattaaaatttttttggttatttagagaatttgagtatcgtttacgttttattttttttaagtaattattttgattttttgattagggtttttattggaattttacgtttagatttttttttaagttttaaagaaattttgatttttagaaaagtaatatatttttataaaaaaatgtaattatttaacgtttttcgttttgttaaagtgaaagatgtagatttagttaattttttttaaataattatttttttttatcgttttagatattattttttattaattagtttataacgtttagaaagttgtgagagggggatttagtaagttaaaaataaataaaatgtcgttttaattttgacgttatttcgttttagttaagtagtagtttttttgtgttaagtagaatttcgaattttagaatattttttaaagttttgtattttagtaagggtattagggattggaaaagcggtgaaaataatcgaaaaggttttttggaaaaagaaattaaaagggttagtattttttatttgtacgtgagaattgttttggttattggcggaagcggataggcgtaattcgttaaagagttattaggtgttaatttattagtttcgtaagttgagaggcgtgtagtttcggcgcgtatttttgcgcggatcgcgtatttttttaagttcgtagggcgtcgggggagataggcgggagtggcggttgatcgtgtttttatcgttattattattttcgtggtaagttattgtggggaggtaatgtagagattattattatatattggttttttttttattttttcgcggttaaaaataaaaataaagaagagaagaaatgaaagtataaggagttttttaaaagttttaggagacgatagagtagtgagtagattagaatttacggagtttatcgttaggtagagcgaatcgtttgtttatattcggttgtttgggagcggatattaggtaattaagagagatggggaattttattaaattttaatatatgtgtggttttttgagaatatttaatttatagtaaatagagtaggagtttaacggtgcgtttgaagattggattatttagaatcgggaaaataatttttatggtgtttttgtgtttatacgtacggtatttattttttcgatttagcgttcggtttttgggttcgggtagaaatgaggatgcgtcgagtggtgatcgtagatacgattacggtatggttatagagagaggaaggagttttcgttttttaaatttattagtaatcgttgtatgttttttatttattgcgttaaggaataattttttattgtaaggaatggtgggatatttatgttagtcggagagtattcgggagaaatttagtacgtatatttataatgttcggtcgcgcgagtttgtgaaagtagaggaggagggaaattagtaggaaatttagttttggtaacggacgagatgtcgatagcgagttatagttcggtataaaaggcgttttgttagtaaaggttttgttaggttttattttattgtattgttgtatagtttttgacgtgaagttaagattaagtgagaaagattgagatagttgttttttttttaaggttttcggttagtgagttttttaatatttattatgtaatcgatttgatagttcgttttgagttgtaagaaagaagtaggatttatttatggggagaatattgtttttattttttatgagtatttgttgagagaatgattggtgtatgtaagcggattttttataattaattgatgaattttattaaattattagttaaattaaagttagtttgtttgggaattgtaaaaaagaaagtgatttaagacggaggaatttattgtaaatttaatttgtggttagattgaaagagttttatttatatttttattttgattaggaatgaatatagattggaatgtaattggagaggtaaatttattttttaaaaatttgattggggtattttttgattgttatttagaagtaggagaaatttttttagtgaatttttatgggagaaattttaaattaaaatggagaagttaaattttttatttattttttaagtttaaagaaaataattgtgtatatataaaaataatgatgtttgaatgggtgtagtaaattttaaagtttttaataatttatgtttaaattttttcgtattttggttttttgaatatttttttttttaaagaggtagaatatgagattat

SEQ ID NO: 1584 - DNA, 2422 bp, Artificial Sequence
  chemically treated genomic DNA (Homo sapiens)
tatggtgtttttgaatttattattttgaaggataggtttattgtttatttagtgttttatttttggagtttttaaattttttattatgatgtagaataaattttggagtaattttgtttgataatagaggattgattgtaatcgtttgaaaggatagagttttataatatattttttgaaatgtttttttatgaaggaaaagttgatagggaatttgagttaaagtagataaaatagaataaaataaaattaaaattaaaaaataggtgttaaaaggatgttttaaataggttgaagtattaaattattatagagagtagttttagtttattttgaaattcgtttttatttttttattattttttatatattttgttttgttgtaaaatatagggagaattatttattattaagttgtttaattaattttttttaaggtatgtaatattttttaaagaaatttgaaagtatttgttttattgaaaaaaatgagatttattttttatattataattttgtttttagtgaaaaagttaggataatgaagaataaaatttatttttgtgaaggaaaatatttttattttatggtatttttaaatattattttgttaattttttatggaataaagttgataatattttttgaatatatatttgtatgtttttatagttttaatttgttatatttttgttttttttttttaagtaatattttgaaaaatttataaagtaatataaatatatttatagtattaggttgtaaattggaatttggaagcgttagatttgttgattttatttgttatttgattattatatttgttttttttaattgatttattaggtttgtattttagagtatattttattttgttgtaatagttattaatgaattttttgatcgtggatttttgttatatatatttgtattggtttagggagtttaatttgttggaatattttgttgaagagtttgtttttatatttagggatatttattattatttaaggttagttgtttgatttttttttagtgttttgtttatagggtttgaatatttataaatggaaatattagttaattagaaattatcgttagggttttttgatagtgttttaggtttttataatttggaatgttttgtaatatttaatatgtaagtacgtcgaattattttttagatagaatttgaatttttgtgttttttagttttttttttttttttatttttttttaatatggaatttgaaaagcgtgaaaaaagaagtttattaaataagaatttagaggagaaattgacggtaagatatgagatttagtatatatagatttataatgaaattgatagggtagtagagtaattgttatagattggaaaagttgtgttagtcggtttttgtttttatgttttgttggttaataattttaaaattaatgagttttatgggtttttttgaaaataatgtaataaagttatatataaaatgttattatataaatgagggtaaatttgatttagttaaatgatgtggtttatcgttattttaaaaattggaatttatttattttgattttttattgtgattgttttagtattggaagattgttttatttacgtatgcgaagtttagcgagtgtttaaatttatttttttttagagatattaggaatatatgttaagaaaaataagtattatagaatatattaatgttttattaagtttaatgaatttttggtataaggataaagttttttgttatagaagttatataagtaattttgttttgatattaagtaattaaatgttaatgattaatatggtgatttatatttgtttaaatataaaatagattataattttgagttaaatgtgttgtttatggtttatttgatgagtataggttattaattatgtttgtaaatttattgtggttatagagttaatattggaataggttataattaatgttaatattagtataaataataaaaagtaagataatatagtttataataagattaaatttatgggaatatattgttttagatgtatgaagttgaggtttatggattatttaagatattaaaattagaaaaatggaaaaaagaattatattgggttgaaaatttttgaagtgtattagaattttaaggttttaaagtaatatatttaataaaatatataatttttttttaaaggaattaggttattatttttagtatttattttgtatttttgttttaggtgattgtttagatatgtaatggttatagagtatttttttttttgattatttggaaaggttatgtgtttttgtagagttaattagggattttgaattagaaagggtttggtgaaaatttttgtttataattattaaatataagattatggttttgtttaatttttttgagtttt

SEQ ID NO: 1585 - DNA, 2422 bp, Artificial Sequence
  chemically treated genomic DNA (Homo sapiens)
gagatttagaaagattaaataaaattatggttttatatttggtagttgtgggtaagaatttttattaagttttttttgatttaaaatttttggttagttttataaggatatatggtttttttaaatagttagaaaggaaaatattttgtggttattatatgtttggataattatttagggtagaggtataaagtgggtattgaaaatgatgatttgatttttttaagaaaaggttgtgtattttattaaatatattattttaagattttgaaattttaatatattttaagagtttttaatttagtatggtttttttttttatttttttagttttaatattttgaatagtttataaattttaattttatatatttagaataatgtatttttatgaatttggttttattatgggttatattattttattttttgttatttatgttgatattaatattagttatgatttgttttaatgttaattttataattatagtaaatttataaatataattagtgatttatgtttattagatgagttatggatagtatatttaatttaaggttatagtttattttgtatttgagtaaatgtaagttattatattaattattgatatttaattgtttagtattaaggtaaaattatttgtataatttttatggtaaaaaattttatttttatattagaagtttattaaatttaataaaatattaatatattttataatatttattttttttggtatatatttttggtatttttgagaaaaaatggatttgaatattcgttaagtttcgtatacgtaaataaaataattttttagtgttgaggtaattataatgagaggttaaaataaatggattttagtttttaaaatgacgataaattatattatttaattaaattaaatttgtttttatttgtgtaatggtattttatatataattttattatattatttttaggaaagtttatggaatttattaattttaaagttattgattagtaaaatatggaaatagaggtcggttagtataatttttttagtttatgatagttgttttattattttgttaattttattataaatttgtgtgtgttaaattttatgttttatcgttagttttttttttaaatttttgtttaataagtttttttttttacgttttttaagttttatattgaaagagaatgagaaagagagaaagattgagagatatagaggtttagattttgtttagaaaatgattcgacgtgtttatatgttagatattgtaggatattttaagttgtgagagtttaggatattattagagagttttagcgataatttttggttagttagtgtttttatttatagatgtttaaattttataaatagagtattgaagagaagttaggtagttggttttagataatgataaatgtttttagatataaaagtaaattttttagtagaatgttttaataggttaggttttttgaattaatatagatgtatgtgataaaaatttacgattaaagaatttattaatagttgttgtaatagaataaaatatattttagaatatagatttaataaattagttaaaaagaataaatgtgatagttagatagtaaataaaattagtagatttagcgtttttaaattttaatttgtaatttagtattgtagatatgtttgtattattttgtagattttttaaaatgttgtttaaagaggaagagtaaaagtataataaattaaaattataaagatatgtaaatatatatttaaggggtgttgttaattttattttatggagagttgataaaatgatgtttaaaaatattatgaaataaaagtgtttttttttataaaaatggattttgttttttattattttggtttttttattgggagtaaagttatgatatagaagataaattttattttttttagtggaataagtatttttagatttttttagaaaatgttatatgttttaaagaaaattaattgggtaatttaatggtaaatagttttttttgtgttttgtagtaaaataaaatatgtggaaggtaatagaagaatagaaacggattttagagtaaattaagattgttttttatggtgatttaatattttagtttgtttaaaatatttttttaatatttgttttttggttttggttttgttttgttttgttttgtttattttaatttaaattttttattagttttttttttataagaaaatattttagaaaatgtgttgtggagttttgtttttttaaacgattgtagttaattttttgttgttaggtagggttgttttagaatttattttgtattatgatggaaggtttgaagattttagaagtgaaatattgagtaggtaataaatttattttttaggatgataaatttagaaatattata

SEQ ID NO: 1586 - DNA, 2662 bp, Artificial Sequence
  chemically treated genomic DNA (Homo sapiens)
tatagtatatttatttgaaaaataatggttatatatagtaatatttttgtttatagaaattttaaatttttttttattatgggttttatagttatttattattttttatttttttttatagttattaaatatttttagttttttagtattttttttgtaaaattgagaggagggaatttgttatatttatttttgtagtaggatgttgatttgtaaacgaagtgttgatgtattgttgatgttatttatttaataaaggtataatagatattagtagggtagataggtattttaagaaaatggtttgatataagagttgaaagaatttgtttagaattttagaattattaaagggttttatgtttattttattttgttagggagaggatatttttttttgtttagagtatgttttaattatttagagttaaaatggttgttttagtttagtaaatgggaaataaatttgagttttattgaaatgggttaagggttttaattttcgtttagtgtgttggttatattgggaaggaatatttgtttagttataatagttaagagtatcggtatgataaatttgggtaggttttagagtgtttgtttatagttagtaaggaggatttaaaaaagatgtagaaagttgtgtaaataattgtaattgtattgatatttttatttatatgtttagaagagatatatttgaagaaaattttttttaaaatagttttttagttgagattatatttttttagtgtgtagtttataggaagttttagttgttaagagtatgttcgatatgagtagatttttatttaatttttatgtataatgaatttaatttttattttttttagaaagatattgaaaatatgtgtcgtgattttaatgttataattatgtagttttattttttataatacggtataattattaacgaagtttaaattttatgtttggtatttaaggtgaatatttttatagaaagtaggaaatatttagatgtttgtttgtcgtggtggtggtgtttttatatattttttgtgattttaaagatataataatgtttgatatttttgttagttagtaatgtggatttaagatattttaattatattgttgattttaattttttaatagatttttacgtagtttttgagttttattgtaggttttagtgttagtttcggaggaaattagaaaagggttgaaattattgatatagttatttttttagttttttttaacgtaggtgtatagttttttgtagtgagtagatcggggtttatagggatattgtatgtttgtattgggttgttattagttttatggaaatatgtattaattgtgttattgtgtttttttgttatattgttttttttttaggtcgttttggtatcgtttatttaaattgtgtaattatttggtttaggtgtcgtagagattgattagtagtataaggttattataagtataatcgttattcggttattttagttattttttttagtattttagatattatggcgttcgagggtgggtttaacgggtttcgagtgttcgggagataatgtatatttcgtagtggattttttcggggtttcgagcgttgttcgtttattaggtggcgtcggttttttcgaataggtcgtttaataattttcgtttagtagtcgtttttattgcgcgcgcgtagatttcggcgtttattttcggtgtggtttaggcggggttcgtagaattagttatgtcggtttacggtatgtttatgtataagagcggggatttggtgtttgttaagttaaagggttatgtttattggtcggcgaggatagagtatatgatttagtttaatcgttattaggtgttttttttcgggatttacgagacggtttttttgagttttaaacgtttgttttcgtataaggagtgtaaggagaagttcggtaagtttaataagaggcgcggttttagcgcggggttgtgggaaatcgagaataattttacggtttaggttttcgattgtttattagttttagagaagggtagcggagacgggttttggtcggagttcgaggtcgtagagggcgacgaggataagtcgatttacgttggtggcggcggcgacgaattggggaagtcggacgacgataagtttattgaggaggagaaggggtcgttgaagaggagcgcgggggattcgtcggaggacgtttttaaacgatttaaggaggtagttttcgattaagaggaggaggcggaggcggagagggcggcggaagcggagagggcggcggcggcggcggcggcgacggtcgtcgacgaggagagttcgtttttcgtggcggtggagaacggtagcgtttttagcgagtcgggtttggtttgcgagtcgttttagttagaggaggaggagtttcgggaggaagaagtcgcggacgaggaggttttttaggagtggtatgtcgaggtatcgggcggcggagatcgcgatagtttgtagttattagcgtttttagaagagtttttgtttcgtttttgttgcggtttggtcgtttttggggaatttgattacggcgtgtaaattgggattgtttttttttttttttagttcgtttttttttaattcgcgtttttttgttttgtcgggttttaggatggtagg

SEQ ID NO: 1587 - DNA, 2662 bp, Artificial Sequence
  chemically treated genomic DNA (Homo sapiens)
tttgttattttggggttcggtagggtaaaggagcgcgggttggaggaggacgggttgaggagagggaaaggtagttttagtttgtacgtcgtggttagattttttaagaacggttaggtcgtagtaggaacggggtaggggtttttttggaaacgttggtaattataggttgtcgcgattttcgtcgttcggtgtttcggtatgttatttttgggaggttttttcgttcgcgatttttttttttcggagtttttttttttttggttgaggcggttcgtagattaggttcggttcgttaggggcgttgtcgttttttatcgttacgaggaacggatttttttcgtcgacggtcgtcgtcgtcgtcgtcgtcgtcgtttttttcgttttcgtcgtttttttcgttttcgttttttttttttggtcgggggttgtttttttgggtcgtttgggggcgtttttcggcgggtttttcgcgtttttttttagcggtttttttttttttttagtgggtttgtcgtcgttcggtttttttaattcgtcgtcgtcgttattagcgtgggtcggtttgttttcgtcgttttttgcggtttcgggtttcggttaaggttcgttttcgttgtttttttttgaggttaatgggtagtcggaggtttggatcgtggggttgttttcgattttttatagtttcgcgttgaagtcgcgttttttgttgggtttgtcgaatttttttttgtattttttgtacgggaataggcgtttgggatttaggaaggtcgtttcgtgggtttcgaagaaaaatatttggtagcggttgggttgggttatgtgttttattttcgtcggttagtgggtatagttttttaatttggtaaatattaggttttcgtttttgtatatgggtatgtcgtaggtcgatatagttggttttgcggatttcgtttgggttatatcggaagtagacgtcgaagtttgcgcgcgcgtagtaagggcggttgttgggcgggagttgttgagcgatttgttcgaggggatcggcgttatttaatgggcgggtaacgttcggggtttcgagaagatttattgcgaagtgtgtattatttttcgaatattcgaagttcgttggatttattttcggacgttatgatgtttagaatgttggaggaaatagttgggatggtcgggtggcggttgtgtttgtggtggttttgtgttattgattaatttttacggtatttgggttagatggttgtatagtttaaataaacggtgttagagcggtttagaaagggggtagtgtgataagaaaatatagtgatataattagtatatatttttatgaaattagtaatagtttagtgtaagtatgtagtgtttttgtaggtttcgatttgtttattataggaaattgtatatttgcgttaggaggagttaaagagatggttgtgttagtggttttaatttttttttgatttttttcgggattagtattggagtttgtagtgaggtttaagaattacgtgaaagtttattaaagggttagagttagtagtgtggttaggatgttttaagtttatattattggttaataaaaatgttaaatattattatatttttagggttataaaaagtatataggaatattattattacggtaaatagatatttaaatattttttattttttatggaaatgtttattttggatgttagatatgaagtttaaatttcgttggtgattgtatcgtattgtgaaagatgaggttatatggttgtaatattgagattacgatatatgtttttagtatttttttagaagagatgaaaattgggtttattatgtataagaattaggtagagatttatttatatcgaatatgtttttggtaattagaattttttgtgagttatatattaaaaaagtataattttagttgagaaattattttaaaaagaattttttttagatatgttttttttaaatatatgaatgaaagtgttagtgtaattgtagttgtttatataattttttgtattttttttggattttttttgttagttgtgagtaagtattttgaaatttatttaaatttattatatcggtatttttgattattataattagatagatgtttttttttagtgtaattaatatattagacgagaattagagtttttaatttattttagtaaaatttaaatttgttttttatttgttgggttggaatagttattttaattttgaatggttgagatatgttttaggtaaaaggagatattttttttttaataaggtgaaatgaatatgaagttttttgataattttaaaattttaaataagtttttttagtttttatgttaagttatttttttagaatgtttatttgttttgttaatatttattatatttttattaaataagtaatattaataatgtattaatatttcgtttataaattaatattttgttataaagatgaatatgataagttttttttttttagttttatagggaaagtgttagaaaattagaaatgtttagtggttgtagaagaaaataggaaataataggtagttatggagtttataataggaaggaatttggaatttttgtaagtagagatattgttatatgtggttattattttttaggtaagtatgttgta

SEQ ID NO: 1588 - DNA, 5352 bp, Artificial Sequence
  chemically treated genomic DNA (Homo sapiens)
aatataagaagttttgagttttttgaagtcgggtattaaagttaaagatttatttttcgtattttttatggtttttttttgtagtttagttcggttttgagttttcgaaacgtttttcgaggcgggggtttttttgttaaggggcgataggtgggttatttcgaggcgggaacgattaggtaggtgttggttggtttttttttgggtgagtagttaggggaatcgtttttttaggggatttagatgatattaaattattttattatataaatttttcgtggaggtttgtttttaggagggtaattatcggattaatttaattatgtagataggtaatatggattattttgtttttaaaataatcgaaaattaaacgtttttttcgtttattgtagaaatttttttattaaggacggggttgaattggagggattgtgttgataaattttttatttgaaaattttttagttaaggagtatttgtttaaggtcgcggttatttagatgttcggtttttattttttttttcgttgaaaagtcgtatcgatgattaacgttgtttgtcggtttggtggtttgaaaacgaatgtcgggtattgatgtaaggatatttttttttatttttgggattttggtttaagtaaaggaggtcgaatggagaattaagataattatttaagtaatttaaaaagtttaaagatatttttaagcggattttgttttagtggtttgtgatggtagtttagtggatagttttttagtggttttttggggttaattgttttaattttttattttgtttgttttagtaaagggaaagatgttaaagtagttgtggatttgtagttttttttttgtgtgtgtagagtttttaggaattattgttttagtgtagtaggagaagcgtttttttttatgttttaagtttgttttttttgttgttttttagtttttgggttaggtggagttttttttgaagttggtttttatttgttttcgtttttttattgtagtttatagttcggtttttagggttgaatttagagtttagaggatggagaagttagaaagcggggaggtaagggagagggcgtttaggtatattatagaggtgattgggttgtgacggggataattcgtataatacgagttaagtttatatttttagggagtgattttttcggattgtttttattttaatttttattttttttgttttatttgaaaaagaaaaagaaaaaagagagttttttttggtttttggtgatttatatttaggatattattttattttttagtatatatatttttatagtgttatttggtttttaattcgagtattttttggagtgttcgttatatttttttttttggtgtttttttatggtggggttaggggaggttttgttttgaatatcgttgtgacgttattttttttttttcgagttaagtatttttcggtgggttttgggaattgttgttcggtttgttggggaggggcggagtgtgggtttagggagggttttattaaatatttattatcgttgtcgtttgcggggtttttaggttgtaagtacgtgaggtgttagaaaagaagtcgaagggttttcgtgggggtttttttgttaaatgagttaagagatgtgcggaagcggatgattgaagtatttcgtggagtagtagaaaggggtattaaaaattgtaatttgaaaataaaagttttaatttgttttttaaaagattttatgtttgcgttttaatgtttaaataatattattaataataaaaatgaaataagaaaagtgtttgaaatataattaagtcgtttattggaggtttgttttcgagtaagtttataaaatataaatgtaaatatttttttttggcgaatatttagagttaaattagtggaaagttgattttgataaaattacgtttttttattttttttcgtacgttagatattaattttataacggcgatttttatatttaaaacggagagttgagaatatcgttgtaggtcgatttgtaatttatataataagttgtttatattttattgggtcgatggagggaggaggtagggaagagtaggaggcgataggttggtgggggagggggtagcggggtattattgtttgttgtaaaattcggggtcgaaggcgtttttcgtattcggaaaataaagtattcgtaatcgttgcgtttattttcgcgtatcgttagtagtgtaaaaggtagttttaagatcgaatttattatttgttgaggtgtttagggagattatttaaattttttttaggttgaagttatagtattttttaaagtttcgattaggcgggttgataagatttttagggtgtcgggttgggggttgaataggaattaagtgtttaggttttggggttttattattattttcgtttttgtttagtgtttttggtaattagtaagtgttgagttttttgttggtgtttttttaatttattagtgatttggttcgtaaattatttggaaaaggagtttttagagatttcggcgtatagtaggttaggaggtagttgtttcgggatttagagtaatttcggggtaatttttttttttttaaaggttaattttagaagaggtaggttttttttttttcgatgttaatgtttattatgaaatagtaatttttaaatatttaggtgatacggagatgcgtttgttatacgttagcgttttttatatgtaatagtcgaagttgtaatttgaatttttttgttaacgtgaggaagtcgggattcgaatcggggagataaaaggggtttcgaatatgtttttggatttaatagatggtcggaaattaggggtagcggagttgttaaatgcgttacgtacgttttttcgtagttttttgagttcgttattttttttagtttttagtgaacgatttgggatttagttttcgggagggtttttttttaagtcgttaaaatgtagaatcgtcgtgtcgggggagggaggtttggttttttttcgttttttcgttttttttttttattttttttttttttgttttattttaattatttagcgacggcgaattttaggcgtgtgtataacgagcgggggttttttcgtgcgtgtttttttagaatttttgaatcgttttttaggtgcgattttggacgtttttttagatatattcgttgtttttgcgagtcggtagtttcgcgtatgtggagatggagattggtttggggaagcgttaagtttttagatatatttatttgttttttgttattatatttgttaatgttatcgagttcgtagtttgattttttatttgagtcgaaacgggtttgacgggattagagggggcggcggcgcggcgagtcggtgggattttcgcgggcgggtaggggagcgcggggtagtagtcgggtttcggtagttttcgtcgttcgtatttttaggtcgttaagggtcggtttttcggggaggggggcgagaagtagggcggttcgtagcggggcgggtttatttttcgcgggtgaacggtcgtcggaaatttttagtagggtttcgtattttttgtttttatttcggttggggaggggttatggaggggggttagatgggcgacgaatttttttttttatcgcgagtagggtttggttgtgatcgagtttttaaaattatgttttttgtagtcgagtttaggataggagaatttttaagtggagaaaagtcggagacgttagtgattcgagtgagattggcgttggagaagggagggaaggggttgcgggaggggagaggcggcggggaggagaggttggggtaattttagcgttggcgtcggcggggttggcgaaggaatgagagcgagttagtacgaggcggggcggagacgttagggttattcgggagtcgtgggcgaaggaagggtttgtacggggtttcgggaggatttaggaagtttgcgcgaacggcgggcgtgggttcggagggttcggggtgggaggtttgtcgggcgtcggcggtaggtaggtggattgcggggggcgaatcgacggcgggtcgggcgtcggcgcgggcgtagggtcggggttcgggttagggcggtcggcgcgcgtgtggttagtttcgcggtttttcggttttcgggagcgggtcggtagggttcggttttcggtttattcggaggcggtttttattttttattggttgtcgtcgttggcggggcggggtttcgttgttcggaaaaaagtgtaattgcgtaaaaaagttttcgtttgggtgacggatgtttaaaagtttagaagtttttttaatgtttttttaagcggttggcgcgcgagagatcgagaaaaggtgacgcggggttcgggtaggcggtcggcgcgcggtttttttttttttcgttttggttatttggtcgttttcgtcggtagtttagggtagagttttttggaaggcgtaggtagtgtggcgagaagggcgtttgtttgttttttttttttgtttgttttttttcgtttgcgtttggaagttgcgtcgcgagtttttgtaaggcggtttgtcgcggtcgggttcggtttttttttttcgtagcgatttcgtttcgcggtcgcgcgggtttcgaggtagttcgaggcgtcggaggagttagttttagcgagcgtcgggagaggcggtagcgtagtcggacgtatagcgtagcgggtcggtattagttcggtcgggttcggattcggattcggcggtcggcgcggcgcggttcggttcgagcgagggtggggggcggcgggcggcgcggggcggcggcgagcgggggttatgtaggcgcgttatttcgtgtttagttttaattttttgggagtggtgttttatttcggcggcgagtagagttattatcgcgcggcggtcgcggcggtcgggggcggttatatcgttatgtcggtttttatgagcgtgtattcgtattttgcgtacgtcgagtagtattcgggcggtatggttcgcgtttacgggttttatacgtcgtagtcgtagtttaaggatatggtgaagtcgttttatagttatatcgcgtttattattatggttatttagaacgtttcggataagaagattattttgaacggtatttattagtttattatggatcgtttttttttttatcgggataataagtagggttggtagaatagtattcgttataatttttcgtttaacgagtgtttcgttaaggtgtcgcgcgacgataagaagtcgggtaagggtagttattggacgttggattcggatttttataatatgttcgagaacggtagttttttgcggcggcggcggcgttttaagaa

SEQ ID NO: 1589 - DNA, 5352 bp, Artificial Sequence
  chemically treated genomic DNA (Homo sapiens)
tttttgaagcgtcgtcgtcgtcgtaggaagttgtcgttttcgaatatgttgtaggagttcgggtttagcgtttagtagttgtttttgttcggttttttgtcgtcgcgcggtattttgacgaagtattcgttgagcgagaggttgtggcggatgttgttttgttagttttgtttgttgtttcggtagaaggggaagcggtttatgatgaattggtagatgtcgtttagggtgatttttttgttcggggcgttttggatggttatggtgatgagcgcgatgtagttatagggcggttttattatgtttttgggttgcggttgcggcgtgtagggttcgtaggcgcgggttatgtcgttcgggtattgttcggcgtgcgtagggtgcgagtatacgtttatgggggtcggtatggcggtgtagtcgttttcggtcgtcgcggtcgtcgcgcggtagtagttttgttcgtcgtcgaggtagggtattatttttagggagttggggttggatacggagtagcgcgtttgtatggttttcgttcgtcgtcgtttcgcgtcgttcgtcgttttttattttcgttcgggtcgggtcgcgtcgcgtcggtcgtcgagttcgagttcgggttcggtcgagttggtgtcggttcgttgcgttgtgcgttcggttgcgttgtcgtttttttcggcgttcgttggggttggttttttcggcgtttcgggttatttcggggttcgcgcggtcgcgaggcggggtcgttgcgaggggagaaggtcgggttcggtcgcggtagatcgttttgtaggaattcgcggcgtagtttttaggcgtaaacgggggaaagtagataaaaagaaagaataagtaggcgtttttttcgttatattgtttgcgttttttaggagattttgttttgagttgtcggcgaaggcggttaaataattagggcggggggggggggggtcgcgcgtcggtcgtttgttcgggtttcgcgttattttttttcggtttttcgcgcgttagtcgtttaaggaagtattgggaaaatttttgaatttttgagtattcgttatttaggcgaggatttttttacgtagttatattttttttcgggtagcggagtttcgtttcgttagcggcggtagttaatgggaggtgagaatcgttttcgaatgagtcggaggtcgagttttgtcggttcgttttcggaggtcggaggatcgcggggttgattatacgcgcgtcggtcgttttggttcgggtttcggttttgcgttcgcgtcggcgttcggttcgtcgtcggttcgtttttcgtagtttatttgtttgtcgtcggcgttcggtagattttttatttcgggtttttcggatttacgttcgtcgttcgcgtagattttttgggttttttcgggatttcgtgtagatttttttttcgtttacggttttcgagtggttttggcgttttcgtttcgtttcgtgttggttcgtttttattttttcgttagtttcgtcgacgttagcgttggggttgttttagtttttttttttcgtcgttttttttttttcgtagtttttttttttttttttttaacgttagttttattcgggttattgacgttttcggtttttttttatttggaggtttttttgttttgaattcggttataaaggatatgattttgagggttcggttatagttaggttttgttcgcggtggggaagaaggttcgtcgtttatttggtttttttttatgatttttttttagtcgaaatgaaggtaaggggtgcggggttttgttgggagttttcgacggtcgtttattcgcgaaggatgagttcgtttcgttgcgggtcgttttgtttttcgttttttttttcggggggtcggtttttggcggtttgagggtgcgggcggcgagggttgtcggagttcggttgttgtttcgcgtttttttgttcgttcgcgagggttttatcggttcgtcgcgtcgtcgttttttttgatttcgttaggttcgtttcggtttagatgaggggttaggttgcgggttcggtgatattagtaggtgtgatgataagaagtaaataaatatgtttaagagtttaacgtttttttaggttagtttttatttttatatgcgcggggttgtcggttcgtagagataacgggtgtgtttgggggaacgtttagggtcgtatttagagggcggtttaaggattttggggggatacgtacggaagggttttcgttcgttgtgtatacgtttgagattcgtcgtcgttgggtggttggaatgggataggaagaagagaaatgagggaaagaaacgaaggagcgggaaagagttaggtttttttttttcggtacggcgattttgtattttagcgatttgaggagagattttttcggaggttgaattttaagtcgtttattagaagttgggggaagtggcgagtttaggagattgcgaagaagcgtgcgtgacgtatttaatagtttcgttgtttttgattttcgattatttattaaatttaaggatatgttcgggattttttttgttttttcggttcgaatttcggtttttttacgttggtaggaaaatttaaattgtagtttcggttgttatatgtgaaggacgttgacgtgtagtaggcgtattttcgtgttatttgaatatttaaaaattattgttttataatggatattgatatcgaaggaaagaggatttgttttttttagaattagtttttggaggagggagggttgtttcgaggttgttttgaatttcggggtagttgttttttggtttgttgtgcgtcggggtttttggagattttttttttaggtggtttgcgggttaagttattggtgggttggagaagtattaataggaggtttagtatttgttggttgttaaggatattagataggggcgagggtggtggtgaagttttaggatttgaatatttaatttttgtttagtttttagttcggtattttgaaggttttattagttcgtttggtcgaggttttaaggagtgttgtggttttagtttggaggagatttaagtggtttttttgaatattttagtaagtggtgagttcggttttgaagttgttttttatattgttagcggtgcgcggagatgaacgtagcgattacggatgttttgtttttcgaatgcgggaaacgttttcggtttcgagttttgtaataggtaatggtgtttcgttgtttttttttttattagtttgtcgttttttgtttttttttgttttttttttttatcggtttagtgaagtgtaaatagtttgttatgtaaattgtaaatcgatttgtagcggtgtttttagtttttcgttttgggtataaaagtcgtcgttgtgaaattagtgtttggcgtgcgagaaaaaatggagggacgtagttttattaagattaattttttattggtttagttttggatattcgttaggaaaagatatttgtatttgtgttttataaatttattcggaagtaagtttttagtaagcggtttgattgtattttaagtattttttttattttatttttgttgttagtggtgttatttgaatattaagacgtaggtatgaagttttttggggaataggttaaagtttttatttttaggttatagtttttgatgtttttttttgttattttacggggtattttaattattcgttttcgtatattttttgatttatttggtagaagagtttttacgggaatttttcggttttttttttgatattttacgtatttgtagtttgaaggtttcgtaggcgatagcggtaatggatgtttggtggaattttttttgggtttatatttcgtttttttttagtaggtcgggtaataatttttagggtttatcgaggggtgtttagttcggaggagggggagtgacgttatagcgatgtttaaaataaggttttttttggttttattatagaaaagtattaggaaggggaatgtggcgagtattttaggaaatgttcggattggggattaggtgatattgtaggaatgtgtgtgttgggggatgggatggtgttttaaatatgggttattaggagttagaaggagttttttttttttttttttttttttaagtaaagtagaggaggtggagattgggatgggggtagttcggaaaaattattttttaggggtgtgagtttagttcgtgttgtgcggattgttttcgttatagtttaattatttttgtggtgtgtttagacgtttttttttttattttttcgttttttggtttttttattttttgggttttgggtttagttttgaaagtcgaattgtgggttgtagtggggaggcgagggtaggtagaaattagttttagggggggttttatttggtttaggagttgggggataatagaaaaggtaggtttagggtatgagggaaggcgttttttttgttgtattggggtagtgatttttgggggttttgtatatataggagggaggttgtaagtttatagttgttttagtatttttttttttgttggggtagatagagtggaagattaaggtaattaattttagagggttattagaaaattgtttattaggttgttattatagattattggagtaaggttcgtttggggatgtttttgagttttttagattatttagataattgttttagttttttattcggttttttttgtttagattagaattttaggggtaggggaggatatttttgtattaatgttcggtattcgtttttaaattattaggtcggtaggtaacgttagttatcggtgcgattttttagcggaggaaggagtggggatcgaatatttgggtggtcgcgattttgggtagatattttttagttgggggatttttaagtagaggatttgttagtatagtttttttaatttagtttcgtttttagtagaaaaatttttataataaacgaaaagagcgtttggttttcgattgttttaaagataaagtgatttatattgtttgtttatatggttggattaattcgatagttgtttttttgggggtagatttttacgggaagtttgtgtgatgggataatttaatgttatttaagttttttggaggggcggtttttttaattatttatttaggagaaagttagttaatatttatttgatcgttttcgtttcgggatggtttatttatcgttttttggtaggaaagttttcgtttcgaagggcgtttcgggggtttagagtcgagttaagttgtaagagggggttatggggaatgcgggaagtgaatttttaattttggtgttcggttttaaaagatttagggttttttgtgtt

SEQ ID NO: 1590 - DNA, 2428 bp, Artificial Sequence
  chemically treated genomic DNA (Homo sapiens)
tatggaatattatttagttataaaaaagaatgaaataatgttttttgtagtaatttgatggagttagaggcgttattttaagcgaagtaattcggaaatagaaaattaaaaattgtagtttttatttataagtggaaattaagttatgggtacgtaaaggtatatggagtggtataatggattttggagatttagaaagagggagagtgggaagggggtgagggataaaaaaatatatattgggtatatatatatattcggtgatgggtgtattaaaattttatatatatatgtatatatatatatatgtatatttatatgtatattttatttatgtaattaaaatttatttgtgttttaaaagttattgatatatatatatatatataatttttatatgtttttatatatatgaaaaaagatagtaaatttttgttttttaaattttaagttataggaagagaaaaatatttataaaattttaggtttggagatttgatttgtcggttgaaatttttttttgttaatgttgattttttatattggaaaatttttagattattatttgtatgagtgagaattttttttttgatttttaatttaaattatatggaaagaaggttaaaatggagttcgtgtattttgaatttatttttagtatttaggttgtagtattatagtttaatttttattagtaggaggtattatttaaatatgttgagaaatatttatttttaaggaatgatattgtttttttatttggtttaatttagtttgagaaggattgttgtttttgatgaagaaagagttttattttcggttattgttatagttgttttgttaataataaaggtatagtattttttttttgtgtatttttaatatggatgttttttagggtattttaaaatttttttttaattagaaaattgttattggttatagttttatggttttgttgatcgtgggaagtgagcgttttttttttgttgtggtttttaagtgtttttgtagtattgagaatatgatttatgggttggtttttttttttgtttttgtttgggtgttattgattttgggattttttttgaataataggtcgtggagattttttataggttgttgtgtgaattttaggaaaattttttttagaggttatagttgtcgttttttttacgttttcggttagattattttgagtttattggtggttttagtgatgtggttttttgtggttttgtttaatggaattttttatgaatgtgttatgagcgggacgagaagtttaggatttttggaattgatttgtaagggtaagtttaaagagtgttgggaagaattttataaagtattttgtggtaaaattagtatgttatttatcgttaatgaagaattgaaattttttttttaggtttagttttaggtaagaaaagataaattcgttttttttttttagtatgagttcgaagtattttttttgtgttttttttagttagggttgtttgtgttttgttagaatattttgaaattaaatggaaattgaaatatgatgtagtattgagattattttaggaaaagtttttgaaaggttgggtggtttaataaagttgttgattggattatttttttttcggttttgaaaagaaaatatttattggattgtttatatataaatatttaagtattttaaaatagtttttttgggtttgtaaataaataatgtttaatattaaattataaattgagtgttaatggtagagttgtaattagaaattattgttttttattaattatttatatttaagttgtttttttaaatatatatatgtattatttatttattaaaatgtagttgaatgaaatgagttattattttttaaagttgtatgtaatataattagtgtggagatttttttgaatgatttttggtaattgttatttttgtgtataaatattgttaagattgagaagaattttttttgtatggtaggaattagtagtttttaaatagttttttgtgaaaaagtgattgtattttttagggagattatgttttatattttttgtgttgtatagttaaaggggtttttaattattttagaagtttaagatttgggtattgttttatttaatagaaggaaattatatttttatttaattgatgtagggaagtagtttgttatttttttaggtatatgaatataaatttagatgtatagttttaggaaggattaattttttatttataggtagtaagaattgtatttttaaaagtaaaataagtggtaagagttgataagtagatttataaattgttaggaatgttatttgttttagaataaaggtatagaaatagtattattttattttttcgataaggatttgttttggtaataataaattaaggtaaaatttgtttttaaaatta

SEQ ID NO: 1591 - DNA, 2428 bp, Artificial Sequence
  chemically treated genomic DNA (Homo sapiens)
tgattttaaaaatagattttgttttgatttgttgttattaaggtaaatttttgtcgaaaaagtaaaataatgttatttttgtgtttttattttgaaatagatagtatttttgataatttgtggatttgtttattaatttttattatttgttttgtttttgggaatgtaatttttattatttataaatgggaagttagttttttttaaggttgtatatttggatttgtgtttatgtgtttggaggaatgataggttatttttttgtattaattaggtaaagatatgatttttttttgttaaataaaataatgtttaaattttgagtttttgaagtaattaagaatttttttagttgtatagtataaagagtataaaatataatttttttagagagtatagttatttttttatagaaggttatttaaaaattgttgatttttattatataaggaaaattttttttaattttgataatatttatatatagagatagtagttgttagaaattatttaagagaatttttatattaattatattatatgtaattttgaaaagtaataatttattttatttagttatattttaatagatgaataatatatgtgtgtgtttgagaaaataatttgaatgtaaataattgatagaaggtagtaatttttaattatagttttgttattaatatttaatttatgatttagtgttaggtattatttatttatagatttagagagattgttttaaagtatttaagtatttatatgtggataatttagtggatattttttttttagaatcggaaaagagataatttagttagtaattttattgagttatttagttttttaaaagttttttttgagatagttttaatgttgtattatgttttagtttttatttagttttaaaatattttgataggatatagatagttttggttgaaaggagtatagagagaatatttcgagtttatgttgagagaaaaaggcgagtttgtttttttttatttgagattgggtttgaagggagagttttagttttttattgacggtaggtagtatgttagttttgttataagatattttgtgaagttttttttagtattttttgggtttatttttgtaaattagttttaggagttttgaatttttcgtttcgtttatggtatatttatagaaagttttattgagtagagttatagaaagttatattattggagttattaatgagtttagagtgatttggtcgaggacgtagaagaaacggtagttgtggtttttgggaaagatttttttgggatttatatagtagtttgtgaagagtttttacgatttattgtttagaaagaattttaggattagtaatatttaggtaggagtaaagaggaaaattagtttataggttatatttttagtgttgtaggggtatttaaaagttataatagaaaagagacgtttattttttacggttagtagagttatgaagttgtagttaataatagttttttgattaaggaagaattttaaaatgttttgaaaagtatttatgttggagatgtatagagggaaaatgttgtgtttttgttattggtagagtagttgtggtagtggtcgagggtggagttttttttttattagaaataatagttttttttagattgaattgagttagataaggaaataatgttattttttaggaatgaatattttttaatatgtttagataatgttttttattggtggaaattgggttgtgatattgtagtttaaatgttgagaataaatttaaagtgtacgggttttattttaattttttttttatgtggtttggattgaaaattagaaaagaaatttttatttatataaataatagtttaggaattttttagtgtaaggaattaatattaatagaaagaggttttagtcgataaattaaatttttaaatttagaattttatgaatgtttttttttttttatgatttgagatttggaagatagggatttgttgtttttttttatatatataaaaatatatgaaaattatatatatatatatatattaatagtttttggagtataagtgggttttggttatatggatgaaatatatatataaatatatatatatatatatatatatatatatatgagattttagtgtatttattatcggatatgtatgtgtatttaatatgtatttttttattttttattttttttttattttttttttttttgagtttttaaagtttattatattattttatatgtttttacgtatttatagtttaatttttatttataagtgagaattatagtttttggttttttattttcgagttatttcgtttggaataacgtttttagttttattaagttgttgtaaaagatattattttatttttttttatgattgagtagtattttatg

SEQ ID NO: 1592 - DNA, 2443 bp, Artificial Sequence
  chemically treated genomic DNA (Homo sapiens)
acgtgatttgaaggtatttagtatacgtttttgtttgggtaggattagttgagttatttttcgttttattaatttttaataattgttatattgtgtgtgtaattagtaagtgagtggtatatggagtttgatttggtattttatttatatattttgtttgatattatttttattgtttgggtttttgtttttggagaagagttgtcgaaaagtattatttttttttttattattaatttttatttttatttttatttttaatatgggatgtcgaggtgtagaggtattagtattgttttgttattattttagtggatacggattcgattaggcgttttttttttttttgtttatattaaggttttttaggtcgcggtcgtttatcgggaatttttttaggggagcggcggaggggcgaggttatggtgcggggatttgtaagagggttttgattttgatagagaggggtcgatgggcggttaggtgggtttgcgggtttattttgttgaggtgagggtttcgtgttagtaggtagtcgcgttgatgggtgtggcggcgacggggggtttcgggttttatggttggcgtcgggttcggcggcggggttaggtcggggcgggtcgtacgcgcggtgtaggcggcggatgttgttggggtgacggtgttgattgtagttgtggcggcggcggtcgtattgggaaaggtttagcggttgggggcgggcgtgggtggcgagagggggtggacgcgtcgggaggggttcgagcgaagtcggtgtttttagtagggtagtttgcgagaagcgttgagttatggtaggagattattcgagtcggcgtgtgaggaggaggaggaagagcgagttttggtagcgttgttggtggcggagcgggggtggcggtcggagtttttggttttatagggtttttgtttattatgggtttatgattatcgttgtggtcgtttttttttatgtgggtatgtttaaacgtagtgtattgggtggttttgttgattttagagatttagggcgggggtagggagcggggagcgttaggttaggatttttttgttcgggaaggttggagaaagtgcgagaagatgttagaaggtgcgaatttgagcggtttaggtagagtcggcggtcgtttagatatttagggggattataggacggaaggattcgtgaggggtttttagaattgttgatagaatatttcgataggttgaggagaattagattcgttttttttgttttgttagcgttttggaagttttttttttatagatttataattttcgtcgtgttatttaggatgtcggttatgttcggggttttgaggtcggagggaattaattttgatttagaatgtcgaggtttaagggaattgggaggaagtttagagaggagagtttaggcgttatatttgttagtttttatagattttttatcggaattgtatttgaatgttaataagataagagttaaggtgttagggtgtaaaggtttaatgaatagttttgtttattttgtatattatttttttgggagttttagaaatttgatgtttaagaattattgttttttttgaataatgatgagtaagtagttttttaggttttttttttaattttaggtgattcgttcgttttcgttttttaaagtgttgggattataggtgtgagttatcgcgtcgggttatttttttattgttttattgatatttatgtttggaggtttatggattggaggaatagttagattatagttaaaaggagtgtttgtttgataaaaataaattaatagtaatagatattaaagttttttgtgttttagttttttttttagttaaataggattgttagtttttgttttatttgtttttgtatattgatattataaaggatagtgtttgagattatttgttgattttatatttttatatattagatatatatttaattatagtgtttttatttttagttatgttaattttgttttattagaaagattttttatagtaattgtattttgttcgtatttatatttagaagtttttttgatttcgtttgaattatttagaattcgttgtttttatagagaatattttttaggtattataaagttttttttgaaaaaaatttttgaagttaaatgatattttttattgttaattttatattttataaatatttaattttataatatttaagaaaaaggtgtattttatataatttatttttttgaattaattgagatatattatagttagggtgttttatgtgagaggaaatagtttaatagttggtatgggagttaatttaagttgtttaagaagaaataaaaatgttagtataatagatttttattataataaagtatttattatatgaatttagatatattatttatttgtttttgtttttgagatttaatatttat

SEQ ID NO: 1593 - DNA, 2443 bp, Artificial Sequence
  chemically treated genomic DNA (Homo sapiens)
gtagatattaaattttagaaataggaataggtaggtagtatatttaaatttatgtaataagtattttattataataagggtttgttgtattaatatttttgtttttttttaagtagtttgaattggtttttatgttagttgttaaattgtttttttttatataaaatattttaattgtaatgtgttttagttaatttaggagagtgagttgtgtaaagtatattttttttttagatgttgtaggattgagtatttatggagtatagaattaataatgaaaggtgttatttaattttaaggattttttttaaaaagaattttgtgatgtttagaaaatattttttataaaaataacgaattttagataatttaggcgaggttaaagaagtttttaaatgtaaatacggataaaatataattattgtaagaaatttttttgataaggtaaagttaatataattagaaatgaaaatattgtgattggatgtgtgtttagtatatggagatataaaattagtaaataattttaaatattattttttgtaatattagtatgtagagataaatgggatagaaattagtaattttatttaattgaaaaggaaattggggtatagaaggttttagtgtttgttgttattaatttatttttattagataggtattttttttggttatgatttgattatttttttagtttatgaatttttaagtataaatattaataaaataataaaaaaatggttcggcgcggtggtttatatttataattttagtattttggaaggcggaggcgggcggattatttgaggttgggaggaaggtttgaaagattgtttatttattattatttagagagagtagtggtttttgaatattaggtttttagaatttttagagaaataatatataagataaataggattgtttattgggtttttgtattttaatattttgatttttattttattgatatttaaatataatttcggtggaaaatttgtagaaattgataggtgtggcgtttgagtttttttttttgggtttttttttagtttttttgggtttcggtattttgggttaaggttggtttttttcggttttagggtttcgggtatggtcggtattttggatggtacggcgaaggttgtggatttgtagaaagagggtttttaagacgttaataagataggagagacgagtttgattttttttagtttgtcgaggtgttttgttaatagttttggggattttttacgagttttttcgttttgtaatttttttaggtgtttgagcgatcgtcggttttgtttgaatcgtttaggttcgtattttttggtattttttcgtattttttttagttttttcgggtagggggattttggtttgacgtttttcgttttttgttttcgttttgggtttttggggttagtagagttatttagtgtattgcgtttaggtatgtttatatggagagaggcgattatagcggtgattataagtttatggtgggtagaggttttatggagttaagggtttcggtcgttattttcgtttcgttattagtagcgttgttaggattcgttttttttttttttttttatacgtcggttcggatgattttttgttatgatttagcgtttttcgtaggttgttttgttggggatatcggtttcgttcgggtttttttcgacgcgtttattttttttcgttatttacgttcgtttttagtcgttgggttttttttagtgcggtcgtcgtcgttatagttgtagttagtatcgttattttagtagtattcgtcgtttgtatcgcgcgtgcggttcgtttcggtttgatttcgtcgtcgaattcggcgttagttatggagttcgaagtttttcgtcgtcgttatatttattagcgcggttatttgttgatacggaatttttattttaataaggtaaattcgtaggtttatttggtcgtttatcggtttttttttattagggttagggtttttttgtaggttttcgtattatggtttcgttttttcgtcgtttttttgggaaggttttcggtgagcggtcgcggtttggggggttttggtgtgggtagaaggaagaaggacgtttaatcgggttcgtatttattagagtgatggtagggtagtgttggtgtttttgtatttcggtattttatgttagggatagaggtaaaggtaaaggttagtgatagaggaaaaggtgatatttttcggtagtttttttttaaaaataagagtttagataatgaaagtagtattagataaagtgtgtgaatggagtgttaggttagattttatgtgttatttatttattggttgtatatatagtgtggtaattattggaagttgataaggcgagaagtggtttaattggttttgtttagatagaaacgtgtattgagtgtttttagattacgt

SEQ ID NO: 1594 - DNA, 2489 bp, Artificial Sequence
  chemically treated genomic DNA (Homo sapiens)
atttttagtatagttagggtaggttttattaaattgtaaagtaggaaagttgaataatttttaaaagttaaagtagtttatgattttaaagtatttagttaatttagtttttgatttgtataatttagattatgtttatattttgaagatatttttatttttattttattgataatttaaaagatagtttatttagtaaagttatatttaagtgaatttgaaaattgtttagatttatttatttaatttatgaatatttttttatttataagttaatttggtagatataatatataatagtaagtgtatatataagtaaatatatttagatatgtatatatatatataaatgaagaggtggagtttaaaatatttaaattgggtgtagtgtatattgtttgggagatggatgtattaaaattttataaattattattaaagaatttgtttatgtaattaaataatatttgtttttttaaaatttatgggaaaaaaaaattaaaaaaaatatttaaatggtattatagaattaattagtcgaatatagtatttagtatttggttgttatttaatatttgttttatattattatatttagaaaataagtagatattttttttggaagagttttgagggagttattaggaggtttgtacggtttgtttttttgttttttttttgttttgtggttgaattttaatttttttcgggtttagattttattgattcgttttcgggtaaagtaaacgatttgattagatggttacgtgtattttttttttttttgaaattagtattatagggtaaaagattatttttatttggttgttttttagatgttttatatttggatagtaaattgattttaaattatttttttttaaagatttttgagggagatattgtatttggttattgtagtttagagtaggtttggttacggttatgagtatgttgagttattatgtttatcgtggatgatattttggagtaggttggggagtttggttggttttagaagtaagttttttttattttatgtttgttgtcggttgtttttgcgtttatttgtgtgggtatcgtttttttgggttttatatttgattattattgttagagttttggggtggttgagttgagttagcgttgtggttggagttttgcggaggagttgaattatatagtgttaggtttggggttcgcgggcgaggttttttttggttagtgtaggcgttatgaagtggattggaattagagcgtttttagttgtgtagattttttggttagtttggttattaataggagttatttgtcgttgggtttttgttaggatggttgggtgtatgatacgttcggtttttttatcgttattgaggtaaaaaagtttttgtaatatgggagtttttgggatagggagaaatataaagtaaattttatgaagtttagttttatattaggaaagaggtagggggttatgtttattgtgtagttcgtgggtgtttggttgtgttttaggtacggggtatttttttttttagtttaatttattataaattttgggtttttgaggaggaagttgaggtaggagagaatagttagtataagtcgggggttaggttgttaggttgtttgaatgggagttgattgggagattaggagtttttttgtttgttttattggttttttttagaattattaatttgttttgggtttcgtttttttattaatagtattgtgggttttttttttttgtttaagagtgatgacgattgattttaatgatggtgttgaggtggtttggaattgttttggtttggaagtgagaatatttggtggaattttagttgtgttttttattagttgagtattattgggtaagttattgtttttttaagttttatttttttattagttaattagggatgatgacggttgttttataggggtgtgagttttagttgggatttgtgaaagtattgagtaaatttaaattgagttatatcgtgtagttcgatggggtttatgggatagggcgatggttttaaaagggttttgtttgagtagtttatttggttatttgagtattttgttttgagaattttttagtaaaaagtgttattatattttttttttattatgagtttttttgaaattattgtacggtaataagtgtggatgtttggtgggttggagaagttgtgggttaaagttcgttaggggttttttgttagtaacgagtagtggcgtggttttggtgtaggtattgtttttttgaaataagaggtaattgggttttttttgtttttggttttgtttatttgtttgtttttattattttcgtttaagtttttcggattttttgggtttttgttttttttttttttttttttttgagtggtattagcggtgatatatttagggttattattggaggaaagtttagggttttttttttttgggtttgagtattgttttatttgtttgtttgg

SEQ ID NO: 1595 - DNA, 2489 bp, Artificial Sequence
  chemically treated genomic DNA (Homo sapiens)
ttaggtaagtaggtagagtaatgtttaggtttagaggggagggattttaagtttttttttagtaatagttttaaatgtgttatcgttgatattatttaggaaagggaaaagaggaagaatagagatttaagaagttcggagagtttgggcgagggtagtgggggtagataagtgggtaggattagaggtagggagggtttagttattttttattttagggaagtagtgtttgtattaaaattacgttattgttcgttattaatagaaggtttttgacgggttttggtttatagtttttttaatttattaagtatttatatttgttatcgtgtaatagttttaaaagggtttatgatgggaaaaaaatgtggtgatattttttattaaaggatttttaaagtaaaatgtttaaataattaagtaaattatttaagtaaggtttttttgaggttatcgttttattttatgggttttatcggattgtacggtgtgatttagtttggatttgtttagtgtttttatagattttagttgaagtttatatttttatgaggtagtcgttattatttttggttgattgatgaggaaatgaggtttagagaggtagtgatttatttagtgatgtttagttaataaggggtatagttgggattttattaaatatttttatttttaagttagggtaattttaggttattttaatattattattgaggttaatcgttattatttttgagtagaaggagggggtttatagtattattggtggggaagcgggatttagagtaagttgatagttttgggagaagttagtggggtaggtagagaggtttttggttttttagttaatttttatttaagtaatttggtaatttggttttcgatttgtgttagttgtttttttttgttttagttttttttttaaagatttagagtttgtggtggattaaattagagaagagaatgtttcgtgtttgggatatagttagatatttacgaattgtataataaatatagttttttattttttttttgatatggaattgaattttataggatttgttttatatttttttttgttttaggaatttttatgttatagaggtttttttattttagtgacgatggaagagtcgggcgtgttatatatttagttattttggtagggatttagcggtaggtggtttttgttggtggttaggttagttagggggtttatatagttgagggcgttttggttttagtttattttatagcgtttgtattggttaaggaaggtttcgttcgcgggttttaggtttggtattgtatagtttagttttttcgtagggttttagttatagcgttggtttagtttagttattttaggattttggtagtggtggttaggtgtgaaatttaggaagacgatgtttatatagatgggcgtaaaggtagtcgatagtaggtataagatgaggaaggtttgtttttggaattagttagattttttaatttgttttagaatgttatttacggtgggtatgatggtttagtatgtttatggtcgtggttagatttgttttgggttgtagtggttaggtgtaatgttttttttagagatttttgaaaaggagtggtttgaaattagtttgttgtttaagtgtgaaatatttggaaggtaattaagtagaaataattttttattttatggtgttggttttaggaaaaggaagaatgtacgtggttatttgattaaatcgtttgttttgttcgggagcgagttagtggggtttaagttcgaagagaattgaagtttagttatagagtaagaagagggtaggagagtaggtcgtgtaaattttttagtagtttttttagggtttttttaaaaagaatatttatttgttttttagatgtgatggtatgaggtaagtattgggtgatagttaggtattagatattgtattcggttaattagttttgtgatattatttaagtattttttttagttttttttttttataggttttgagggaataggtattatttggttatatgagtaggttttttagtggtgatttgtgagattttggtgtatttattttttaagtagtatatattgtatttaatttgggtgttttaagttttatttttttatttgtgtgtgtgtatatatgtttagatgtgtttatttgtatgtatatttattgttatatgttgtgtttattaaattggtttataagtaaaagagtgtttataaattaagtaaataagtttaagtaatttttaaatttatttaagtatgattttgttaaataggttgttttttaaattattagtaaaatgaaaatagaaatgtttttaaaatatagatatggtttaaattatgtaagttagaaattaggttgattaaatgttttaaggttataaattgttttggtttttgaaaattgtttaatttttttgttttgtagtttggtagggtttgttttagttatgttggaaat

SEQ ID NO: 1596 - DNA, 2388 bp, Artificial Sequence
  chemically treated genomic DNA (Homo sapiens)
ataaatataataagttataaatatagtattgagaggtttttgtatggtttcgttttttttaggtagtattttatataattatagtttatgattataattggaaagttgttattggtattatattagaaattagtttgtagattttgtttagattttattaggttttttgtgtatttatttgtttttttgaaaatattttaatgtttttttatatgatttattttttcgatatattgtgagataaggttttttttttttcgaataagtttagagaataatgaatgtgagaggtgggaaggatgatttggtgtatttttgttttatttatggtgagtttggattttagagtagaaggattttcgttttttttttggggagttttggtgttaatttagtgtaggttgttaagttattcgggtttgattgtttttttttttgttaaaatttgttttaagtatgtaatatagttatgtttattaatgatgaggagatagttaatgaaaattaatttttttaaagatgaatagatatttagatttttttaagtataatttatttaagaaaatattattttattgagttttaaatgagttaggttttatttagaaagtgttttttagtgttaggtaaagtgttttatatttgtaattttagtatttttggagacggagataggaggattttatgagtttaggagtttaagattagtttgggtaatatggtaaaattttgtttttatagaaaatataaaaaaaaaaaaaatagttgggcgtggtggcgtgtatttgtggttttagttattttggagtttgaggtgggagaatcgtttgaatttaggaggttaaggttatagtgagttgtgtttgtattatcgtattttagtttgggtgatagagttagtttttgtttttaaaaaaaaaaaagaaagaaaggaaaagaaaatgttttcgagttgattatattttaattattgtgttaatttgagagatagtttgttatttttttataggatatgagggttgataattattttattgtatggttttggggattgatgaataaaggttaatatgtggaaaagggtaattaaagaaagaagagttatttttaggttaattagtataagttttttcgttggtatgttttaatatattaaaatagtagtaaaaataatttgtatattggtatcgaaggtatagataaatttgtcgaggatttttattacggtagagggatgttttatatgagtttttagtagattaattaagtttttgttagttttatttggaaatgatgttgtttttttggggttatgtagagaagtttatgttgatgaaatgagttgttttagaatggtagttttcgggtagtagagtttgggtttaaggaaggttgaaagaaggggtggcgtggagttgttaggtgtaaatgttaggttagtaatgtagtttagtttgtatggacgtgtttcgtttaggaagttgtgatttggttgtattttttattttaggtgagatggaaggttgaattttattttattttttggtgaggttgatgttttttggtgtttataattttttttgtaaatatttgaaaggaatttattattttaatgttggaagagacgtttatttttttttaagaggatttgagtggattttgattgtaggttttatgttgggtagagttaaggagaatttaatttgtttttaattttatttgaatgttttttttttttttttttttttttttttttttgagatagagttttgtttttttatttaggttggagtgtaatggtacgatttcggtttattgtaatttttgtttgttgggtttaagtaatttttttattttagtttttttagtatttgggacgataggagtatgttattatgttttgttaatttttggtatttttagtagagatggggttttattatgttggttaggttggttttaaatttttgatttcgtgatttatttgttttggttttttaaagtattgggattataggtatgagttatcgcgtttagtttatttgaacgtttttatgtttgttataagtgtagtagtagaatttttatatattttgcgtgcgaaagttttttgtagtttttttagtatagagaggttggggaaggttagagattgatttgtattttttagatatatagttgattattgaataatatacgtttgaattgttatatatagattttttttaataaatgtgttagaaaatgttttggagttttgtaataatttgaaaaaatttaaagataaattatttagttagaaatattaataaaaatagaaaaagttaagtatgttatgaatgtataaaatatatgtagatatttagtttattttattttttattatta

SEQ ID NO: 1597 - DNA, 2388 bp, Artificial Sequence
  chemically treated genomic DNA (Homo sapiens)
tggtagtaaagaataaaatagattaggtatttatatatattttatgtatttatgatatatttaattttttttatttttgttgatatttttagttggatggtttgtttttgagtttttttaaattgttgtaaaattttaaaatattttttaatatatttattgaaaaaaatttgtgtgtaatagtttagacgtgtgttgtttaatgattaattatatgtttaaagagtataagttagtttttaattttttttagtttttttatgttaaaggaattataggaaattttcgtacgtaagatgtgtggagattttgttgttgtatttgtagtaggtataggaacgtttaaataggttgggcgcggtggtttatgtttgtaattttagtattttgggaggttaaggtaggtggattacgaggttaggagtttgagattagtttggttagtatggtgaaattttatttttattaaaaatattaaaaattagtagggtatggtggtatgtttttgtcgttttagatattggggaggttgaggtgggagaattgtttgaatttagtaggtagaggttgtagtgagtcgagatcgtgttattgtattttagtttgggtgagagagtaagattttgttttaaaaaaaaaaaaaaaaaaaaaaaaaaaaagaatatttaaataagattggagataaattgaattttttttagttttgtttagtataaggtttgtaattaagatttatttaggtttttttaagaaggaatagacgttttttttagtattaaaatggtaaattttttttaagtatttataaagaaagttataaatattaggaaatattaattttattaggaggtgaggtagagtttaattttttattttatttgaagtggaaaatgtagttaagttataattttttaggcgaagtacgtttatgtaagttggattgtattgttggtttgatatttgtatttggtagttttacgttatttttttttttaattttttttgagtttaggttttgttgttcgggaattgttattttaggatagtttattttattaatatgaatttttttgtatagttttaagaggatagtattatttttaaatggaattagtaagaatttaattaatttattaaggatttatataaagtatttttttgtcgtggtaagggttttcggtaagtttatttgtgttttcgatgttaatgtgtagattgtttttattgttgttttagtgtattagggtatattagcgaggagatttgtattaattaatttggaggtggtttttttttttttagttgtttttttttatatgttagtttttgtttattagtttttaggattatgtaatgaggtgattattagtttttatgttttgtaaagagatagtagattattttttaagttagtatagtggttaaaatgtaattaattcgggggtatttttttttttttttttttttttttttttttggaaatagaggttggttttgttatttaggttggagtgcggtggtgtaaatatagtttattgtagttttaattttttggatttaagcgatttttttattttagattttagagtagttgggattataggtgtacgttattacgtttagttattttttttttttttgtattttttgtagagatagggttttgttatgttatttaggttggttttgaatttttgggtttatgagatttttttattttcgtttttagaagtgttgggattgtaaatatgaggtattttatttggtattaggggatattttttaagtgagatttaatttatttggggtttagtgaggtgatatttttttaaatgagttgtgtttgaaaaaatttagatatttatttatttttgaaaaaattaatttttattggttgtttttttattattaataagtatggttgtgttatatgtttaagataaattttagtagagaagaagatagttagattcggataatttagtagtttgtattgagttggtattaggattttttagaggagagacgagggtttttttgttttgaggtttagatttattatggataaaatagagatgtattaaattattttttttattttttatatttattgttttttaagtttattcggagaaaaaaaaattttattttatagtatgtcggggagataagttatgtagaaaaatattaaaatatttttaggaaagtaaatgagtgtataaaaaatttggtgaaatttgagtaaggtttgtagattagtttttgatgtggtgttaatggtaattttttagttgtaattatgaattatagttatgtaagatattgtttgagggaggcggggttatataaggattttttagtattatatttgtaatttgttgtgtttat

SEQ ID NO: 1598 - DNA, 2433 bp, Artificial Sequence
  chemically treated genomic DNA (Homo sapiens)
tgaagacgtaataaaattttttatttgaaaaatttttttgtgatttaagtaagtttatatttgttttattgttgataatttataatcgttattttaggtttttaaggagtttattgatgtatttaaaataaatttaataaaattagtgttttttaattaaatgatattaaatatatatatttgtataatttgttttgtagttttaattcgattttttgttaggattaataaatatatatatatatgtttggtataaatagagtaaattttttgtggaataaaattaatcgtgtatattattttattttttgtataaaatatacggtaggtcgggcgcggtggtttacgtttgtatttttagtattttgagaggtttacgcgggcggattacgaggttaagagatcgagattattttggttaatatggtgaaattttcgtttttattaaataaataaataaatataaatagtagttgggcgtggtggtgtacgtttgtagttttagttattcgggaggttgaggtaggagaatcgtttgaattcgggaggcggaggttgtagtgagtttagatcgcgttattgtattttagtttggcgacgtagtaagatttcgtttttgtttttttttttgtttttatatgtgtgtgtgtgtatatatatatatatatatatgataaaggaatttttttttttttttcgtttttcgtttaatttaattttcgtaatcgttggttgtttttttatttttgatttttttgtaaatttttagtagagtagtatttgggggtagattcgttattgagattgatttttttattgtagaagagaacgcgcggtttttggaggtcggatattatagcgggagtaggaatttggtaggcgatgagtagaggtacgagtaagtcgtttagttaaatttggtagttttgaggttaaaaatgattttgtaatatttttgcggaggaagttttttttagacgtttgagaaataaatttagttgggaggaggtgttttgtattttataaaatgaaggttttgcgatcggtttagagttgtgtggtttttagtgggtttttaagtttcggggtattttaggtcggtattatattattaaaaagaagcgtaaattttatttttgaagtttagtcgaaggtaggcgtcggtagggagagttaagaggtcgtttagagagtttgggtcgggagtgggagtgggataaggcgggagttaatttagttggagtagacgttagaagaagtttcgtttagttgaggtgtttcgttttaattttaggttttcggggattttaagaagggagttattcggtgttttttcgagcggtttttatagttttggagattttgttgttgtttaggggtgtagtcgtcggagttttcgggtttgttggggtttagtaggggtagtgggagtttttattttgggagaaattgttagggataaatattgtttgttgacgtaaagtttgtttcgtaaaggagttttttttgtatatgttttgtagtttaaattgatttagaaagggatatataggtttgtaaggcgttttcgggattatatagttttacgtttttttttttttttttgttatttttttatgtttttcgtttttattttgggtagtagattttagtaggcggggaaattcggggattggtgttcgtattgtcgaaaggttggaaagtagagtttcgtttatatttacgatgtttttagaacgtggtttttagaaataatttaagtgtgagtagggcgtcgaggataggataaggcgtttgttttttagttttgttattggttaaggagaattatagtagtagagtcgtattattgttgtcgtcgtttttaatttgcgttaagttcggtttaggttattggattgggtaggattagttaatttaggtttcgaggggtagtgtgttatagattgtagtttattttaatttcggtttttggagaaggggcgtcgaattttttttgggtatgggagggaaagatatttcgagttggttgggcggagtggtagttttgagagtgacgagtgatagtaaagtttcgttttagtaaggttttttattaatagcgcggtatgttttttcgaggagagcgttaggttttcgtattttgtaagttaagagagtaaagaaagcggggatagggcgcgtaatcgtaatgttcggtcgcgcgtgtgtacgtgtttgtgtttgtatgtgtgcgtgagtatgtgtatttgtttaagtgtaaatgtgtttgttggtagttggggtttaagtatttgagaatgtgtgttttttgttgttttaggagattaaaatgtttttttttagtattgagttatattgaggaaataaaattgaaataaattgttaggttttttttaagattagtcggattttatgttaaataaaagttag

SEQ ID NO: 1599 - DNA, 2433 bp, Artificial Sequence
  chemically treated genomic DNA (Homo sapiens)
ttgatttttatttaatatagaattcggttggttttgagagaggtttgatagtttattttagttttgtttttttaatgtagtttaatattgggaaaagatattttaattttttaaagtaatagaagatatatatttttaggtatttagattttaattgttaatagatatatttatatttgagtaggtgtatatgtttacgtatatatgtaaatatagatacgtgtatacgcgcgatcggatattgcgattacgcgttttgttttcgttttttttgtttttttgatttgtaaagtgcgagggtttggcgtttttttcgaaagggtatgtcgcgttgttggtaaaaggttttgttaggacgaggttttgttgttattcgttatttttaaggttgttatttcgtttagttaattcggaatgttttttttttttatgtttaagagagattcgacgttttttttttaggagtcgaggttggagtgggttgtagtttgtgatatattgtttttcgggatttgggttagttggttttgtttaatttagtagtttgagtcgaatttaacgtaagttggaggcggcggtagtagtggtgcggttttattgttatgattttttttagttagtagtaggattagggggtaaacgttttgttttgttttcggcgttttatttatatttgaattatttttaagggttacgttttagaaatatcgtggatgtagacgaggttttgttttttagtttttcggtaatgcggatattagttttcgggttttttcgtttgttggggtttgttgtttagggtgaaggcgaaagatataaagaaatggtagaggaaaagaagagggcgtgaggttgtatgatttcgagagcgttttgtaggtttgtgtatttttttttaaattagtttgagttgtaggatatatatagggagaatttttttgcggaataggttttgcgttagtaaatagtgtttgtttttggtagttttttttagggtaggggtttttattatttttgttgagttttagtaggttcgagggtttcgacgattatatttttgggtagtagtagagtttttaaagttgtaaggatcgttcggagaagtatcgggtagttttttttttggggttttcgagagtttgggattggggcggggtattttagttgaacggaattttttttggcgtttattttagttaagttagttttcgttttgttttatttttattttcggtttaaattttttaggcggttttttagttttttttgtcggcgtttgttttcggttaagttttagaaatgggatttgcgtttttttttaatgatgtaatatcggtttagggtatttcggagtttggagatttattagggattatatagttttaaatcggtcgtaaagtttttattttgtaaaatgtaaaatatttttttttaattgagtttgttttttaggcgtttaaaagaggtttttttcgtaaggatattataaaattatttttgattttaaggttgttaggtttggttgggcggtttgttcgtgtttttgtttatcgtttgttaggtttttattttcgttgtggtgttcggtttttaggaatcgcgcgtttttttttataataaaaggattagttttagtggcggatttatttttaaatgttattttattgaaagtttatagagaagttagagataaaagggtagttaacggttgcggagattgaattaaacgagggacgagggagaggaaaaaatttttttgttatatatatatatatatatatatatatatatatatatggagatagagagagagatagagacggagttttgttgcgtcgttaggttggagtatagtagcgcgatttgggtttattgtaattttcgtttttcgagtttaagcgatttttttgttttagtttttcgagtagttgggattataggcgtgtattattacgtttagttattatttgtatttatttatttatttagtagagacgggggttttattatgttggttaggatggtttcgattttttgatttcgtgattcgttcgcgtaggttttttaaagtgttgggaatataggcgtgagttatcgcgttcggtttgtcgtgtattttatataaaagatggagtaatatgtacgattaattttattttataagagatttgttttatttatattaaatatatatatatatatttgttaattttaataaaaagtcgagttgaaattataaaataaattgtataaatatatatgtttggtgttatttaattaaaaagtattgattttattaaatttgttttaaatatattaatggattttttaaaagtttgaagtaacgattgtaaattgttaatagtaggataaatataaatttatttaaattatagagaagttttttaaatggggaattttattgcgttttta

SEQ ID NO: 1600 - DNA, 2281 bp, Artificial Sequence
  chemically treated genomic DNA (Homo sapiens)
gattattatgtagtaattagaataaataagttgtatatttattgatttggaaagttgttcgtgatattaatataagtgaaaaaataaggttgtagagtaatgtatgtagaataatgttggttttgttttaaaaataatataggtgaatattgtgtatgtgtttatagtttgaatatatttgtatgaatatggaaatagatgtggaagattatttatttaatagtattaattattttaaatatataaaatggggtagaggtgggagatgattattttatatttagtgtttttttacgatgagtagtattggtttagtaatttttttaaagtaggaaaaataaagaaaaaagttgtagggtaggttagggttgaaagtatatttttgtaattattttattgttatattaattagtatttatttatggagtatttattgtttgtaaagatgagaatataagtattggatttaatagtttattagagggttaataatttgattggggagataaaatttttttataggaaaataaaagtatttttatgatgagaatagagttggttaatttatatttattttttgaaatgaatgtagtggaagtggtgtaacgagtataatttagatttggtaatttttttattttgttatatatttgtataaatttaagataaggtttttaatatttgtattattattttttaggttttttatttttgaagttgagaaaggaaatatttggatatgatgtaattagtaatatattaatgggtatgaaaggatttttttttttttttattttagtttttgtgttttatttttattttttaatttttttttagagtttggaatttattggggttatttttttaaaatattttttgaagttaagtttttagttttatagttattagggagatttttgagaattaagttagttttaatagttagtttagaattttggttaaatatgagtttttttatttaatggttaaaatgtaaaattaggtaatttttgtttatggtgttaagttgtaaattatttgtttttagtttttagcgaatgttattgggaagtattaggataaaagtcgttatttaaaaattttaattttagtttttttttggtttgggtttaaagttagaggcgattttttataggtggtatgttagtgttatttgattgttgatatattttgtgtggtggttgagaaaattggagaagaaagagttagggtagttaaaggattgttcgttaattttaagatgtgtaggatgaagaggagaataatgtaagggtaggtattttgaataatttgtgttattgatagtattagtaaaaaataattagttggtttttagttagggagttttttatttagttgttgtgtgtgtattataggtttaaagagcgtttacggtttataatattgattagtttgagttttagtttattttgttatgggttgtagattagatcgtgttttatgggttttttattttagaagaaaggttgaggagaaagaaagttatatttagtttttttgtgttatttgatatatttaatagtaaggaagggagggagggagggagggaagggaagggaaggaaggattttagtattttgggagtttaaagtataagtattgtttgaggttaggagttttagattagttgagttatataatgagattttgattttataaaaaaaaaattttttttttaattagttaggtatggtgatatatgtttttaatattagttatttaggaggttgaagtaggaggatagtttgagtttaggagtttaaagttatagtgattaagttattgtattttagtttgggagatagagtaagattttgtttttaaaaattataatattaataataaaatggaaagagtaaattttgatgttttattgttttgtgggtttgtgttgtttattttttttttatttttagttttgtattttatagtgttggtgatatatggaaaaaaaattaagatatagttttttaggaattgttaaaatttttatttaaatgtgagtgagtaatgaaaaataagatatatgaaatatgagggttgagaaagtgtgttttagggatgggagtgagagtttttcgtattgtgtgggtagattaaagtaagttgttaattaagatttttttaagattatttagtagggggaaggagagaagagggggcgattatttagtgagttgagtataagaggaatatttcgtagttttagagaatgtttagaggtagaagtgcgagtggg

SEQ ID NO: 1601 - DNA, 2281 bp, Artificial Sequence
  chemically treated genomic DNA (Homo sapiens)
tttattcgtatttttatttttaaatattttttaaagttgcgaggtattttttttgtgtttagtttattaagtgatcgtttttttttttttttttttttttgttaaataattttaaggagattttgattggtagtttgttttagtttatttatatagtacgaggagtttttatttttatttttaaaatatatttttttagtttttatattttatgtattttattttttattgtttatttatatttagataggagttttggtaatttttaaaggattgtgttttagttttttttttatatattattaatattgtgaaatataaagttgaggatgaagggaaagtagataatataggtttataaaatagtaaagtattaaaatttgttttttttattttgttattagtattatgatttttagagataaagttttattttgttttttaggttggagtgtagtggtttgattattgtaattttgaatttttgaatttaaattatttttttattttagttttttaagtagttggtattagaggtatgtattattatatttggttaattaaaaaaaaaattttttttttgtagaattagggttttattatatggtttagttggtttgaaatttttggttttaagtaatatttgtgttttggatttttaaagtattgggattttttttttttttttttttttttttttttttttttttttttttgttgttaaatatattaggtgatatagaaggattggatgtaattttttttttttttaattttttttttaaaataggaggtttatgaaatacggtttggtttgtaatttatggtaggatggattgagatttagattgattagtgttataggtcgtgggcgttttttagatttgtgatgtatatatagtagttggatggggaattttttggttgagagttagttggttattttttgttgatgttgttaataatataaattgtttagagtgtttatttttgtattgtttttttttttattttgtatattttaaaattaacgagtagttttttgattattttggtttttttttttttagtttttttaattattatatagaatatgttagtagttagatggtattggtatgttatttatggagaatcgtttttggttttaagtttagattaagagaaaattagaattggaatttttggatgacgatttttgttttgatgttttttaatagtattcgttaaagattagagatagatagtttgtaatttagtattatgagtaaaagttgtttggttttgtattttgattattgagtaaaaggatttatgtttagttaagattttgaattggttgttggggttgatttggtttttagaggtttttttaatgattgtggagttaaaggtttaattttaaagaatgttttggagaaatagttttaatgaattttaagttttgggaaggggttgggggataggggtgggatataggggttggagtggggaagggagggaatttttttatgtttattaatgtattgttaattgtattatatttagatgtttttttttttaattttagaggtagagggtttgagagatggtggtgtagatgttaaaagttttgttttaagtttatataagtatgtagtagagtgaaaagattgttaggtttgagttgtattcgttatattatttttattatatttattttaaaaaatgaatataaattagttagttttgtttttattatgaaaatatttttatttttttgtgaagaggttttatttttttagttaaattattggttttttggtagattgttaagtttaatatttgtgtttttatttttgtaaataataagtgttttatgaataaatgttgattaatataataataaggtggttataaggatatatttttagttttggtttattttataatttttttttttattttttttattttaaaaaaattgttgagttaatattgtttatcgtaaaaaggtattgaatataaaataattattttttatttttgttttattttatatatttaaaataattaatgttgttaggtagatagttttttatatttatttttatgtttatataagtatatttaagttatggatatatatatagtatttatttgtattatttttaaagtaaaattagtattattttatatatattattttgtaattttgtttttttatttatgttgatattacggataattttttaagttagtaaatatgtagtttatttattttaattgttgtataatagtt

SEQ ID NO: 1602 - DNA, 2313 bp, Artificial Sequence
  chemically treated genomic DNA (Homo sapiens)
ttattgggaggagaagggaaggtgttttgttttttagggttggggattataggtaaggttatgggtttgagggtatttttttaaattttagtagataaattatgtttaaattttatattttattgagaaagtaggtgtttgtaattagttatagaagggaggtgggtggtcgtgggtagagaagaaaaaattttttaataaaaaaataaaaattaggtaaaatagaatttgatagttattatgtaaatagaagaaatattacgaaagtgatattattagtatggttgtgggtttgttttattttttggtttttaaagtaggagataatgagagttatttattgatttatttttagtatttgataaaagaaaaaaagttaattaattaggtttattttattgatttattaatgtttttgttattaagggataattttaaaaaggatttttttattaaaagaagagaaattaatttatagatttttttgggttttaatttataattcgtataggataaaattaagtttaaaatagagagtgtatttataaggttgagaagatattttgtggtgatttttttgtataatatgaaataaggttggttggtttttttttgtaaagagtaagatagtaaatattttaggttttttgggttaagaaatataattaaggatattatgtagttatttgtataataagagtaaaattatttttttttataatttttaaaatagattaattttaaaattttatgattagtatagtttgtattttatattgtttttatgtgttatgaaataatatttttattaaatttttttgtaagtatttgaaaatggaaaaagtatttttagtttgtgggttatataaaaataggttgtggtttggatttggttttggggttattatttgttgatttttaatatagaatatttttgagttatgttagggtttttaattagttaggttatttaagtttagattgaattgggatatggttttagaattttttttaatattgtatgtttgttataatgtgggtagggagaggttgttggttttgtagtagttatttgatggttgtttaaaggatcgtgaatttagttattattagtattttttttatttttttagatttgggtgtagttggtttagttttttatttttagtttcgggaaagttttttttttagattttcgtttttttttaataagtttgtatgttgtgttaaggagtaatcgtttttgttgttacgaatttatttgtttttgtgaatttacgtgttttttatttttgttttatttagaatagagaatataattattttaatattttatgtattttttataagtttatagagttttaatggaagtttggagagataatggtagtttatatagtagaagtaatagtatttgtttagtgttattgtttaagttattattatagttaatatttttaggaaatttattttttttgttaggaggtttttatatgttatttaattttgtaataattagtagaaataggttttttttttttaatagttattattttgttttataaaaaagaaatgaagtttaagagattgagtagtttgttaattatagagtaagttaatgatagagatgaattttgaatagttaagttaggtagtgatttatgtttgtaattttagtattttgggaggttaaggtaggcggattatttgaagttaggagtttaagattagtttggttaacgtagtgaaatttcgtatgttttaaaaatataaaaattagtcgggtatggtggtaaacgtttatagttatagttattagttaggttgaggtgggaggatcgtttaaatttgggaggtgtaggttgtagtgagttgagattgttttattttattttagtttgggcggtagagtgagattttattttaaataaataaataaaaattataattaatgatttagaatgtaattaatgatttagagtttatgtatttaaatataatatagttatttttttatagtattttaagtgaatattagattttgttgttgttgttgttgttgttgttgaaagtttttttattatttttttgggaatttttattggtttgattattttataaaatgttttggtttttatttacgtttttggtttttttttttgtttatgttttttttatttttttttttagattgtttttatgaatttttaatattttgatttaattttttagagtaatttagtttttgttagtttatgtttttaaattgagttttagtagaagttttttgagggatataatgttattttatag

SEQ ID NO: 1603 - DNA, 2313 bp, Artificial Sequence
  chemically treated genomic DNA (Homo sapiens)
ttgtaaaatgatattatgttttttagaaggtttttgttagagtttagtttgggaatatgagttagtaagagttaaattattttaaagaattggattaaggtattaagagtttatgaaaataatttgggagaagaggtgagaaagatatgggtaaggagaggagttaggagcgtgggtagaagttaggatattttatgaggtggttaggttagtgagaatttttagggaggtgatagaagaatttttaataataataataataataataataaagtttgatgtttatttaaagtgttgtagagggataattgtgttgtgtttaggtgtatgggttttgggttattgattgtattttgggttattgattgtggtttttgtttgtttgtttgagatggaattttattttatcgtttaggttagagtgagatgaagtaattttagtttattgtaatttatattttttaggtttgagcgatttttttattttagtttagttagtagttatgattataggcgtttgttattatgttcgattaatttttgtatttttaagatatacggagttttattacgttaattaggttggttttgaatttttgattttaaatgattcgtttgttttggttttttaaagtgttgggattataggtataagttattgtttgatttgattgtttaaaatttatttttattattaatttgttttgtgattagtaagttgtttaattttttaagttttattttttttttgtaaaataggataataattgttaaaaagaaaaagtttatttttattgattattgtaggattaaataatatgtgaaaattttttggtaaaagaaataaattttttggaagtgttagttatgatgatgatttaaataatgatattgagtagatgttgttatttttgttgtgtaaattgttattgtttttttaaatttttattaaaattttgtaggtttataaaaaatatataaaatattaaaataattgtattttttgttttggatgaggtaaggatgaagggtacgtgaatttataagggtaagtgaattcgtagtagtagaagcgattgttttttggtataatatgtaagtttgttgaggaggagcggaaatttgggagagagattttttcgaggttggggatggaggattgagttaattgtatttagatttgaaagagtagggaaaatgttggtgataattgagtttacggttttttaagtagttattaggtggttattgtagagttaatagtttttttttatttatattatggtaggtatgtagtgttgagaaggattttgaaattatgttttagtttaatttgagtttggatgatttaattgattaaggattttgatatgatttagaagtgttttatgttgggggttagtaaatgatggttttagggttaaatttaggttataatttgtttttatgtgatttataagttaagaatgttttttttatttttaaatgtttgtaggaaaatttaatgagaatattattttatgatatatgaaaataatataaaatgtaaattgtattggttataaaattttgaaattgatttattttaaaagttgtggggaaaaatggttttgtttttgttatataagtaattatataatatttttgattgtattttttggtttagaaagtttgaaatatttattattttgttttttatagagaaaggttaattaattttgttttatgttatgtaaaggagttattataagatgtttttttaattttatgggtgtattttttattttaaatttgattttattttatacgaattgtgggttggagtttaaagaggtttatgaattgatttttttttttttgatagaaaaattttttttaaaattattttttagtgataaggatattagtaagttaataaggtaagtttgattgattgatttttttttttttattaaatattaaaaatgagttagtaagtagtttttattgttttttgttttagagattaaaggataagataggtttatagttatgttaatgatgttattttcgtagtgttttttttgtttgtatggtgattgttaagttttattttgtttaatttttatttttttattaaaaaatttttttttttttgtttacgattatttattttttttttgtgattaattgtagatatttgtttttttagtaagatgtgggatttgggtataatttatttgttagagtttggagaagtgtttttaagtttatggttttgtttgtggtttttagttttgggaagtaggatatttttttttttttttttagtgg

SEQ ID NO: 1604 - DNA, 2339 bp, Artificial Sequence
  chemically treated genomic DNA (Homo sapiens)
tcgttatttttttttttatttattttaagagttattattgggtagtggtaatttatttatggggttgttgtttagattaaatgagttaatatagataaagaataatgattggtatatgggaagtgttaagtaaagattagttattatggtttatttattttttttgaaaaaattttatttaaagatatatattggttaggcgtggtggtttatatttgtaattttagtattttgggaggtcgaggtagaaggattttttgaggttaggagttttagataagtttggttaattaatatggtgaaaatttatttttattaaaaatgtaaaaattagttgggtatgttggtgtatgtttgtagttttagttatttaagaggttgaggtaggagaattatttgaatttaggaagtggaggttatagtgagttgagattgcgttattgtattttagtttgggtgatagaatgagattgttttaaaaataaataaataagtaagatagatattattatttagtttatagagatgtaattaaattaaagaattttagaagggtaattatatatatatataaatataaatattttttaaatgaaaaattaaataataaaattagaaaaatatagttaagtatattttaatgtagttatataatttaattaaaatataagttaattattgaaatagaagatttataatatatattagagaattatttaagtttaaaattttaaattatttgataatttggaagtatataaaatggtgggataagagaaattaaaaagtttttaagttttttattttatatttttgataattagaaataaataggtttaaatataaattttagaaaaataagatgtattttatttataaagaaagagatgtatttttaataattatagtatttgttttttataaatgagataaattaatatatagtttttttttaatatagatgttttttagatgtttaatagtggtttaattttttttatttttatagtgtttttaaagtttgttggtatataaatatgaatgaatgaataatgtagaatttatttaagaaattttaaggagagagaggaggagatttatattatatagtaaataatttaataaatttgttaaacgttatgtatgtgaataggcgtttttttttttttgattttttttttttatatagaatttagtgtttttttttcgtttttcgttatagtatttatcgtttttttttttttacgtcggggagtagtcgaggtttgtgttttttagcggatttgttaaattattttttttagtatgttgtttttttttttttatagattatttgttaagaaaatatattttttatgtcgttaatttatatatatatgtgtattatatatatgtttatataatgagagattgttaggaaaattattattatatatatatgtattatatatattatatatatatatatatgtattatatatatatttgtatatatatgtatatggaaaattgttaggaaaaatagtatagtggtagtgttagtgttggttgtttttcggtggtgagattatatatttttttttataattttttgtatttttttaattttttgtgatttatatatgtttttaattattaaaagatgttgaaatttaaattatgttttacgtatattttatatttttatttaaagtttttttatggttttttatggtttgtaggatgatgtttgatgtttagtttaagagttttttttttttattttttatttttttgttatttgtagtttatgttttaataatattagagtgttttttgtgtatatttagttgatttacgtttttttgtttttgtttatatgtttatttttatttggaagataatttttttttttttggcgatttttatattatttttttttttttagagtaggtatagttgtttaggaaatatttttggttgagttttttatgggttttaattgtattttattttgaagatgaaatgatttgtgtttttgtttatttttttttttggacggtaagtttttaaagggtagaagttatattttattatttttatattatagtttttagaaggttttgttaatatgatataagttgtaaaaatcgaattaaatttaagtgatattagaagtaaaagatttttggtttatagcgaatatataaagtggataaagaagttttttttttattttatgtatgtttataatattattttgattaaatatttaaattgggattgttaagtattaagatttaaaaatatttgttttttgagagataaaatagatattattagttgaaaataatgttttt

SEQ ID NO: 1605 - DNA, 2339 bp, Artificial Sequence
  chemically treated genomic DNA (Homo sapiens)
ggggatattatttttaattagtagtatttgttttgttttttaaaagatagatatttttaggttttggtgtttggtagttttaatttgaatatttagttaaagtagtgttgtgaatatgtatagaatagagagaaagtttttttatttattttatatattcgttgtggattagaggttttttatttttagtgttatttgagtttagttcgatttttgtagtttgtattatgttggtagaattttttagaagttatgatatgaagatagtaaaatgtggtttttgttttttgggaatttatcgtttagaaaggagggtagatagaagtatagattattttatttttagggtaaaatgtagttagggtttatggaaggtttaattagaaatgttttttgggtagttgtgtttgttttgaggagagaagggtggtgtgaaggtcgttaggggaagggaaattattttttaggtggaggtagatatgtgagtaaagataaagagacgtgaattagttgggtgtgtataggaaatattttggtattattagggtatgagttataagtgatagaggggtgggaagtgaggagaggaagtttttaagttgaatattaagtattattttgtaggttatggagaattatgagaaagttttaaatggggatgtaaaatgtacgtagaatatggtttaaattttaatattttttgatgattaaaaatatatatggattatagaaaattaggaaaatatagaaaattatagaaaaaaatgtataattttattatcgaaagataattagtattaatattattattgtgttgttttttttaataattttttatatgtatgtgtgtgtaggtatatatataatgtatatgtatgtatatgtaatatatataatgtatgtatatgtggtagtgatttttttaataattttttattgtataaatatatatataatgtatatgtatatgtaaattaacgatatgaaaaatgtatttttttaatagatgatttgtggaagggagagagtagtatgttggaggggatgatttggtaagttcgttgaagaatataagtttcgattgtttttcggcgtggaagaaggaaggcgataaatattgtaacggaggacgaggaaggagtattgagttttatgtggaaagaaagggttaaaaagaggaaaacgtttatttatatgtatggcgtttaatagatttattaggttgtttgttgtgtgatgtaaatttttttttttttttttttgaaattttttgagtgaattttatattgtttatttatttatgtttatgtgttagtaagttttgggagtattgtaaaaataaaaaaggttagattattgttagatatttgggaaatatttatgttagagaaggattatatattaatttattttatttatgggaggtaaatattatgattattgaaggtatatttttttttttatggatggagtatattttatttttttaaaatttgtatttgaatttatttatttttaattgttaaaaatgtgaagtgagaaatttaaaaattttttagttttttttgttttattattttatgtatttttaggttgttaaataatttggaattttagatttagataattttttaatgtatattatagattttttattttaataattagtttatattttaattaaattgtataattgtattaaaatatatttaattatgtttttttagttttattatttggttttttatttaggaaatatttatgtttgtgtgtatatatagttgtttttttagaattttttagtttgattgtatttttatagattagataatggtatttgttttatttatttatttatttttaagatagttttattttgttatttaggttggagtgtagtggcgtaattttagtttattatgatttttattttttgggtttaagtgatttttttgttttagttttttgagtagttgggattataggtatgtattagtatgtttagttaatttttgtatttttagtagagatgggtttttattatgttggttggttaggtttgtttggaatttttgattttaggggatttttttgtttcggttttttaaagtgttggaattataggtgtgagttattacgtttggttagtatatgtttttgggtaaaatttttttagaaagagtgaataaattatgataattgatttttatttagtattttttatgtgttagttattattttttatttgtattaatttatttaatttagataataattttatgagtaagttattattatttagtagtggtttttgggatgggtggaaggaaggatgacga

SEQ ID NO: 1606 - DNA, 2463 bp, Artificial Sequence
  chemically treated genomic DNA (Homo sapiens)
gatttttttgcgagggggcgtatttataagagggattggatggagcggttggttcgtagagttttagttagttgtttgatgcggttggggttggatacgacgtttaggttaaggttgagttgcgttagggacgtggtttcggttagggttcggtagatgcggttaaagtcgcggtcgtagaggcggtagtcgcgtagtgagagtaggcgtacggcgttgtcgcgaaggtcgcggtagatgtttcgtatttcggcgtcggatagcggttttttcgaaatttggatggagttgggtagtatcgtgtttacggttgggttttcgggtacggggtcggaacggaggttggtggggtcgcgggcggggtcggggatagggtcggggtcggggtttcggtaggggtcgcgggcggagtggggtcgggggtggaggcggcggttgtggcggaggttgcggttgcggcggaggttgcggcgggggcggagaagagttatcgggattgagtcggagtcggttagaggtgcggaggcgtttagggcgcgggtcgggttgaagtggggcggcgttggggcgggggcggttcgtacggttcgtgtttgggcgttggggcgggtgcgcgtttcgggggttgggtaggcgttgttcggcgtttgtttttgtttttcgcggtcgcggcggcggcggcggtagcggtagcgagcggtttaagggtttcggtttatcggtttcggttaggaggtcgtattcgttttttttttttttgtcgttcggtttttttcgattatttcgcgggtttggtcgtacggttggtagagagagtttgaggcgggcggttggcggtagtttcggttttagttttagagagcgagcgggcggcgagtttttatggtaacggtcgcgttatcggcgttcgtttcgttttttgttcggttaaggttacgtcggttcgcgaggttcgcgtatattgggtggttcggggtaaggagttgggagcgataggtcgttttttttttgggagtggggttagttaattggtaggcggtaggcggtagggttgagtgggtagggttgacggggagcggaatggaggtacgtttcgtggagatggcgttgggtacggttattgttgtttttgtttatttttttattttttttcgtttttaaggtttatattttcgtcggaatttagggtattgtttttttttatttggaaggttttagggtttttttattcgcgtcgcgtttcgttttcgttttcgtgattcgaggcgtagcgtgcgtggtgatttcggtttatggggattttttcgtttgtttttcgttaagatggcggttttattagggaggttttaggggttacggttgggtagagttagtttgagttgttggggagaagggtattttatagggtttttagggtaggggagttttagatagatgtaaggttttggtgttatatttttttaggtacgtagggtattgttgatatttgagggtgtgttcgtgtcgcgagattggggtagttaatataaagaaggtgttagggttagggttttggagtattggtgaggacgtgaaggcggttgagttatattgtacggtgtaggcggtgttgttttaattttgttttttggttagggtggtgggggatttatttgtgtaacgtaggataaatgaagggtatttttgtttgtttttttgttaggagggatagatgttgttgatttagatttattagtgttaagatgattattttatataaaatataatatttaatatagtgaagggaggttaaaggttttatttttatttttagttatttgaattaatttattaagtggagtatattaaagaggtggtgggggtggatggtgttatgttaggagtggtggttggttttaagaggaaagatagaaaaattaaaaggagttggttttagtattattaaggtaaagttaaatttggttttaattaagagttttataggaaaattattaatataatgtttaggtgtagaagatttttgttttgatacggggtttaagtcgggatgttttgtttaattgttattgtttttttggttttttaagagagtagttgagtttagatttaagttggttgtagtgttttattaggtttatggtttttgtgtttgaggtttttttgtcgttttatgggttaggtgtgatatttaattattgttttttatgtagtttggtttgttttatttttattttgtttgggtgaggatatgaagaagggaatatatgatattattattgttgattgagtaggaaagtatataggaagcgggatgatagggaggattattggattagtcgttgtagttttagattttaattaatattttaattattaagtttatatttagtaagataatgtgggagagataaagaggaaggaaggggtaggtggggaggggtttttaaaggagttgatttattt

SEQ ID NO: 1607 - DNA, 2463 bp, Artificial Sequence
  chemically treated genomic DNA (Homo sapiens)
aaatgggttagtttttttgagaatttttttttatttatttttttttttttttttattttttttatattgttttgttaaatatagatttggtaattaaaatgttgattgaagtttggaattgtagcggttgatttagtggttttttttgttatttcgttttttatatatttttttatttagttaatagtggtaatgttatatgtttttttttttatatttttatttaggtaagataaaggtgggataggttagattatatagaaggtagtgattgaatattatatttgatttatgaagcggtagggaggttttaagtataaaagttataagtttgatggaatattgtagttagtttgagtttgggtttagttgtttttttgggaagttaaggaagtagtgataattgaataaaatatttcgatttaaatttcgtgttaaaataaggattttttgtatttgggtattgtgttgataatttttttgtggagtttttaattgaagttaaatttggttttgttttggtggtattggggttagttttttttagtttttttgtttttttttttaaaattaattattatttttaatatagtattatttatttttattatttttttaatatgttttatttaataagttaatttaggtggttaagagtgggaatagggtttttgatttttttttattatattgaatattatattttatgtaaaataattattttaatattagtaaatttgggttagtagtatttattttttttaataaagggataaatagaggtgttttttatttgttttgcgttatataagtgagttttttattattttggttagaggataaagttgagatagtatcgtttgtatcgtgtagtgtggtttagtcgtttttacgtttttattagtgttttagggttttggttttggtattttttttgtattggttgttttagtttcgcggtacggatatatttttagatgttaatagtgttttgcgtatttgagaaggtgtggtattaggattttgtatttatttgaggtttttttgttttagggattttatggggtatttttttttttagtagtttaagttggttttgtttagtcgtggtttttggggtttttttgatgaggtcgttattttggcgaggagtaagcggggaagtttttatgggtcgggattattacgtacgttgcgtttcgagttacgggggcgggagcgaggcgcggcgcggatgaaagggttttggggttttttaaataggagggaatagtgttttggatttcggcgggggtatggattttaggaacggggaaggatggaagaatgggtagaagtagtagtaatcgtgtttaacgttatttttacggggcgtgtttttatttcgtttttcgttagttttatttatttagttttgtcgtttgtcgtttgttagttggttgattttatttttaagggaagagcggtttatcgtttttagttttttgtttcgaattatttagtgtacgcgaatttcgcgggtcggcgtggttttggtcgggtagggggcggggcgagcgtcggtgacgcggtcgttgttatgggaattcgtcgttcgttcgttttttggagttggagtcggagttgtcgttagtcgttcgttttaggttttttttgttagtcgtgcggttaggttcgcggggtggtcggggggagtcgggcggtagagaaggagggagcgggtacggttttttagtcgagatcggtaagtcgaagtttttgagtcgttcgttgtcgttgtcgtcgtcgtcgtcgcgatcgcgagggataaggataagcgtcgagtagcgtttgtttaattttcggaacgcgtattcgttttaacgtttagatacggatcgtgcgggtcgttttcgttttagcgtcgttttattttagttcggttcgcgttttggacgttttcgtatttttggtcggtttcggtttagtttcggtagttttttttcgttttcgtcgtagttttcgtcgtagtcgtagttttcgttatagtcgtcgtttttattttcggttttatttcgttcgcgatttttgtcggggtttcgatttcggttttattttcggtttcgttcgcggttttattaattttcgtttcggtttcgtattcggaggtttagtcgtgggtacgatgttgtttagttttatttagatttcgggggagtcgttgttcggcgtcgaggtgcgggatatttgtcgcggttttcgcgataacgtcgtgcgtttgtttttattgcgcggttgtcgtttttgcgatcgcgattttggtcgtatttgtcgggttttggtcggggttacgtttttggcgtagtttaattttaatttgggcgtcgtgtttagttttagtcgtattaagtagttggttgaggttttgcggattaatcgttttatttagttttttttgtgagtgcgttttttcgtaagggggtt

SEQ ID NO: 1608 - DNA, 2458 bp, Artificial Sequence
  chemically treated genomic DNA (Homo sapiens)
atatgaaattgttgtttaataggtgaagacgtttatgattttgtgttatttttggtttttaggtttagtttttttttatcgtagagagaaagagagaaattttatatatatatatatatatttatatatatttttttttatatatttagatttagtatttttgtataaaggtttatttttttttttttatttttatagtttttttttttttttttatttttttatggtttttagcgttttattttttttatttagaattttttaaaggaagaatgggggcgttggtggttttgggatgggtaattgaggtttggtttagggtttgtttttttatgatagataaaattattgaagtgattttatcgttgtttttaattagaggggagttttaaaagaagttacgggatttggggttttcggagtcgtatttggttaggagggaggtgagggtgaggagattggtttcgggttatatttttttagagacggtgttagttttatttcgcggttatgagatcgaattgttttgggtttaggtttgggacgtttgggttaggtttagttattttttcgggttgttgtcgtcgggatttggagacgaataaagaattagttttaaatcgttttttttgatatgttaggtaaatatgtgtaaaaggttagttttacgttgtggagtagagatttgttttttaggtattaaaattttttttttttaatcgtgttcgagagttttcgatttttgggttttgtttaggcggttttgtatttttcggtttttttaggggtggggtggaggtgtttttttttggagtttttttatcggtttcgtattttatttatttttgggttataggatttttattttaatgtttattttttagttgatttaaaattttttgggatttgttttagaattttggttaaggttgggggtttttgtgggtagtttttttggtttgttttgttttgttgagaatttaaataaattagatgaagtttttaatttttaagtgtattttttttggttttttttagacggtggaaatagggcggtgattaattttttagagtggaagatacgtacgaagggcgtatttgtagtttttcgggatttaggcgggggtcgttgtgtttttttaaaagtgagcggcggttttagtttgttatcgtttcgtttcgttagttcggaggaaattttggttggaggcgatttcgggtttagtcggacgggtcgggtcgagtttaggaggggttggtagacgtgttttagggttagggtggggcgtagggagcgtcgtttttatttttagtatttttggggtgggggatttgagcgtgcggagagcgggaggtagagttgagagcggggttaagcgcgaagttaaggcgtcgtatagggttgggtgggaatggatagggtgagttggaagcgaagtattttagttaggttttaggagagaggatcgtcggtatttgtgtatattttagcgggcggatgatgtgggagagaggcggagggaggtgaaatgcgggagttagaatttagttttgtagtgaggttatttggggtttgtatttagtttcgatatatatatgtaggggttgtgtgattttggggaagttatcgattttgtttgaatttttgttttttggtttgtaaagtggttaattggtgggaatttaataggagaatgtgcgtaaaacgtttagtatagcgtttggttaataatgcgtttttaagaaaggttgttgagttttgtttaggacggtttatatcgttttacgtttaagatgagtttatagcgtttaagatttgtttaatttaagatgatgtaaattgtattgttttttttagatacgtagtagttaggagttggttatttgtatttttcgcgattttttttttagaattttagttttgttagatttgcgtttttttttggttttttaaatatttgttgtatcgtttagagtttttttttatttcgatttttttcgtagtttcgtattagcgagattgcgtttcgtggtatttcgggggtgttacgattggcgggggatgggggatgttttttagttttattcgtttttcgggttttagataattatttcggagagttagttgtttttagtgcgggtaggtttaaggttattaattgtatttggcgatttattttcgtttttaagaggtttcggaaagtgcggtttcgggttttttttgaaatagagattcgcggtatttcgtttttttttttgggataggagagggagagtcgcgggagtttcgtagttatttttggcgttgttattacgaagtaggtttattagttaatagggtttgggatattgagtcgtgtcgtaaatttttttgtgttttatttaatgagggaagtttgagttgcggtgaggggcgggatgatttggtgttgggttgagcggagtttttagttttagg

SEQ ID NO: 1609 - DNA, 2458 bp, Artificial Sequence
  chemically treated genomic DNA (Homo sapiens)
tttgaagttgggagtttcgtttaatttaatattaggttatttcgttttttatcgtagtttaggttttttttattgagtggggtatagaaaagtttgcgatacggtttagtgttttaggttttgttagttagtgaatttgtttcgtggtggtagcgttaggagtggttgcggaattttcgcggtttttttttttttattttagggggagaagcggggtgtcgcgggtttttgttttaaaagagattcgaggtcgtatttttcgaggttttttgggaacggaggtgggtcgttaagtgtagttagtggttttgggtttgttcgtattgagagtagttggtttttcggaatggttgtttggaattcggagagcggatgaagttgggaggtattttttatttttcgttaatcgtggtattttcgaggtgttacggggcgtagtttcgttggtgcggagttgcggaggaggtcggggtggggaaaggttttgagcggtgtagtaggtgtttgaggagttagggaaggacgtaaatttggtaggattggggttttgaggaggaaatcgcgggaggtgtagatgattagtttttggttgttgcgtgtttaagaagggtaatgtagtttatattattttaaattgaataggttttgggcgttgtgaatttattttggacgtggggcggtgtagatcgttttggataaggtttagtagttttttttgagagcgtattgttggttaggcgttgtgttaagcgttttgcgtatatttttttattgaatttttattaattagttattttataaattaggaaataggagtttagataaggtcggtaatttttttaggattatatagtttttatatgtatatatcggagttgaatgtagattttaagtgattttattgtaaagttaaattttagttttcgtattttattttttttcgttttttttttatattattcgttcgttaggatgtgtatagatgtcgacggtttttttttttaaggtttggttggggtgtttcgtttttagtttattttgtttatttttatttaattttatgcggcgttttagtttcgcgtttaatttcgtttttagttttgtttttcgtttttcgtacgtttaggttttttattttaaaagtattgagggtggagacggcgttttttacgttttattttggttttgggatacgtttgttagttttttttaggttcggttcggttcgttcggttgggttcgaggtcgtttttagttagagtttttttcgagttggcgaggcgaagcggtggtaggttgaaatcgtcgtttatttttaagagagtatagcgattttcgtttgaatttcggagagttgtaggtgcgtttttcgtgcgtgttttttattttgaaaagttagttatcgttttatttttatcgtttggaaaaagttagggaagatgtatttaggagttaaaaattttatttaatttatttaaatttttagtaaaataaaataaattaaaaaaattatttatagaaatttttagttttgattaagattttaaggtaggttttagaaagttttaaattaattaaaggatgggtattgggatgaaagttttgtagtttagggatgaataaaatgcggaatcgataaggggattttagggagaggtatttttattttatttttgggaaggtcgagaggtgtaaagtcgtttggatagggtttaggggtcggaggttttcgggtacggttagaaaggggaggttttggtgtttgggggataggtttttgttttatagcgtggagttgattttttatatatatttgtttgatatgttagagaagacgatttaaaattggttttttgttcgtttttaagtttcggcgatagtagttcgggagggtaattgggtttggtttaggcgttttaggtttagatttaggataattcgattttatagtcgcggaatgggattggtatcgtttttgggagagtgtggttcgaggttaatttttttatttttattttttttttggttaggtgcggtttcgggagttttaaatttcgtggttttttttaaagtttttttttaattagaagtagcggtgaaattattttagtgattttatttgttatgggaaagtaaattttaaattaaattttagttgtttattttagagttattaacgtttttattttttttttaaaaagttttaaatggaaaagataaagcgttggaagttatagaggagtgggagaggggaagggaattgtgaaagtaggaagaagggggtggatttttgtatagaagtgttaagtttgagtgtgtaagagagagtgtgtgtgagtgtgtgtatgtatgtgtagagtttttttttttttttttacgatgggaggagattaaatttagaagttagaagtgatatagaattatgaacgtttttatttattgagtaatagttttatgt

SEQ ID NO: 1610 - DNA, 2656 bp, Artificial Sequence
  chemically treated genomic DNA (Homo sapiens)
attatattgaatttaattttttttttaattattaaggattttagatttatcgttaattttttttttgtatttatttttattgtttagttttgggttaaaagatagcggggtttgaacgaagtgtttataaagtatagtatttggagaagttttgttgttgttttttaaaataatttttttaaaaagggatttcggatattttttttgtttttttaaaaaattttttttttatgtacgagaaatatagggaaaaaaagtaattaggttaatgaattattttggtttattggattttaattggtagagaatttaaatttaaaaattaaataaaacgaaagagttttttagttattttatgtcgtaaacgagttaaaagttttgttatttttgaaaaattaaagagtattatttgtatatggttataattgtaaaggaaataacggcgtatttaggatagggggagtttattttaagaagttgcgtttttttggattatgttttttcggggttgattttttcggggagtttggtttttaaagcgcggatttcgcgacgcgcggtttgtaggattgcggggttcggcggtcgagacgcggtatttataggggttttttcgcgcggtcgcggcggtggtggcgggaatttgggattggtcggcgaggggtttcgtatggtaatcgttttcgatcgtaagttataggttgtgggtatcgcgtagagcgtattttttatcgaattttttttattttattttaattttcgagatcgaaagtgcggagcgcggagttttgtaaatttgatttcgagttaaggtgcgcgaggcgacggcgagtgtttttcgggttttttgtagtttcggggttggaagtttcggttttcgcgtatttcgttttttgttcgttcgaaagcgaaatttggtcggcgggtaggaggggagagttcggtttcgagttttgtttggcggggtttcggtttggaggtattttcgattcgtatttggcggcgcgatttatttatttgttcgtttttaaggcgtcgttaggagtaatagtagtagcggcggtagcggtagcggtcgtagggtcgggcggtcgggagttcgtatgggcggcggggttgggttatatgtcggggggtagtagattgtttagttttacgttcgttggggttaagcgcggtcgcgcggttttagtttcgcgtttggggttttgcgtgttacgttttaggcgatttgagttttagggcgttttcgttatagtcgcgttttttaggtttttttagaaattaagggcgagcgattcgcggagtttttacgcgcgttttttcggttatttagttggatggtagcgcgagggtagttttcgcggatttatagtttttagttattcggttgttagttttgagagtttgagagtttttatttttcggggtttatgtttagattaattaggttattaggtaggtaaaatttttttttggtaatgagcgaggcgagtgtattgtaaagagattttggtatttaggtcggtttgatggttagttaaagtttaatatcggaagacggatgaaatagagcgttatttttcgatatatagttaggtatttagtcgtagattttatagttatgtattatttaagatgataggattattttttgagaaatgttttaggcgagttttttgtgtgaatattttagagtgtatttatatttatatggtatagttttttatacgtttacgttatatggtataggttgttgtttgtttttaggttataaatttgtacggtaagtgattatattgaatattgtaagtaattgtaatataatggtaaatatttgtgtatttaaatatgtttgaacgtagaaaaggtatagtaaaagtatagtatgaaagattttaaaaatggtatatttgtatagggtattttttatgaatggagtttgtaggattggaagtcgttttggttgagtttgtgagtggtgagttaatgtgaaggtttaggatattattgtgtattattataggttgtataaatattgtattatatttaggttatgttaaatttattaaaaaattatttttttaataataataaattaattttagtttattatgattttttattttttatttttaaattttttaaattttatttatttatttatttttgagatggagtattgttttgtagtttaggttggagtgtagtggtgcgatttcggtttattgtaatttttgtttttcggttttgatgattgttttgttttattttttagagtagttgggattatatgtgtgtgtttttacgttcggttaatttgtttgtatttttagtatagattgggtttcgttatgttggttaggtcggtttcgagtttttgattttcggtgatttattttttttggttttttaaagtgttgggattataggcgtgaattacgatattcgatttaaattttttgatttgtaataacgtttgatttaaaatataaatatattgtgtagtagtatgaaaatattttttttttgtattttttttataagttttttttatttttaaatttttttttttttttattttttttttattttttaaatttttttgttataaattaaggtataattatatatattagtttaggtttgtataggg

SEQ ID NO: 1611 - DNA, 2656 bp, Artificial Sequence
  chemically treated genomic DNA (Homo sapiens)
ttttgtgtaggtttaggttaatgtgtgtggttgtgttttagtttataataaaaaagtttaaaaagtaaagaaaaaataaagaaaaagaaaaatttaaaaatagaaaaagtttatagaaagaatataaagaaaaaatatttttatattgttgtataatgtgtttgtgttttaagttaaacgttattataagttaaaaagtttaggtcgggtgtcgtggtttacgtttgtaattttagtattttgggaggttaaggagggtagattatcggaggttaggagttcgagatcggtttggttaatatggcgaaatttagtttgtattaaaaatataaataaattagtcgggcgtgggggtatatatatgtaattttagttattttggagggtgagataggataattattaaaatcggaaggtagaggttgtagtgagtcgagatcgtattattgtattttagtttgggttatagagtaatgttttattttaaaaataaataaataaataaagtttaaaagatttaaaagtagaaagtaaaaaattatagtaagttaaggttaatttattattattgaagaaataattttttaataaatttagtatagtttaagtgtaatatagtgtttatatagtttatagtagtatatagtgatgttttaggtttttatattgatttattatttatagatttagttagagcgatttttagttttgtaagttttatttatggaaagtgttttatataggtgtattatttttaaaattttttatattgtatttttgttgtattttttttacgtttagatatgtttagatatataaatatttattattgtgttataattgtttgtagtatttagtatggttatttgtcgtataggtttgtagtttaggagtaaataatagtttgtattatatagcgtaggcgtgtaagaggttatattatataggtgtgagtatattttaagatgtttatataagaaattcgtttaagatattttttaggaggtaattttgttattttaaatgatgtatgattgtaagatttacggttgagtgtttaattgtatatcgagaaataacgttttattttattcgtttttcgatattgaattttaattgattattagatcggtttgaatattagaatttttttgtaatgtattcgtttcgtttattattagaaggaggttttatttgtttagtgatttggttggtttgggtatgaatttcgagaggtggaaatttttagatttttaggattgatagtcgagtggttggggattataaattcgcgagaattgttttcgcgttgttatttagttgggtagtcgggggagcgcgcgtgggggtttcgcgagtcgttcgtttttggtttttggggaagtttgggggacgcggttgtggcggaggcgttttgggatttaggtcgtttggagcgtggtacgtagagttttaggcgcggagttgaggtcgcgcggtcgcgtttggttttagcgggcgtgggattgagtagtttgttgtttttcgatatgtgatttagtttcgtcgtttatgcgggttttcggtcgttcggttttgcggtcgttgtcgttgtcgtcgttgttgttgttgtttttggcggcgttttggggacgggtaggtaggtgggtcgcgtcgttaggtgcgggtcggggatgtttttaggtcggggtttcgttaggtagagttcgaggtcgagttttttttttttgttcgtcggttaggtttcgttttcgggcgggtagaggacgaggtgcgcggaggtcggagtttttagtttcggggttgtagggagttcgggggatattcgtcgtcgtttcgcgtattttggttcggggttaagtttgtaggatttcgcgtttcgtattttcggtttcgagaattgaggtggggtggggggagttcggtggggggtgcgttttgcgcggtgtttatagtttatgatttgcggtcggggacggttattatgcggggtttttcgtcggttagttttaggttttcgttattatcgtcgcggtcgcgcggaggggtttttgtggatgtcgcgtttcggtcgtcgggtttcgtagttttgtaagtcgcgcgtcgcgagattcgcgttttaaaagttaaatttttcgaaagggttagtttcgaaggaatatgatttagaaagacgtagttttttaaagtaagttttttttgttttgggtacgtcgttgttttttttgtagttatgattatgtatagatagtgttttttgattttttagaaataataaaatttttaattcgtttacgatataaggtaattgaagagttttttcgttttgtttggtttttaagtttaaattttttattaattggaatttagtaaattagaatgatttattaatttgattgttttttttttttgtatttttcgtatatgagaaaaagattttttaaaaaaataaaaaagatattcgggatttttttttaaaaaaattattttaaaaaataataataaagtttttttaaatattgtgttttgtagatatttcgtttaggtttcgttgttttttaatttagaattgaatagtaagagtgaatgtaggaagaaagttgacggtgaatttggagtttttggtagttaaagaaaaagttaaatttaatatagt

SEQ ID NO: 1612 - DNA, 2242 bp, Artificial Sequence
  chemically treated genomic DNA (Homo sapiens)
ttatatatattatatattttatatattatatatattatatattatatatttttatatattatatattttatatattatatattatatatattatatattttatatatattatatattttatatattttatatattttatatatattttatatattttatatattatatatattttatatattatatattttatatattttatatattttatatattatatataatatatattttatattttatatatattatatattttatattttttatatatattatatattttatatttttatatatattatatattatatatattttatgtatattatatattatatatattttatatattatatattatatatattttatatattatatattatatatatttatatatattatatagtatatatatttatatatattatataatatatattttatatataatatattatatatattttatatattatatatattttatatatattttttatatattttatatatattatatatttttatatatatattttatatatattatatatatttagagagagaaagagagaattcgggtatcgtgatttatgtttgtaattttagtattttgggaaattgaggtaggaggtttatttgagttcgggagtttgagattaatttgagtagtatagtaagattttatttcggaaggagggagggaaggaaggaagggaaaaataatatttaagtgaatgaatgaatgaatgagaaatagagcgaagattcgcgtgtttaggatttttaatttttttttcgatgattagcgtcgtttggcggcgaagttcgggtgcgtattacgtgaagatagtaggtagcgcgtaagcggggttttggttggggaggcgggtttaggaggtgtttttcgtcgtagtatttatcgatattcgcgtgttggagaggggaggggagttcgggcgtcggtcgcgcgggggcggggcggtgcggttcgggtggtatagtggtgaattttgcggcggttgcgcgtcgtttacgttgtttttttagttgttgttatttttgcgggttttttttatttaaggggaacggagttgttatttttcgttgtttttatagtaatcgtagtttcgcgcggggagcgagttagtgaattaggtttggtttgcgtttggttttttgggatatgttggttgcgtggggtagaggcggaagaataggggtttggaggaagagggagaaataggtgatatgattatgcgtttatttattatgcgtttatttagtaaatggacgtttgttgtgtgtaaggttttgtgttagttggggttacggcggtgaaaaggaaaatttataaaattttgagtgtttattttgtgttaagttttacgttagggaaaggatttttttattgtcgtaagaaggttaaatgtttgattggttgtttaagagtttatatttgtgttatttgtgtagattgttagttttgtttgaggaataatagggagaggagttgtgagaatagtaatagttttagtaaagagtcgttttgtttagtttagtttgggatatatatattgtggtattaggaaaatgtttaaagagttgaaattttgtagtttatttttgttagtgttttttttattttttttaagatttttttattatgtgttatgtttaaattattgggtgtttttaatttattatgtacgaataaaaagaattgttattaattgaatattataattatggattaggtattatgtaaggtattttatgtagattatttaatatttataataatttttagaggtaaatattattttttttttagatgaggaaattgaagggtagagaaattaaagatatttattttaggttatatatataggaatttaaatttattttaaggattagaaaacgaaagagagagagagagtttaaatttagttttgttttattttataagttttataattagttatattattgtgaaagatgaatgtgtgggatattgtaatttggagagaaattttttttttttttcgagatttttgttttgaagaaatatttttattaaagttatgtaatatattaatgttttgaaagttaatagtttttaaacgtaggaataaaaaattaaatattcgtatgtttttatatataagtaggagttaaatgaggagaatttacggatataaagaagggaataatagatattggggtttatttgagg

SEQ ID NO: 1613 - DNA, 2242 bp, Artificial Sequence
  chemically treated genomic DNA (Homo sapiens)
ttttaagtaggttttagtatttgttgtttttttttttgtgttcgtgagttttttttatttaatttttatttatatgtgagaatatgcgggtatttggttttttgtttttgcgtttgaaaattgttaatttttaaagtattaatgtattatatggttttaataaaaatatttttttagaatagaaatttcgaaggaaaaaaaaagtttttttttagattgtaatgttttatatatttattttttatagtgatatgattggttatggagtttgtggaataagatagaattgggtttgaattttttttttttttttcgttttttaatttttagaatgggtttgaatttttgtgtgtgtgatttgaggtaaatgtttttgatttttttattttttagtttttttatttgaggaaagaataatatttatttttgaaggttattgtgaatattagataatttatataaagtgttttatataatgtttggtttatggttatagtgtttaattaatggtagttttttttattcgtatatgatgagttaggaatatttagtaatttggatatgatatatggtagaaaagttttaggaggaatgaaggaaatattggtagagatgagttgtaaaattttaattttttaaatatttttttggtgttataatatgtatgttttagattggattggataaagcgattttttattggggttgttattatttttataatttttttttttgttattttttagatagagttaataatttatataaatagtatagatgtgggtttttggatagttagttagatatttagtttttttgcggtagtgaaaaaattttttttttggcgtaaagtttggtatagggtaggtatttaaaattttgtaggtttttttttttatcgtcgtggttttaattagtatagggttttgtatatagtaggcgtttatttattgaatgagcgtatgatgaatgagcgtatgattatgttatttgtttttttttttttttttaaatttttgttttttcgtttttgttttacgtagttagtatattttaaggagttaggcgtaagttaggtttggtttattgattcgtttttcgcgcgaggttgcggttgttatggaaatagcgggaaataataatttcgttttttttgggtgagagaggttcgtagaggtaatagtagttggaggaatagcgtgagcggcgcgtagtcgtcgtagagtttattattgtgttattcgagtcgtatcgtttcgttttcgcgcggtcggcgttcgagttttttttttttttttagtacgcgagtgtcggtaggtattacggcggagggtattttttgggttcgtttttttaattagggtttcgtttgcgcgttgtttgttgtttttacgtgatgcgtattcgagtttcgtcgttaggcggcgttgattatcggggagggggttaggggttttagatacgcgagttttcgttttgttttttatttatttatttatttatttaaatgttatttttttttttttttttttttttttttttttcgggatggggttttgttgtgttgtttaggttggttttaaattttcgggtttaagtgagttttttgttttagttttttaaagtgttggggttataggtatgagttacggtattcggattttttttttttttttttgaatatatataatatatataaaatatatatataaaaatatataatatatataaaatatataaaaaatatatataaaatatatataatatataaaatatatataatatattatatataaaatatatattatatagtatatataaatatatatattatatagtatatataaatatatataatatataatatataaaatatatataatatataatatataaaatatatataatatataatatatataaaatatatataatatataatatatataaaaatataaaatatataatatatataaaaaatataaaatatataatatatataaaatataaaatatatattatatataatatataaaatatataaaatatataaaatatataatatataaaatatatataatatataaaatatataaaatatatataaaatatataaaatatataaaatatataatatatataaaatatataatatatataatatataatatataaaatatataatatataaaaatatatgatatataatatatatgatatataaaatatataatatatataa

SEQ ID NO: 1614 - DNA, 2371 bp, Artificial Sequence
  chemically treated genomic DNA (Homo sapiens)
atatataaatagatagttttagtgtagtggatatatacggtaatagaggttttaagatgtataaaaggttgtaggggtttaaaggacggagaaaggatattgattttttttttttaattttttaagttatttgtttatttcgttttttttttttcgagattaaatatttttatttttttttaaagatttaattttgttattatggtgtttaattttttttttatattgtgatgttggggaaagttttggggtatttttgttttttcgtgaatttttgaagttttattttaaaaaatatatatttatttttttgtttatcgtaaattttgatatttgtaaatatcgataataggaattttgaaaaaatatacgtttttagaaataagtaagtaaataaaaatacgtagaatgttagagtttttttttattttatattttttttttaaattgatgttaaggtgggtttagtgagggttagtgacggaatttgtagtttgagaaagatatggtagaagtataaggttagaggttgtttttgttgttttattaaaaataataatttttttttaaatttggattgaaattgatatttaacgttaagtgtgattttagtttaatttgttttggtagatatgtatatattttttatgcgtattattttatgtgatcgtgtttatagttttgtgagttgagaggggtgggagtgattatttttaattataagtaaggttttcgggttttaagggttggagattatttagggttcggttagtattagaattaacggtttttaattttaaattaaatgatggtttatgttatattataattttaaataaatgaattgtgatgtgttttatttttttgtgtaagtggaagatgttaatatatgtgtattatgagaaaggattttataattttttttttttgggttttgttgagacgtttttttgatttagagagaattttttaggattagtaagaaaagtatgttattattttttaaattttataatttaggaaatagtttattattttataaaattataaaagcgaattatttgagtttttttattatttgtttttttttttttaagttggttttgtataaatatgatgtacgtttattgggtgataagtttgtcgtaagtgaaacgtttataggtattataggaatgatttggtgtttcgtttattttattagaattttaattggggtgtgtaggagaggattttataaatggtaaggtaatttttggtagtttgtttgttagtattgttcgtgttatttttagaggagtttgagaagaggtagaggaaggcgaaatatggttggtgagtgtatggtattttttttattaggtttttgttagaagtttgtgttttttttgggttagtttgttaagttagagtgttcggttaggatagttgtttgttttgggggttttgaaggttagattttttattttagggtgttagttagaggcggtttttttttagtggtggttgggtttttttagtatatttttggggtagaatattattggaatgtagttttgaataatgggtagggtgtttagtgtagttggatatcgtatttttttaggtagaggataagttttgttttgtttgtgtttgcgttttttttatatattcgtcgttattcgtaaagttaaagtagataggattcgggtttcgtgttttttagtgtagttgtatttagttgttagtagtgttagtaaagaagtatattttagaattattagggagtgagagtggtaatatgtaagttgatttgaaagaaattattgtttattttaaattaatttatttaggagtattaggaatgtttttaagtaagttatatattagaagtattagataggttttgtgtaagtgatttgatgagttgaagttttttcgtagtaggagtaggtgtgttataagatgttttggtttataggagagtattagggaataggggttataaagaataataggaagtgtaggtttttttattttatgtttattgtcgaggatatgggtttttgttaattagtatttttgttaagtagtatgttaattattatttgttttgtgtgtttagtttagtaggttgatagggacgttaaatttaaataagatatgagttaaatttgtaaaatattgtgaatggcgattagggttgttggaagattggttaaagatattattgagttaaatgtaataggtaaatgttggttattttagaagttataaaaattgggataggtgattgtatattaggtttttttttttgttttttattttttgttgtaatgtatagtatggttgggatgttaagaagaggagttttggattttatatattg

SEQ ID NO: 1615 - DNA, 2371 bp, Artificial Sequence
  chemically treated genomic DNA (Homo sapiens)
tagtgtgtagggtttagagtttttttttttagtattttagttatgttgtatattatagtaaggaatgggagataggggagggggtttaatgtgtaattatttgttttagtttttgtggtttttgaagtagttagtatttgtttgttgtatttggtttagtgatgtttttggttaattttttagtagttttaatcgttatttataatattttataagtttgatttatattttgtttggatttggcgtttttgttaatttattaggttgagtatataagatagataataattagtatgttgtttagtaggggtgttgattaataaaggtttatattttcgatagtaagtatagagtgggggaatttgtattttttgttgttttttgtaatttttgttttttggtgtttttttgtggattaggatattttgtggtatatttgtttttgttacggggaggttttagtttattaagttatttatatagagtttgtttgatgtttttgatgtgtagtttatttaggagtatttttaatgtttttaagtaagttgatttgaaataaataatggttttttttaaattaatttatatgttattatttttattttttggtagttttgagatgtgtttttttgttgatattgttgatagttggatatagttatattgagaaatacgagattcgagttttgtttgttttggttttacgggtggcgacggatgtgtaaaagaaacgtaaatataaataaggtaaagtttgttttttgtttaaggagatgcgatgtttagttgtattgaatattttgtttattatttagagttatattttaatgatgttttattttaagaatatgttagagggatttaattattattgagaaagagtcgtttttggttagtattttaaaataggaagtttggtttttagagtttttaaggtaggtagttgttttggtcggatattttggtttggtaggttggtttaggggaagtataggtttttggtaaggatttgatggagaagatgttatgtatttattagttatgtttcgtttttttttgtttttttttaggtttttttgggaatggtacggatagtgttgatagataggttgttaaggattgttttattatttatagaatttttttttatatattttaattagaattttaatgaagtgggcgaggtattaggttatttttgtagtgtttgtaaacgttttatttacgatagatttgttatttaatggacgtgtattatgtttgtataagattagtttggggagaagggggtagataataaagaaatttaaatagttcgtttttataattttataaaatgatggattattttttggattgtagggtttaggaaatgatgatatgttttttttgttgattttgggaagttttttttgaattaaagaaacgttttagtagaatttagaagaagaaaattgtgaggtttttttttatgatatatatgtattagtattttttatttgtatagggaagtgagatatattatagtttatttgtttagggttgtagtgtggtataaattattatttgatttggaattagaagtcgttggttttgatgttggtcgagttttgggtggtttttaatttttgaagttcggaagttttgtttgtggttggggataattatttttattttttttaatttataaagttgtggatacgattatatgagatggtgcgtatgggaagtgtatgtatatttattagggtaggttaaattgagattatatttggcgttgaatgttagttttagtttagatttgggggaaaattgttgtttttaatgaggtagtaggaatagtttttaattttatgtttttgttatgttttttttagattgtaggtttcgttattgatttttattgggtttattttgatattagtttaaagaaagggtgtggagtggggagaagttttgatattttacgtgtttttgtttgtttgtttgtttttaagggcgtatgtttttttaaagtttttattatcgatatttataaatattaaggtttacgatggataaaggagtgagtatatattttttaaagtgaggttttaaggatttacgagagaatagaaatgttttaaggttttttttagtattatagtgtggaaggaagattgagtattatgatgataaggttgggtttttagagagaagtgagaatgtttgatttcgagaaagagaagacggaataggtaggtggtttggaaaattgaaaaagagaaattagtgtttttttttcgttttttaggtttttatagttttttgtatattttagaatttttattatcgtatgtatttattgtattggaattatttgtttatatat

SEQ ID NO: 1616 - DNA, 2419 bp, Artificial Sequence
  chemically treated genomic DNA (Homo sapiens)
ttagggttgttaggttttttttagttttgtatttgtcgcgtcgttttatttcgttaggaagttttagagatttcggggatggggtgggagcgtttttttatcgcgggtttaaaaagaaggaaggacgtttttaggggtcgtagaaggaggattagttttaagttataatttttttcggatttaaggtaggtcggttggggtttcgcgtttatacggtttttggcgggggttcgcgcgtttcgggagtttcgcggttcggggaggaaagaggagataagagataggcgaggattacggggttgatttagtcggggtagggattatcgtggaaaaattttggcgaggtggggggacgcggaaagagagcggttcgcgttttgtattttgcgtcgggtatttcgcgttagtgtttcgtttttagtgtttcgcgtttcgcgtttcgcgttttgtttttatttcgggttagttgtatcgcgttcgcgtcgtaggaatcgtggagttggaaagtgggggcgtcgcggttggggggttgttttagttgcgtttcggttagcgatcggcgggtcgggtttaaatttagttaggttgggtaggcggtggtcgcgcgattggggatcgggcgtttcgtttttttcgtttttttttttttttttttttttttttttagttttttggttttttttagtttttatcggatttgttcgttcgttgtttttttttttttttcgttttttatattattttttattttttcgttttgttttcgtttttttttttttttttgttttttgttttttttttttttttttttttttttaggggcggagtttttttttttttttttagataatgttgtggttgcgttttttttttcgttagttcgtttaggttttcgtcgttagcgattttttcgggttgggggtggggaggtggggggggagtgtagggttggggaggatgagttggttttttttatttttttgttgttgttttttttaagagggatggagatttggtttaagtttttcggtttattcggagttgtgatagttatttttagggaatagttacgttgttttattaagtttatttttagcggtttggattttttaggtagaggttgtgggattttgttttttttaatattttagtttatttttaaaagggtttgagtcggataggggttaaataggttttttcgatttggcgggtcggttagacgtgatagtaatgttaaggaggttaagtttttttgtttattttttattttttttttttttatttttggattttttggcgtttttagtatatagaggtttttgagtagttcggttgtaggttttttatttatttagagtttttttttttacgtgtttatttttaattttgtagtgtttgcggattaaaggggaagggagttttaggttaatttttaaggtatagttagattagtttatttagtttggaagttaagtattttttattaaatttattgtttggattttggaatgtgttttttttagaaataatgttataaatggtgatttgttttttaggttagttataaaagtttgttgaatttaaaatgtagttgtagggtggtgttgagaattgtgttagttattttgaaaaaggaggttattgattagttttatttgtagaaaaaatatgtatatattttttggttttttttttttgggttataaatattataaattaaataagttaaagtttttttattaagtttttttatatggatttattattttatgtgttaagttttttttttttgtaggtaatagaaataattttgggggaatgtatttgtagacgtagtggtttttcgataattttatttaattttagtgttagaattgtatggagagtttagtataagaggtaaatttagagtttaaagggtttttcgtaatttagaaagttttttttgaggggttttttttttttttttattatagattggttttttttgtattttagatatttggtgaaaggtggttatgatttttattttcggggtttggagttttgttgtttaggaaagtagttagatgttgttagaattttttattttttaatttaattttttaaaagagtagtttatttttttgtgatagtggggttagggatgagtttaggttgtatatattgggttattagaaattttgaatttaggttttatttaaaattaaatttattatttttgtttttgtttttgttttgttttgtaattttgagatggggttttattttgttatttaggttggagtgtagtggtatgattatagtttattgtagttttaattttttgggtttaagagatttttttgttttagtttttcgagtagttgggattatagttatgtgttattatggttagttaatttttgtattttttgta

SEQ ID NO: 1617 - DNA, 2419 bp, Artificial Sequence
  chemically treated genomic DNA (Homo sapiens)
tataaaagatataaaaattagttggttatagtggtatatggttgtaattttagttattcgggaggttgaggtaggaggattttttgagtttaggagattgaggttgtagtgagttatgattatgttattgtattttagtttgggtgatagagtgagattttattttaaaattataaaataaaataaaaataaaaataaaagtaatgggtttagttttaaatagggtttaggtttagggtttttggtagtttagtatgtataatttgagtttatttttagttttattgttataggaggatgagttgtttttttgggagattagattagagaataagggattttagtagtatttggttgtttttttgagtagtagagttttaagtttcggagatagaagttatggttattttttattaagtgtttggggtgtagggagggttagtttgtgatgaaggagaagaaagaattttttagggaagattttttgggttacgggaagttttttaggttttggatttgttttttatattgagttttttatgtagttttgatattgagattagatgagattatcgagaaattattgcgtttgtaaatgtatttttttaaggttatttttattatttgtaaaggaaagaagtttaatatatagagtagtgggtttatatggggaaatttaatgggagaattttaatttatttaatttatagtgtttatagtttaagaagaaagaattagaagatatatatatattttttttataaataaagttgattagtggtttttttttttagggtagttgatatagtttttagtattattttatagttgtattttgggtttaatagatttttgtggttggtttgggaagtagattattatttataatattgtttttaagggagatatattttaagatttaaataatgaatttagtaaagaatgtttggtttttaggttggatgagttggtttggttgtattttgggggttggtttgaggttttttttttttttggttcgtagatattgtagggttggggataggtacgtgagggggagaattttgagtagatagggaatttgtagtcgggttgtttaagggtttttgtgtattgggggcgttaggaggtttagggatggaaaagggggaggtgagaaatggataaagaaatttggtttttttggtattgttgttacgtttggtcggttcgttaagtcgaaggggtttgtttagtttttgttcggtttaaatttttttgggaataagttgggatgttagaaaaaataaaattttataatttttgtttggggaatttaggtcgttggaggtgggtttggtagggtagcgtgattgttttttgggagtggttgttatagtttcgggtgaatcgaggagtttgggttaagtttttattttttttggagagggtagtagtaaggaggtgaggggagttagtttattttttttaattttgtattttttttttatttttttatttttagttcggaagaatcgttggcggcgggagtttggacgagttggcggggaaggggacgtagttatagtattgtttgggagggaggggagaagtttcgtttttagaggggaggggagaagaggagggggtaggagataaggggaggaagaaaggcgaaggtaaggcgaaggggtggagagtgatatgaagagcgagagaaaagagaggatagcggacgagtagattcggtaggggttgaaaaaggttaaggggttggagggagggagaggaaggaggaggggagcgaggagggcggggcgttcggtttttagtcgcgcggttatcgtttgtttagtttggttggatttgagttcggttcgtcgatcgttggtcgaggcgtagttgaagtagttttttagtcgcggcgtttttattttttaattttacggtttttgcggcgcgggcgcgatgtagttggttcggggtgaaggtaaggcgcggggcgcggggcgcggggtattgggagcgaggtattggcgcgggatgttcggcgtaaggtgtagggcgcgggtcgtttttttttcgcgtttttttatttcgttaaagtttttttacgatggtttttatttcggttgggttagtttcgtaattttcgtttgttttttgttttttttttttttttcgagtcgcggggttttcggggcgcgcggattttcgttaggggtcgtgtaggcgcggagttttagtcggtttgttttgggttcgaagaaagttgtggtttggagttagttttttttttacgatttttgggggcgtttttttttttttttgagttcgcgatgggaaggcgtttttattttattttcggggtttttgagattttttggcgaggtggggcggcgcggtaggtgtagggttggggagggtttgatagttttgg

SEQ ID NO: 1618 - DNA, 2480 bp, Artificial Sequence
  chemically treated genomic DNA (Homo sapiens)
tagtatgaaatataaggtttagtatatattattatttaaatgttttttgtttgaataaatatatgattgttagtgaatatttgttgaatgaataaaggggttatatttaatagttaattgtagtgtttatgttatttaaatatggtggttttttaggtgtttttgttttagtttttgagagttttgttttttttttattgggatttagatatgtagttataaggagttaaattttatagaggtgtgtaaagatgataagttataggtagtagggcggtaattaatatttttttgtttggatattgagatttttatatttgttggataatagtgaatttataagggattatatatttaatggtaatatttatatataataaatatttatttaaaaaatttatatgaattaattaatttttagaacgtttttatatgggattttttattagtttttgtatttataagtatttattgaatattttttgtatattaagaattagttattttttaaaattttggtgagattaatagattttatattattagttagtgagtttttttaaaagtgttggtttatttataattagtgagttgtattttttttgtggtattggttagattttataaattgtagttttttgtttatttataatggatttagatttttggatgagatgtattatatatgtgtgaaggattagagggtattttttaataataataggaataatattgttttgtgttgttaaattgtagatttttttttttaaagatttaaagtttattatagatataatttgattgttgttgtattgtaatagtgtttttttttttttttttatttaggtagattttttttttgattaaagatggtatgaatatttttttatgttatgatttatttgataaatagtttaggatgttataaaagtaaagtaggagatgttttaaataattagtggtagaaagtttgttgttgttcgggtgttaattttgttagaaagtttagatatttgtgggttgtattgtaaatttttgtatagatgtgtgtgaggttgagttttagttatacgtttgtaatagtattaggaaatattttgttatgttatttttttgggtgattttttatgattaaaagaaaaaaaaagttatatttttgttttgtgaaattgagttcgaattttgggtagtttagtagtaattagtatatgtttgaattatagttgcgcgggatggtttgtattatatattaatggtaattattgttttaaatatggaaattaaatattttaggtttaggttgattttaatttgcgggtaggaaacgtttgatttattttaagataagtttaaaagtgtgtggagttttttttggggttataaattttgtttatatttatatgtattttttttgagatagttttttgaggttttttggtagttatttttttgaacgtgggaagagattgggatttttaggaatgtaaaaaaggagaaattaaaatgtttttagaaaattttagggtgtggttggtttagagatttaatttaatagttttaagatttaaaagatgagtattaaattatatttggtttttttttttttaggtatgagatatttatatttatttagaattagtttttaatttggaagttttttgtgtttttagtatttttagattttgtattaaattttttgtaaatttttttaataatgagtagttatgtatagtattatagttgtggttttgatgtttttattattagttgattattttggttttgtttttttgtggttttgtggttatgaaataatattttaataggtataagatgattggtgaaatttatttagtaagttttgggttttttttaatgtgtataattagtgtatattatagtttatttaaaaatgtgttaacgggtgaaattaatatgatattttagaagttgttgattatttatttatttttttgagatagggttttattttgttatttaggttgtagtgtagtggtgtgattatggtttattgtagttttgatttttttaggtttaggtgatttttttagttttttgagtagttggttttataggtatgcgttattatatgtggttaatttttgtattttttgtagagatagggttttattatgttgtttaggagggttttgaatttttgggtttaagtaatttatttgttttggttttttaaggtgttgggattataaatatgagttattgtgtttggaaagaagttatttattattattttgttagataatttgtttgtgattttttaaatatttaatagaatatgttgagttttgtttttatttttttatttattttggaggttatttgtaatgttggtggatgtttttagttatattaatagttttttattttaggtatttgtgtttttttgtttgagggtttttattggtttgagggtttttttagtttggttcggggtaggt

SEQ ID NO: 1619 - DNA, 2480 bp, Artificial Sequence
  chemically treated genomic DNA (Homo sapiens)
atttgtttcgagttaggttgagagagtttttagattaatgaaagtttttagatagagggatataaatgtttgaggtgggaagttgttggtgtgattgaaagtatttattaatattataggtgatttttaaaatagatggaggggtaagggtagggtttagtatattttgttaggtatttaggaggttatagatagattgtttagtaagataataatagataatttttttttaggtataatggtttatgtttgtaattttagtattttaggaggttaaggtaggtggattgtttgagtttaggagtttaagatttttttgggtaatatgatgagattttgtttttataaaaaatataaaaattagttatatgtggtggcgtatgtttgtggaattagttatttaagaggttgggaggattatttgagtttggggaggttaaggttgtagtgagttatgattatattattgtattgtagtttggatgatagagtgagattttgttttaaaaaaataaataaataattaataatttttgaggtattatgttaattttattcgttaatatatttttaagtgagttataatatatattaattatatatattaaggaaagtttagagtttattaggtgagttttattagttattttgtatttattaaagtgttgttttatggttatagagttataaagaaatagagttagaatgattaattgataatagaagtattaagattataattataatgttatatataattatttattattaggagagtttataaaaaatttggtataagatttgagaatgttgggaatataagaagtttttaaattaggaattgattttgggtaaatgtggatgttttatgtttgaagagagggaagttaagtatagtttgatatttattttttgagttttggaattgttggattgggtttttggattaattatattttggaattttttgaggatattttgatttttttttttttgtatttttagggattttaatttttttttacgtttaagaaggtggttgttaagagattttaagggattgttttaaaagaaatatatatgaatgtgaataggatttgtagttttagagaaaattttatatatttttaaatttattttgggatagattagacgttttttattcgtagattggaattagtttgaatttaaagtatttaatttttatatttaaagtagtagttgttattggtatataatataaattatttcgcgtagttgtgatttaggtatatattgattattattaaattatttagaattcgagtttaattttataagatagaaatatgatttttttttttttttggttatagaagattatttaaggaagtagtatgataaaatgttttttgatgttgttataggcgtatggttgaaatttaattttatatatatttgtatagaaatttatagtgtaatttataaatatttgagttttttggtaagattaatattcgagtagtagtaagttttttgttattaattatttaagatattttttgttttgtttttgtaatattttgagttgtttattaaataggttataatatgagaaagtatttatgttatttttaattaagaaaaaaatttgtttggatgaggagagaaggaaaaatattgttgtaatatagtaataattaaattatgtttataatgggttttaaatttttagaagaaaagatttatagtttagtagtataaagtagtattatttttgttgttattaaaaagtgttttttaattttttatatatatgtaatatattttatttaaggatttaagtttattataaataaataagaagttatagtttataaaatttggttaatgttataaaagagatataatttattggttataagtaagttaatatttttagaaaaatttattagttaatgatataaagtttgttggttttattaaagttttgggaaataattggtttttggtatataaaaggtgtttaataaatgtttataaatataaagattgatagaggattttatataggaacgttttagagattagttaatttatatgagttttttaaataaatgtttgttatatataaatgttattattaagtatataattttttatgaatttattgttatttagtaggtgtggaaattttagtatttaagtagagaaatattaattatcgttttgttgtttgtagtttattatttttgtatatttttgtagaatttaattttttataattatatgtttaaattttagtgaagaaggagtaaagtttttaaaaattgagataagaatatttaaaaagttattatgtttaagtagtataaatattgtaattagttgttaaatgtaatttttttgtttatttaatagatgtttattgataattatgtatttatttaagtaagaaatatttgaataataatatatgttggattttatgttttatattg

SEQ ID NO: 1620 - DNA, 2464 bp, Artificial Sequence
  chemically treated genomic DNA (Homo sapiens)
ttgtagtgagttgagatagtgttattgtattttagtttgggtgatagagtgagattttattttaaaaaaaaattaatttggaaatttatgttttagaaagtatgattttagttattttgaatatttttagtgtatagatatgttttgagtggttatatagagagggtataggggtattaaaggaagggaggaattaggagtttttatggaggttttatagaggaatttaaattatgtttttaggagttttttttataattagttgttgttttttttttttgttttaaatttagtaagatataattgataaaaattatatatatttatggtgtataagttaattattatataatatatgtatcgttttacgtatttattatttttggtggtgagaatatttaagttttatttttttagtagtttttaagtatataatatattattattattatagttagtatgttgtataataggtgtttagaatttatttattttgtataattgatattttgtattaattgattgatattttttaattttatcgtttttttttaattttttgataattattatttttttttttttcggtgtatttggtttttttagattttatatataaatgagattatgtaatatttgtttttttgtgtttggtttattttatttagtataatgtttttaggtttatttatgttgttaaaaatataagattttaatttttttaaggtttagtagtattttattgtgtatatggattgtattttttttatttatttattgagggatatttgggttgattttatgttttggtttttgtgaatagtgttgtagtgagtatgggagtgttgatatttttttgatatattgattttattttttttggatatatatttagaagtgggattgttagattatatggtatttttatttttaattttttgaggaatttttatattgttttttataatggttttattaatttatattttaatgagtaggaattagttttttttttgtatagttttagttatcgtttttattgttttattttttgttttttttttttaggatgtttgtgggtattgaagttttttttttagattggatatgagttagtattttagtattttgtgagttgagtgttaggataaggtgcgatttgatttttttagaaattttttttgttttagagatagttttttgggttagggatttttaaggattaaagtttaatttttattattttttattatattgggaattttagaatgtgtgagttttacgtttttcggtgttgatagattagaggaggattagacgcgataatatggttgttgttggaggggttgagaggtgattgattagtttaagtttgtatagttcgtggaggaagtatttcgtttttgtttttttaagtgataaagtttatgttggaatatagagttttttgttttgagtatttaaagttttgatttttttgggggaaaattttttgtagtttttttttttagtattatttgtgttagtgagtaattttttaattaggttgtgagtttttggagagttgagagtgtgttttggtttttgtatttatgaagtgttgggttatgtttttattttagggttatgattgaaaaaaaatgttagagggagaaaattgtaagatgattattatattttgtttaattgaaaaggaatgtgttaattagtttatatagttttatttatttttggaaaaaatatatttttatattatttgttttttgtttttttttaattttttttttttttttaattaaaataaggaaaaaaaaattatagaatgttatttataatatgttaattgttggttatttttagatgttgggattatgttttaaataataattttgagtaatttaaataaatatggaatgttttggaagttgtggggtaggatatagagttgagggaaagtttaagatttagaaattagaaggttagtgttaaaaatattttttagatgtgggtagtgagaaataaaggagagtttttcgtgtagggggttattagttttaagtatttttttatttttatatatttttttttaagatttagaattttaggaggagtttgattgatttagtatgggttatacgattagttttggcgagaggagggtaggattttttaaataatgggaaatttgtgttattattaaagatagggagaggagaattgcgaaggtaaaatatagatgattattacgaataaggggtattttttttttttatttgtggtttttaatgtttttgttataaataaaatataaaaaatatttaagaaatatttatgtattatatatataatatatatatttataaatgttataataaatattttaatatttgtttttttaatagtaagaagaaaagatagtagtaatattattaagaggaagttagtttattggaagggatttaga

SEQ ID NO: 1621 - DNA, 2464 bp, Artificial Sequence
  chemically treated genomic DNA (Homo sapiens)
tttgaattttttttagtgaattagtttttttttaatggtgttgttgttattttttttttttattattaaaaggataaatgttaaaatgtttattataatatttataaatatatatattatatatataatatataaatattttttaaatattttttgtattttgtttgtagtaaaaatattagaaattatagatagaaaagaaaagtattttttgttcgtgatggttatttgtattttgttttcgtagtttttttttttttatttttggtaatagtataggttttttattatttaaagaattttgtttttttttcgttaaggttggtcgtataatttatgttaggttaattagattttttttagggttttgaattttgaagggagatgtataaagatgagaaaatgtttggagttgatgattttttgtacgaagggtttttttttattttttattatttatatttgagagatgtttttaatattgattttttaatttttgggttttgggtttttttttaattttgtattttattttatagtttttagaatattttatatttatttaagttatttagaattgttgtttgaggtataattttaatatttggagataattaatagttaatatattgtggatagtattttgtggtttttttttttttattttgattaaaagagagagagaagttaaaggaaggtaggaagtaggtaatatggagatatattttttttaaaaataaatggaattgtataaattggttggtatatttttttttaattggataaaatgtggtgattattttgtaattttttttttttaatatttttttttaattatggttttggagtaaaggtataatttagtattttatagatataaagattaaaatatatttttaattttttaggagtttataatttggttaaggagttatttattaatataaataatattagaagaaagagttatagagagtttttttttagaaaaattaagattttaggtgtttagagtagggagttttgtattttagtatagattttattatttgagaaggtaggaacgaggtgttttttttacgggttgtgtaggtttaagttaattagttattttttagtttttttagtagtagttatgttgtcgcgtttggtttttttttgatttgttagtatcgggaaacgtggaatttatatattttgaagtttttagtgtaatggggagtggtgggaattgaattttggtttttaagagtttttggtttaggaggttatttttaaaataagaaagatttttgggagaattaagtcgtattttgttttgatatttaatttataaagtgttgggatgttggtttatatttagtttgaagagaaaattttagtgtttatagatattttaaagggaggaggtaagagatgggatagtgagggcgatgattgaaattgtataagagaaagattggtttttgtttattgaaatgtaagttagtaaggttattatgaagaatagtatggaggttttttaaaaaattaaaaatggaagtattatatgatttggtaattttatttttgggtatatatttaaaggaaatgaagttagtatgttaaagagatattagtatttttatgtttattatagtattatttataagagttaagatatggaattaatttaagtgttttttaataggtgaataaagaaaatgtagtttatatatataatggaatattattaagttttaaaaagattaaaattttatatttttaataatatagatgaatttgaggatattatgttaaatgaaataagttaagtatagaaagataagtattatatgattttatttatatgtggaatttaaaaaagttaaatgtatcgaagaagaggggaatggtggttgttaaggggttgggggaaggcgatggaattaggagatattagttaattggtataaagtgttagttatgtaggataaataagttttggatatttattgtatagtatattgattgtagtaataataatgtattgtatatttaaaaattgttaagagagtagagtttaaatgtttttattattaaaaatgataagtacgtgagacgatgtatatgttatataataattagtttgtatattataaatatatataatttttgttaattatattttattaaatttggggtagggggaagagatagtaattggttatagaagaagtttttggagatataatttggatttttttatagaatttttatggggatttttgatttttttttttttttggtgtttttgtgttttttttatgtgattatttaaagtatatttgtatattaagggtatttagggtggttggagttatgttttttgaggtatgagtttttaagttaatttttttttaagatggagttttattttgttatttaggttggagtgtagtggtattattttagtttattgtaa

SEQ ID NO: 1622 - DNA, 2482 bp, Artificial Sequence
  chemically treated genomic DNA (Homo sapiens)
aatggggagtgattgttaaagggtatacgggattttttttggggaataagaatgttttaaaagcgattgtgataatggttatataaatttgttattatattaaaaataatggaattgtatatattaaatgtgtaaattatatggtatgtgaattatattttagtatatgtttaatttttttttaagtgggttgtggttatgtagtatgtattttttttaggtgggtatttgttatagtttttatagttttatattgattgttttatattgggatttagttaatttttttgattttggtttttgttggtatttgatattttagttttagtttatatttatgagtatttttttttttttagtatttttattatgataagttttttttttttatttttttttttatgaaaattatttttattggttattttagagtatattttttataatattttttgatatgtagttattaagtttttgataaagaaatgtatttttttattagtaataatattgttataaaattatacgttattaaattaaattgttttataaatataatttggattttgggttttataaataaatatagtgtattatgttaatcgaagaataataggaagtattttatgattttatattatttaatagtttttttttaaatatttttgtagtatgattaggtaggagatgttataagattgggaatagagttgtaattattggtatttttaaatagtttgttgatggattgggtttgtgagaaaattaatattatattgaaatttttagggatattttaaattggtggattagatggtcgtttgattaagtttgggttatgtaaatagtggagtgtttagatttaggtttggttgttggagtttaggtagttgtttgtatttaagtttagttagaagttttgttaattaaagaattgattgaattttttttttttttttatttttgtttgttttttttttttgtatttgtgttgtttttttttttgtttaaattttttgggtttaggattgtaggtaggtaaggtagagtattttgaatgtttttttgaggattaggaatttatttttttgattatatagtgatgtgttttatagattttttttattgtgaggtaattattttatttatttaagttttataaagtttttattatttcggttagtttatatttttgaagttaagttattagtttgatgcgtttgttgtaaaatgtggtttaatagtttgttagtatatttattttttttttaatggaatttaaaggtattttatgtttgagtagtagtggatttaagagtcgatgaaaagtttcgcgagttgggcgtagttagtataaaataatgcggggaatattgtggagttttacgtagagttatttttagtagtggcgtgcgggttttttgaattttaagttacgttttttgtttttttttttttttgatagtgttttataaataatttatgttgttttatgcgtgttggttttagattgtttaggatgtattggattatttgagtagtttgcgtttatgtggttttttttttttttgaagatgattcgattttgttttgtttataaaggggagacgtggattgttgttttttgttttttaagtgtggttttgtaaagttgttttagaattaacgggttggaattgaaaattattatggagtttggtgaatgttagcgagtttttgaaaagtaaaagttgggaagcgataaattttttttatagttttattttaaatataaacgaggttatttttttgggaggtagtaaaagtgagtattttgtgtttgattaaagataattttttggttgaggttttgattatttagggatgaaatggaggtaaatggttttttttgtttaaatttagatttatttttgtattaggttaggtatttgttggattgaaaggagtgtagtttttggagagtagttttatggaattggaattggtaaaaatgggttttttgattatattttatatattattattagaatgtattattatatattagatttatattatatttaatatagatttaatatattagattataattagattatattaaattataattatatattagatttatattattatatttaaaatgttttattttattagttttgttatttgtatatttgtgttgttagtttataaattagattataatgattttttattatttaagttagaatttttatattttatttatattttagaaagtagagattaaagaaaagtattgagaagagaaggttaatttttttttatataataatatttgtggtttttaaattgaaatgatagttgatatagtgtttagagtttaaattttatttttatttatttttttagaaagagatattgaaatatataagggaaagagaggagattatatgtgaaaaattattaattattttgttagtgattatttaataatgaa

SEQ ID NO: 1623 - DNA, 2482 bp, Artificial Sequence
  chemically treated genomic DNA (Homo sapiens)
tttattgttaggtaattattggtaaagtagttggtaattttttatatatggtttttttttttttttttatgtgttttaatatttttttttagagagatagataaaaataaaatttaggttttaagtattatattagttgttattttaatttgagaattatagatattattatgtaagaagaaattagttttttttttttaatatttttttttaatttttattttttggaatataaatgaaatataagagttttgatttgaatggtaaaaaattattgtaatttggtttatgaattgataatatagatatgtaaatggtaaggttggtaaggtaaaatattttagatataataatatagatttaatatataattataatttaatataatttaattataatttaatatattagatttatattagatataatatagatttaatatgtaataatatattttaataataatatataagatataattagaaagtttatttttattaattttagttttatgaaattgttttttaagggttgtattttttttaatttaataaatatttagtttggtataaaggtaggtttggatttaggtaaagaagattatttgtttttattttatttttggataattaaaattttaattaaaaggttgtttttggttaaatatagaatgtttatttttgttgttttttaagaaaatgatttcgtttgtatttgggatggaattgtggaaagagtttgtcgttttttagtttttattttttaaaggttcgttgatatttattaagttttataatagtttttagttttaattcgttagttttgagatagttttataaagttatatttggaggatagaaaatagtaatttacgttttttttttgtggataaaatagaatcgaattatttttagaggggagaaaaattatatgaacgtagattgtttaaatgatttagtatattttagataatttgaaattaatacgtataaggtaatatgggttatttatgagatattgttagggaaaaagaaaagtaaaaaacgtaatttaaagtttaagaaattcgtacgttattgttgggggtagttttgcgtaggattttataatgtttttcgtattgttttgtgttgattgcgtttagttcgcggggttttttatcggtttttaaatttattgttgtttaagtatgaaatatttttggattttattaaaaaaaaaataaatgtgttaataagttgttaaattatattttataataaacgtattaaattgatgatttagttttaaaaatatgaattaatcgaaataataaaggttttgtagaatttggataaatgaagtgattgttttatagtgagggagatttgtggggtatattattgtgtaattaaaaaaataagtttttggtttttagagaaatatttaaaatgttttgttttgtttatttatagttttgagtttaaagggtttgaatagggggaaaaataatataggtataaaaaaaagaagtaggtaggggtgggagaaagaaagaaatttagttagttttttgattaataagatttttagttggatttaagtataaatagttgtttagattttaatagttaagtttaaatttaaatattttattgtttatataatttaaatttaattaagcgattatttaatttattaatttaaagtatttttaagagttttagtgtaatgttggtttttttataagtttagtttattaataagttgtttaaaaatgttagtgattgtagttttgtttttagttttgtagtattttttgtttggttatgttatagggatgtttaggggagaattgttagataatgtggggttataaagtattttttgttatttttcggttggtatagtgtattgtgtttgtttatgaaatttagaatttaggttgtatttataagatagtttggtttgataacgtataattttatagtaatattgttattaataaggaaatatatttttttgttagaaatttgataattatatgttaaaaaatattataggagatgtgttttaggatgattagtaaaggtaatttttatgaggaaaaggataagaaaagggaatttattatgataaaggtattagaaaaaggaaaatgtttatgaatatgaattgaggttaaaatgttaaatgttaatagaggttaaaattaaagaagttaattgggttttagtgtagggtagttaatatggaattatggagattatggtaggtatttatttaaggaaggtatatgttatataattataatttatttaaaaaaaaattaaatatgtgttgagatataatttatatattatgtaatttatatatttaatatgtgtaattttattatttttagtatagtgatagatttgtgtaattattattataatcgtttttagaatatttttattttttaaaagaaatttcgtgtgttttttagtagttattttttatt

SEQ ID NO: 1624 - DNA, 2345 bp, Artificial Sequence
  chemically treated genomic DNA (Homo sapiens)
agttattgggtttattaaggtatttttatagttggtagtttatttttttttttattatttttttttattatattaatatttttttttttgtttatttttatggggttttttatgtttttttgttagttttaaagtatgtgtgaagagtagatatatttatgtaaatggtttatatttattgtgaaaatttatgaaatatttatgaattattaatgtcgtttttagggttataataaatttttttttttttttttttttttgtgtgtgtagtgtgtgtgtttttttttttttttgaagtgtaattttttaatatggtataatttttttagattgattttgttatttatttaggagggaatgttaaattttatttattttgttttagtttgtaaattttttagtgttttttttttttaaattggattgttagattatttgagggtatttattttttttgtttagagtatagtatttggtgggttgtaaaatagaagagtttttttagatttgtttgataaatgagaggaaaggggtaatggtggtaggagtttgtatagataaaaaggttttttattttgggttaaaaggtgttatttggtattatttttattttttgtttttgtttaggaaagaaatttgataaagtaggagatagtttttgttttgttttttttatttataatttttttttttgagaattgttattttgtttttaagatgggttatatattagtttttatttttatttttttagtttttgtttatgttatttagataattatgatggtttttttttagttattattttgtagattagttttgtattattggataaatggaattttatagttttcgtttggaataatttagttttcggaattttttatttaatatgatgtttgtggaatttattatgtagttgtatatagtaatattttatttatttttttgttgaatattattttattatttttgttagtttgaatggattttttttttatagttaagtaggttatgattaagggagataatgaagtatggaattgttttttttagagaaattataggtatggaataagaattttttgaggaggttttttttgttttttttttattaagttgcgatattatttttatatttagagaattttagagtaatatcgagtttcgttgagtgggtttagagttttatatggtagttgttttagtttttggtacgaggttaaaggatgatagtttttatttttttttatgtttttttgtttaattttagggaatatttttttattttgtgattgtttatatttgaaaattttatttatattttataattttttattagtttaatgttatgtggtgttaattttttgtatgttgtagtgttgagttgtaaatttgttttttttttgtagtaatttaaagtgttcgtaaagttttgaggtagataatgttattttgttatgtatgtttatataatattagtaaattatttattgtgtttttgtttattttttagatatggtggttgttttgtagaattaaaatttttgttatttttttttataattagttaataaatttaagttgagttaaggagttaggtgaagttattgtgatttgggtaaggtttttatcgatagatatgtgtttttagatataagatgtgtttttagatatataattttgtttggttagagtagaatagaatgggtggtgtatatttttattatgtaagtatattttgttttttttattggtaataatattttaaggagcgtaaggaaatttaggaaggaatattttataatgttaagaatatttattaagtaaattattttttagaataaatttgagagatggattgttatattaaagttaatagaaattgaagtatgataatgttaatgtatattttttttgatatattgtagattcgtagttttaaaagtttgtttttttattttgttagttgaattttttttattttgttgttattttttttatgggatgttttaaaattttatagatttttgtttggtaatggggaaaaatgagggtgtttattattaagaaagttaattaaagaagtaattgatggattatttagtttatagattaaataaaatggacgttattttatgtttttaaatatttaggtattggaattagaaaatgaatttttaattagatttttttgttttttttgtagggaaaatgagatgtaaagtagagttagagaaaaatagtaaatggttatttgtttgttgggagataaaaattttatttagaggttaagttatatttaaattggttgattttatggagattgattttgttttgtggga

SEQ ID NO: 1625 - DNA, 2345 bp, Artificial Sequence
  chemically treated genomic DNA (Homo sapiens)
ttttataggatagagttagtttttatgggattaattagtttgaatgtgatttgatttttgagtaagatttttattttttagtagataaatggttatttgttatttttttttgattttgttttgtattttattttttttgtaggaaaagtagggaagtttgattgggagtttattttttgattttagtgtttagatatttgaagatatgaagtaacgtttattttgtttggtttatgggttggataatttattagttatttttttaattggtttttttagtggtaaatatttttatttttttttattgttaggtaagagtttgtaggattttgaggtattttatgagaagagtggtagtaagataaaagagatttagttagtaaaataaaaaagtaggtttttaaaattacggatttatagtatattagggaaaatatgtattgatattattatgttttagtttttattggttttggtatgataatttattttttagatttattttaaagaataatttatttagtaggtatttttgatattatgaaatgtttttttttgaatttttttgcgttttttaagatattattattaatgggaaaaatagggtgtatttatataatgaaagtgtgtattatttattttattttattttggttaaatagaattgtatgtttgaaagtatattttgtgtttgaaagtatatgtttatcgatgggaattttgtttaaattatagtggttttatttggttttttagtttaatttgaatttattaattaattatgaaaaaagataatagaaattttgattttataaagtaattattatgtttggaagatagataaagatataatgaatgatttgttgatattatatgaatatatatgataaaataatattgtttgttttaagattttacgggtattttggattattgtaagaaaagggtaggtttgtagtttaatattgtagtatgtaaagggttaatattatatggtattgggttgatggaagattgtagagtgtgagtaagatttttagatatgagtaattatagggtaaagaaatattttttaaggttgggtaaaagaatatgaaagaagataagaattgttattttttggtttcgtgttaggaattgagatagttgttatatggaattttgaatttatttagcgaaattcggtgttgttttgaagttttttgaatatgaaaataatgtcgtagtttgatgaagaaaggatagaaaaggtttttttagggaatttttattttatgtttgtggtttttttggaaaagataattttatgttttattattttttttagttatggtttatttgattgtaagaaagaaatttatttaaattggtaaaagtaatggaataatatttagtaaaagaataaataaaatattgttgtatgtaattatatggtgaattttataagtattatgttaagtaagagatttcgaagattaaattattttaaacgaaaattataggattttatttatttaataatgtaaaattaatttatagggtaataattaaggagaggttattatagttgtttgggtggtatggataagagttggagaaatagaaatagagattagtatatggtttattttgagaataagatggtagtttttaaaaaagggggttgtgagtgaggaaggtaaggtaaggattgttttttgttttgttagattttttttttgagtaaaagtaggaagtggaggtggtgttaagtagtattttttggtttaaggtgaagagtttttttatttgtataagtttttgttattattgtttttttttttttatttgttaaataagtttgaaggagtttttttgttttatagtttattaaatgttgtgttttgaataaagggagtgggtatttttagataatttaataatttagtttgaaaaaagagaatattagaaagtttataaattgaagtaaaataagtagaatttaatatttttttttgagtgagtagtagaattagtttgagaaagttatattatattgaagggttatattttagagagagagaaagatatatatattatatatatagagagagagagaaaaagagagatttattgtggttttagaaacgatattaataatttataaatattttataagtttttatagtaaatataaattatttatatagatgtatttgttttttatatatgttttagaattggtaaggaagtataaaagattttatgaaggtaaataaaggaaaaaatattggtatgatgaaggagagtggtagaagaaagagtaagttattagttatagaagtattttggtggatttagtgatt

SEQ ID NO: 1626 - DNA, 2435 bp, Artificial Sequence
  chemically treated genomic DNA (Homo sapiens)
attagttgttttagaaattgtagattgtgttgatttggagggaggaagatttttttaaatttttatttagatttttataagatttagatttttaaaataaagtaaaatataaaagtaattttttgtttgcggatgatttaattttttttttggtaggtttaattttgttttttaggaattagtagtgattagtgatagaaagagtagtttttatgattttaggtgattattaggacgttagggtaggaaggagtttgttgattgagtgttgatttgtaaaattattagtataggtgtttaataattttatttttgagaagttagagttgagtttttggggttgttttggagggtttaggatatgttgtagggtaataggaaggatatggggtgagaaaaaggtttttgttaagttgttgaaagatatatgatagtttaatagggaattaagagttaggtttaatattgtttttgtattatatttaataattgaggttaatggtttattaagtttttattgagggttatagagaggataggtttttaagtgtagagaggtagtagtaaaggttgaggttgcgggaaatataattagagtttaaaatattaatatttatttgttggtatggttgagaggtattttaataatttttggtttttgattttttattgtgttaaaatttaaattattatattaggttttgaataatttttgaaaatgtgtgtttttttatttagttaaggtaaagttgttttaaagataaatattatattagtatagatgtttttataagagtaattattattaatggttattgtttggaagttggatttggaaatgatatgttggatggttatagttttgttagatgaggtgtgcgtgtgatgataagtgggaaatagtttgatttaagggatattttagtttatggttagtatagtaatgattttgggaagtttgaagttatgttttttgttgagtaataaggtatagggcgtagaaggggtaaaataagttagggagtttagttaatatgtgagatggaaatttaaggatagggatagagtacgtataaagtttagggatatagttttttgttggatattttgtttgtattaattggtaaattagattgtataataggaaagaagtttgtgatagtaaaaggggtcgaaaacgggaaggatatttagagggtaggaattatgacggggttttgcggttttgtgggtagtagggagagtgtatttttggtttgcgggtttcgtgagttggaagaaattaggaaagggaagttgagtatttaattttatatagattataggttaatcgtgtttatttagtgtttgaaagtgagaagttgttaaggttttgtgatagttttgaaatcgtaggtattagaggatagaaattttgagtttagagggaggtaggtatttttatttgtttaatttggtttttaatagtttttaattttttaatatttttaagtagaattagattaagtagaagtgtttataatagttttttaatttagtttgtatttttttttttttttttttgttttgggggttatgtgttattaggagtagaggttgtgaatgttttagaaatttttttgggatgtaggttttttttttatgtagaaaatgtttattgaatatattaaatgttaggtatatgttttgtattggggtgtaatggtgaggggtgatatttagagggagtgttttttttttttgtattattttttgtttgatttttttagtagattttagagttggttattatgattttttgaatttatttttttttattttttttttttgagttttgagaagtaaagttaatttaaatttaaagtgttgggtataggagtttgtttcgtaagaatttaaattttattgttttatttttaaatttggtttgtttttatagtgtttgagatttagtaattttttattatttttagttgtttttgttgttgtggttgttaatattatttaaaattgataaaaattgtatagggaagttgatatagttagatattaagttgatatgtttattattgaatgtttggagtaaggtaattttattttagatttgatttttaataaattttagtgaatatttaatttttgttttattataaatgtattattatatttgtttatatgggaaggtgaagatgggttagttgtttgttttgaaaggaggaaagagtgagaatgtataattgaatgaaaaaaaatattttggttatagatatttttttttttggttttataataataaaatatgtagtgggatttttattttgttttagaatttttagttgtttttttttttttgaagtgtttttttagaggaaataaatttttttattgatattgaaaatgagttataagagaagtgttgttattttttttttgag

SEQ ID NO: 1627 - DNA, 2435 bp, Artificial Sequence
  chemically treated genomic DNA (Homo sapiens)
tttaaaaggaaagtagtaatattttttttatgatttatttttaatgttaatagaaagatttgttttttttgaaggagtattttaaaaaggaaaaaataattaaaaattttaaagtaaaataaaaattttattatatattttattattgtaaagttaagagaaaaagtgtttgtggttaaaatatttttttttatttagttgtatatttttatttttttttttttttaaagtaaataattggtttatttttatttttttatataggtaggtgtaataatatatttgtgataaaataaaaattgaatatttattgaagtttgttaggaattaagtttgaggtgaggttattttgttttagatatttaatgataggtatattaatttaatatttgattgtgttaatttttttgtgtagtttttattagttttaaataatattgatagttataataataaaaatagttaagagtagtgagagattgttaagttttaagtattatagaagtaggttagatttagaggtaaaataataaagtttgaatttttacgaaataaatttttatgtttagtattttggatttgaattgattttgttttttagagtttaggagagaaagatggaaggagatgagtttaggaagttatgatgattaattttgaagtttattgaaaaggttaggtaaaaagtaatatagaagagggggatattttttttgggtgttattttttattattgtattttagtataaggtatgtgtttggtatttagtgtgtttagtaggtattttttgtatgggaggaaggtttgtattttaaagggatttttggaatatttataatttttgtttttaatggtatatggtttttaggataaaagaaagagagagaagatataggttaaattggagaattattatgagtatttttgtttaatttgattttgtttgggaatattgaagagttggaagttgttgaagattaaattgggtagatgggagtgtttgtttttttttgggtttaggatttttattttttaatgtttgcggttttaaggttgttataaagttttgataattttttatttttaaatattaaatgggtacgattagtttgtgatttatgtaggattaaatgtttagttttttttttttgattttttttagtttacgagattcgtaggttaaaaatatattttttttgttgtttataaggtcgtagagtttcgttatagtttttgttttttgagtgtttttttcgttttcgattttttttgttattataagttttttttttgttgtgtagtttaatttattagttagtataggtaaaatgtttagtaaaaagttgtgtttttgggttttgtgcgtgttttgtttttatttttaagtttttattttatatgttaattggattttttgatttattttgttttttttgcgttttgtattttattgtttaatagaagatatagttttaggttttttaagattattattgtgttggttatggattaaagtgttttttaaattaagttgttttttatttattattatacgtatattttatttaataagattatgattatttagtatgttatttttaggtttaatttttaggtagtgattattgatggtaattgtttttataagagtatttgtgttaatgtgatatttgtttttgaggtaattttgttttaattaggtgggaaagtatatatttttaaaagttatttaagatttagtgtaatagtttagattttggtatagtgaaaagttaggggttaagggttattggaatgttttttaattatattagtaggtaagtgttagtgttttaaattttgattatgtttttcgtagttttagtttttattgttgtttttttgtatttagaagtttgttttttttgtggtttttagtgaggatttgataaattattgattttaattattaagtgtggtgtagaaataatattaaatttgatttttggttttttgttgagttattatgtgttttttagtaatttggtaggaattttttttttattttatgttttttttattattttgtagtatgttttgaattttttaaagtaattttagaaatttaattttggttttttaagaatgaaattgttggatatttgtgttggtaattttgtaggttagtatttaattaataggtttttttttgttttagcgttttgatggttatttggggttatgagggttattttttttattattaattattgttgatttttgggaagtagagttgagtttattaaaaaggaagttgagttattcgtaagtaaagagttgtttttgtgttttgttttgttttaaaaatttgagttttataggagtttggataggggtttggaagggtttttttttttttaggttagtatagtttgtaatttttaggatagttgat

SEQ ID NO: 1628 - DNA, 2450 bp, Artificial Sequence
  chemically treated genomic DNA (Homo sapiens)
ttaaagttagaacgtatattatattatttttttgtttagtttttttttttggtttggttaaatttgttatttttgttttttgaggatttatttttaataaattatacgtgtttgaaattttatttttagttttttttttttttagatttttttatttaggatagttgtaggtaaagtgaggaattttaagagagaatttagaaaagtagaaattataaaggtaatttagttaatagtgaaatgtatgataaaatggagggattttgtcgataaataaaatgatatttgaaaagttttattaataaatattaaagattattaaatgtatattaatttttggatgttgaaattaatattgaatgtttaaaattaatttaaataattatattaaatatatatgtatatatgtgtatatatatatattaattataaggatttaaaatattttgaaattattttattttttttttttttttttttttattaaaaaaaaaaaataatggttagaatattggtttttataatattagtttttgttttggtagattaaaagaggtagaatttttttagtataattttgttttttaaatattttaaaagtatttaattatttggttttgtattatttataaaattttgtagttatgaagaaagtttttttttttaaatttagtttatttttttaaattaaaagtgtttttataaataagaagagaagttgtttttgttaaaattttgggtttatttaggattaatggagtttttttgtttcgtaggaaaattttttgtttttagattagttgttaaagttgaatattatagatgatttttttaaagcgattttgaaaaattatatgttggaatttaaattttttaaattttatatataagattagaattttatattttaatagttatataattttataaagaattatttttgatttttttggtagattattattgtagaaggaataaaaaaaggttttataaaagtattttatttgtattgttggtagatgatttataaatgtcgtatagatacgggttgattattggtttatagaagaagtattaaatgaacgacgagatatttgttggtaaatatatagtaaataaaaaatgtaatttagagttaaatatgtgtatagtgtgggttttatttttgtttataaattaagtaatgtgttttgttaattattagtagagttattgattttagatgtgtattatatagttataattttgttagagagtagattatataagttgttttttttttggttgttttattttgttttattttaagagttcgtaaattgacgatcgggataaaaattataattgatattatttgtgggaaatattttataaaataataggtttagatgtaggattaaagttatgtggtagtaaaatattttattgaaaaggggttaggttttatgattttttaagaaaatagatgtgttttttttttttttgtttgttttttaattttttttttttaaataaatttttttttaattattaacgtttttttttttttgtttttttacgattgtattggagagagtttataaatggattatagatgtaggtttgtattttaaaattttaattgttataatttttggaataaaataaatgaaatatttggaaaaattatattgaattattgtaaaggtaatgatgattatgtaaatatgtttgtttgatatttatttagtatttttgggtatgagtatatgattttttagatattttaagttggagtttagggagtaggaagtaatttagagtttgtttaaaatgtagtaatagtaattttttttgaaagttttttgttttgaaggggaagtttttatttttgaagtttcgataagttggtaaaagggtttttacgtattttttttttttttaaggtgagatttttggataaaatagtataggaaaataagaatttaatatattttagtttttatttatttaagttttttttatttatattatgttttataattttttttttggaaatgttgtgaattataagaaaaggattttagggtataaatataggttatattgtttaataattaatttataagtgttgtgaagaattgtatataatcgggtttttgttaaaaattttggtgttatatggaatttattgtagtattattgattataattaattaatttagtatttatgttgtattttagtatttatttttagtaatgtgttaagatggtttagtgttgggagaaaataataaagtgtaaaagaaattaaatttttattatgtgttacgttaagattttaatagaatatttgtattttttaattgtttttttttagttttttaaaaattgaagtaaatagtatataaatttgtttagaaattagaggagtttgattttaatttttttgtattgtttttttagtttgt

SEQ ID NO: 1629 - DNA, 2450 bp, Artificial Sequence
  chemically treated genomic DNA (Homo sapiens)
atagattaaagaaataatgtagggaaattggagttaggtttttttggtttttaaataaatttatgtattgtttgttttagtttttgaggggttgaaaagggatagttggagagtgtagatattttgttgaaattttaacgtgatatatgatggaaatttagttttttttatattttattatttttttttaatattaagttattttggtatattattggaggtggatgttgagatatagtataaatgttgaattaattaattgtaattagtgatattgtaatggattttatatgatattaaggtttttggtaaaaattcggttgtgtgtagttttttatagtatttgtagattagttgttaaataatatagtttgtgtttgtgttttaggattttttttttgtggtttataatatttttaaaggggaaattgtagagtataatatagataaaaggaatttgaatgagtagaggttgagatatattgggtttttatttttttgtgttgttttatttagaaattttattttaagaagaaaaaaagtacgtgagaatttttttattaatttgtcgaaattttaaagataaaagttttttttttagaatagggggtttttagaaggagttattgttgttgtattttggataaattttaaattattttttattttttgaattttagtttgaggtatttgggagattatatgtttatgtttaaagatgttagataaatgttaagtagatatgtttgtataattattattatttttataatagtttaatgtaatttttttaaatgttttatttattttattttagagattgtgatagttagaattttgaagtataagtttatatttgtaatttatttatgaattttttttagtgtaatcgtgaggagatagagaggaaaaaacgttggtggttggggggggatttatttggagaaaaaaaattgaaaaataagtagagggaaaaagagtatatttgtttttttaagaaattatggaatttggtttttttttagtggggtattttattattatatggttttaattttatatttgggtttgttgttttatgaaatattttttatagatgatgttaattataatttttgtttcggtcgttaatttacggatttttggaataagataaaatgaaataattagaaaaagaataatttatgtggtttattttttgataaaattatagttgtgtgatatatatttaaaattaataattttgttaatgattagtagaatatattgtttggtttatgagtagagatggggtttatattgtgtatatgtttggttttgagttgtattttttgtttgttgtgtatttattagtagatgtttcgtcgtttatttaatgttttttttatgagttagtagttagttcgtgtttgtgcgatatttataagttatttgttaataatataggtggaatgtttttatgaagtttttttttgttttttttgtagtgatgatttattagagaaattaggggtaattttttatagagttatatggttattaagatgtggagttttgattttgtgtgtaaagtttaagaaatttagattttagtatatggttttttagaatcgttttgaaagaattatttgtggtgtttaattttagtagttggtttgagggtaaaaggtttttttacgaaataaagaaattttattagttttaagtagatttaaagttttgatagaaatagtttttttttttatttatagggatatttttaatttagggagataaattgaatttaaaaaaaagaattttttttataattataagattttgtaagtaatataaagttagataattggatatttttaaaatgtttggagggtaaaattgtgttgggaagattttgttttttttggtttgttagagtagggattaatgttatagaagttagtattttggttattattttttttttttaataagaaagaaagaaaaggaaagatgaaataattttagaatattttaaatttttatgattagtgtgtgtgtgtgtatatgtgtgtatgtgtgtttgatataattatttgaattaattttggatatttaatgttgattttaatatttaaagattaatgtatatttaatgatttttaatatttattagtgagattttttagatattattttgtttgtcgataagatttttttattttgttatatattttattgttgattaggttgtttttgtgatttttgtttttttgggtttttttttaggattttttattttatttataattgttttaggtagagagatttaggagaggaagaggttgggaatgaagttttaggtacgtgtgatttattaaaggtgggtttttaggaagtaggaatggtaaatttagttaggttagggaggggaattgagtaaagaagtggtatgatgtgcgttttgattttag

SEQ ID NO: 1630 - DNA, 2493 bp, Artificial Sequence
  chemically treated genomic DNA (Homo sapiens)
tttagttaggtagtaaattttgaaatttttggttatagaggtttttatttttatattatgatgttttttttttttagttgttatcggtaatggtttttattttataatgagataagtcggaaattgtagttgttattttattatgtttgttttttttttttttttttttttttttttttttttttttttttttttttttttttatatatatatatatatatatatatatatatatatatagagtaggttatattgttaataatatatattattttgttattgggatattttgagaggtagtgtatttttaaaattttaaataggaaaaatagtaattgtatttgtttttttttttttaattgattgataaagatattttataagatttgagagaggaatgtaaaggtattgtatgaatttgatttgttgttttttttttttattgattttttttttttttcgataatttatataggtagaagttttgggatgtttttattttatttttttttggttggtattttttttgttatatttttttttttattggtatattaaagtttaaggtttaatttaattagtgaaataatttatgatttaggtaaattagatatgattttagtatagaattgttagatattttaggaataaggtaattggaggatgatagtttattagttaatattttaaaaataatatttttagattattatttttttttgaaaattattttttttagtatgttgcgtagaatgattttagatttttaatgagtttagttttttaacgagtgagagtagagagttttaaatatttttgtgttttgttttggatggagatttttgtttaagttattggtttaatggtttaatttttgaggagatagaatttaagtaggtagatttgtatatttttatatgatatttattattttttttttcgtgtgttttttttttttttttttttttttttttattttttttttttgtttttttaaattttttagttaattttttttttgttttttagtttttgtttatatagaaaatttggttttagagaatagtatttaaatagtttttaattaaaatgtattacgtgtggtaatgtaaaaaattattagaatagtttttttttatttaaaatatgatttttgtttattgttttggtttttttgtttttgtgttttaggttaaatattatttagatttttgcgaggttaggtgtttttttattaattatttgaaaggtttagagaatggtatttatattaaagttagttttaatgataaaggatatttggttacggtaaatataagtattttttagtttttcgttttatttggtaaaaagttatttttattttagttataatataataaaggattaattgatgggagtattttttttattttttaaaaaataaattgagttaattttacgagtttatttagaggaattaattagggaataggaaatttttaaagttatttttaaattgatattgaataaagtttagggaatagatggttttttatttgaattttttaaaatttttagtattttattaatttttttataggaatgaaaaaaaattgttaaatgaatttgagtaaattattttattaggtgtttagtttttttaagattttttttgtattaagaaaaaaagaaaatataataggtattttttttattgatattattataattttatttgtatatgtgagttttttttttagggtttattttaaattttttttgtatttttgattattaagttgggggaatgatttttttaattggtgtagttgattatgtataattgtttagagtataaggatagtgttaatatatataaagtcgagaatgaggttattgtttaagtaaaatagaaaaatagaaaataatttttgttattttgttttagatatttggagatttttggggtaagagatggagaggataaattgtattattttaatagttgagtagatttttttttttcgtataaatttgatatgtagaaatattgtgaataagagagatattgttttttatttgtatagttaataagaagttgttttattaaagtttttagaaggatgaattgttggaatttatattttatttatttaaaggatgtttatatataattttttaagataatttggtagaaaattttaaaatatttttttttttttaaaatttgatagataaaattgtatatatatattatgtataataggatgttttaaaatatatggatattgtaggatagttaaattaagttaattaatatgtatattattttatatagttgttatttttgtaataagtatatttaaaatttatttttttagtattttttaagaatataatatattgtgatgaattatatttttatgttgtagaatagagtttttaaaaatattttttttatttaattgaagttttgtaattttttattaataggtttttattatttttttt

SEQ ID NO: 1631 - DNA, 2493 bp, Artificial Sequence
  chemically treated genomic DNA (Homo sapiens)
gaggaaggtaatggggatttgttggtaaaaagttataaaattttagttaaataagaagaatatttttaagagttttattttataatatggaggtatagtttattataatgtattatatttttgaaaaatgttaagagagtagattttaaatatgtttattataaaaataataattatgtaaggtaatgtgtatattaattagtttaatttagttattttataatgtttatatattttaaaatattttgttgtatatagtatgtatatataattttatttgttaaattttaaaaagaaaaaagtgttttaaaattttttattaaattattttggaggattgtatgtagatattttttgaatagataaagtataaattttagtagtttatttttttagaggttttaataggatagttttttattaattatgtaaatgagaggtaatgttttttttatttataatgtttttatatgttaaatttgtacggggaaaaaaaatttatttaattattgggataatatagtttattttttttattttttgttttagaaatttttagatatttgaaataaaatgataaaaattgttttttatttttttattttgtttgaataatggttttattttcgattttgtgtgtgttgatattgtttttgtgttttgagtagttgtgtatgattagttgtattaattaagagaattatttttttagtttggtagttagaaatgtaggggaagtttagaatgagttttgggggaagaatttatatgtataaatgaaattatagtaatattagtagagaggatatttgttgtatttttttttttttttagtgtaaaaggaattttaggggaattgaatatttggtgaaatagtttgtttaaatttatttagtaatttttttttatttttataggggaattagtagagtgttaaaggttttaaagaatttagatgaaaagttatttgttttttgggttttgtttaatgttaatttaaggatggttttggagattttttattttttaattaatttttttagatgagttcgtggggttggtttaatttattttttgaaagatggaaaaaatgtttttattaattagttttttgttatgttgtgattgagatggaaatagttttttgttaaatggagcgaggagttgagagatgtttgtgtttgtcgtggttaggtgttttttgttattaggattggttttgatgtaagtattattttttgggttttttagataattggtgagaaagtatttggtttcgtagaaatttgagtaatatttagtttgaagtataaagatagggaaattaaagtagtgaataggagttatattttaaatagaaaaaaattgttttaataattttttgtattattatacgtaatgtattttagttggaggttgtttgagtattgttttttagaattagattttttgtgtggataaggattagggggtagggaaagggttaattgaggggtttggagaaatagaaaagggaaatagagaaaaagaggagggggaaaaagagatatacgagaggagaggtgatgggtgttatgtaaaagtgtatagatttgtttgtttaaattttatttttttaaagattggattattgagttagtggtttgagtaggaatttttatttaggataagatataaagatgtttgaggttttttgtttttattcgttgggagattaggtttattgggagtttaaggttattttgcgtagtatattgaaagaaatgatttttaaggaaaaatgatgatttgagagtattatttttagaatattaattaatgagttattattttttaattgttttatttttaaggtgtttgataattttgtattgaggttatgtttggtttatttaaattataggttgttttattagttaggttaagttttgaattttagtatgttagtgggaaggagggtatgataggggaaatgttagttagaaaggaataggatgggaatattttagaatttttgtttgtgtggattgtcggaaagagaagggaattaatgaggagggagagtagtaggttagatttatgtagtgtttttatattttttttttaaattttgtagggtgtttttgttaattagttaagggaaagaaaataagtgtagttattgttttttttgtttgggattttgggaatatattgttttttaggatattttagtaatagggtgatatatattattagtaatgtgatttgttttgtgtgtgtgtgtgtgtgtgtgtgtgtgtgtgtgtgtgagagagagagagagagagagagagaggagagagagagaaagagagagagagaataggtatgatggagtagtagttgtaattttcggtttgttttattatggagtggaagttattgtcgatgataattagagaggaggaatattatggtgtaggaatagaaatttttgtagttaagagttttagggtttattgtttggttaaa

SEQ ID NO: 1632 - DNA, 2438 bp, Artificial Sequence
  chemically treated genomic DNA (Homo sapiens)
gagttagtgaaatttaatttcgttgtttataattaaagaattttaattaagtatgttatttattaaaatggagatagttaaagtttaatgtttagtatttaaaatttttagtaaatttttgtgatataaaaaaaaattattgttcgggcgtagtggtttacgtttgtaattttagtattttgggaagttgaggtaggtagattacgaggttaggagatcgagattattttggttaacgtggtgaaatttcgtttttattaaaaataaaaaaaaattagttgggtatggtggcgggtgtttgtagttttaattattcgagaggttgaggtaggagaatggcgtgaatttaggaggcggaggttgtagtgagttaagattatattattgtattttagtttgggtaatagagtgagatttcgttttaaaaaaaaaaaattattaaatttttatttgttttgttgatatatattgtagtttaagtttatttttttaattttattaggaattagaatttttttatgttttatttgtttttattttaaaaaatatttatgtttattttgttttaaaaataagatgatgtaattgatatttatatagaaaattgaaataatgaaggaaaagttaaaatgaagggttttttttttaaaaagagttataaaataaatttaaaagtttataattttgattatcggattaatttgttttaaatattttatttttggtttgttattttattttggtttttttttagatttatttgggaagatttttttttttaaatatatgtgattagtttttattaaagattagttttatttgaagatttaggtgtaggatttgggatgtaaatatttttaaatgtatcgggtaaattttgatgtataataaaggttgagagtttgagatttagggatttaattaattatgtaagatgtttaaaatggaacgttgatttttatatgatatttgttaaatgtagaaaattttgtttggatttggaaataaaaatgtgagtatgaagtttcggtaaaataaatttttttgaaaaatattaatattttataattatttttttattaaaataaaatagtgttaagtatatagttttttttaagtaataaatttttaaaattaaagtgaaattttgaaattatttttttaaatagtattcgttcggtagatagatggtatgttttattttatttttcgtttttatttggtggagtttatggggtattttgagaattaatgggtaattaagaattgggtgttaatttaggtatttgatttggaaattgagtttttgaaaattattaattttaaatatagcgtaagttttttttattatgttattttagaaattggtaataagaatattttaaaaatatttagaaatgtaggagttagattttttgggttgtaggtggaggatatatagttgttaggaaatggaagatatttgttatgtttttgagtttttttttggcgggtagtggatggaggataataaggtttgttgtagtattaatttgggtattaaatagtaataaataaatgtgatttaagagtattgttgggagatttttttgaaagagtatgtatagtagtttttggtagtaaggaattaaggttggtagttttaagttatttttgttaaatgtaaagagtgttgaaaaagttttatatttgtaattattagttagtagtattttaggagatattattttattagatacgattaattttttgttttagagagtttagtagaagtttatagaaatttatagtttatgtgatattgtgttaggttgataggtattaatttgagattgaggtgtgaaaaaagattatttgaaaattttattaaaaggtagatttttgaggtttagttttatatattttgatttataaaaattgtagaggaattaggaatttgtattttattaagtattttaggggtatttttggtataagtggtttgtaggtaatatttggggaaattaataatgattaatattatgtttttattaaggaaagttaattttagggaaaaaagagtatttgaaaatttgagtaaagaaggatttggtaggggtttttggtttaagtaagaaagttttaaagaatagggagtgataggtaagtttagattgtaagatattttagaaagaaggggagaattaaagggaggagaggtgagtagttgttaggaataaattttagaattataaaattttttttaagatttattttggggaggagaatagtttgagaagtaaaagattataaggaaatatcggattatttaatattgattaaatgttattattagttagtattgtattaggtgttttagaaatattattattattaataggtagttgtagtttataggttaggtgcgtggattttaggggtagtggttgtttacgtat

SEQ ID NO: 1633 - DNA, 2438 bp, Artificial Sequence
  chemically treated genomic DNA (Homo sapiens)
atacgtgagtaattattgtttttagagtttacgtatttaatttataggttgtagttatttattagtgatggtgatatttttaaagtatttggtgtaatgttgattggtagtaatatttggttaatgttggatgattcgatatttttttatggttttttattttttaaattgtttttttttttagaatagattttaggaaaagttttgtaattttgaggtttgtttttagtaattgtttattttttttttttttggttttttttttttttttggaatattttgtaatttggatttatttattattttttgttttttgaggtttttttatttgagttagaaatttttgttagatttttttttatttaggtttttaaatatttttttttttttaaaattaattttttttaatggaagtatgatattaattattattggtttttttaagtgttgtttatagattatttgtattaaaagtatttttggaatgtttgataaagtgtaggtttttgatttttttataatttttgtaaattagaatatgtgaagttgagttttagagatttgttttttaataagatttttaagtgatttttttttatattttagttttaggttgatgtttgttagtttagtataatgttatatagattgtaaatttttatagatttttgttgaattttttagaataaggagttaatcgtgtttgatgaagtaatgttttttaaggtgttattgattggtagttgtaggtgtgaaatttttttagtattttttatatttaataaaaatggtttagggttattagttttgattttttattattaaggattattgtgtatgtttttttagaaaggttttttaataatgtttttaaattatatttatttattattatttagtatttagattaatattatagtagattttattgttttttatttattattcgttaaaggggggtttagggatatagtaggtgttttttattttttggtagttgtgtgttttttatttgtagtttagaaaatttggtttttgtatttttaaatatttttagagtgtttttattattagtttttgggatagtataataaggagggtttgcgttatatttggaattgatggtttttaaagatttaatttttaaattaaatatttaaattggtatttaatttttaattatttattgatttttaaaatattttatgaattttattaagtagaaacgggaaatgaaataaaatatgttatttgtttatcggacggatgttatttgaaggagtggttttaaaattttattttggttttaaagatttgttatttggaagaagttatgtatttggtattattttattttgatggaaaaataattgtagagtattagtgttttttaagagagtttattttatcgaagttttatgtttatatttttgtttttaaatttagataaaattttttatatttgataagtattatgtgaagattaacgttttattttaagtattttgtatgattgattggatttttaagttttaagtttttaatttttattgtgtattagaatttattcgatatatttgaaaatgtttgtattttaggttttatatttagatttttagataaaattggtttttagtgagagttagttatatgtatttaaaaaaaaaaatttttttaagtgagtttaagggaaaattagagtagaatagtagattagaaatgaagtgtttgaaataaattaattcgatgattaggattatggatttttaaatttgttttataattttttttggaaaaaaaattttttattttaattttttttttattgttttaattttttatgtaaatgttaattatattattttatttttggaataagatgagtataaatattttttagagtggaagtaaataaaatatgaaagaattttgatttttaatggaattaagagaatgaatttaaattatagtgtatattaataaggtagatggaggtttaataattttttttttttgagacggagttttattttgttgtttaggttggagtgtagtggtgtgattttggtttattgtaattttcgttttttaggtttacgttatttttttattttagtttttcgagtagttgggattataggtattcgttattatgtttagttaatttttttttatttttagtagagacggggttttattacgttagttaggatggtttcgattttttgatttcgtgatttgtttgttttagttttttaaagtgttgggattataggcgtgagttattgcgttcggataataatttttttttatattataaagatttattgagaattttaagtgttagatattgggttttggttgtttttattttggtagatgatatatttggttagggttttttggttgtaagtaacggaattaaattttattaattt

SEQ ID NO: 1634 - DNA, 2449 bp, Artificial Sequence
  chemically treated genomic DNA (Homo sapiens)
taattgtggttattaaattttgtttttgtaatgtaaaagtatagataatatgtaaatgaataagtgtggttgtgtttttataaaattttatttataaaaataggtggggggttagattgttttttttttattgtatataaattgaaaaataagaggtaaaattagagggattttagggtggtttttaattttgtttttttttaattgtgttagagaaagagagaatataagttatatttgtttttttggttgttaatttttttgttaattttatttttatatataaaaggtgagtattaagtttatttggtagtgttgacggggggattaagtgaaataatgtaaaaatttgggacgatgttagatttgtttaaagatatttatattttttttgttttttgttatatttttttatttgtttttagaatttagttttaaggtttgggaatttaaatattgtttttaattaagtagttaaggttttagatgataagtttgtgtgtgtttggaaaacgtggttttatgatgtgtatatttaggattggtgtagttgttatattgttattttttagtgtagggtgttggggtttgaattttgataatttttgtgggatattttagaaggattaggttttatttttaaaggggttatagtgagtagagttttggttttatttttaaaggggttatagtgagtagagtttaggatgttatggggttgtagtttagaattattaggtatttagttttattttttttttaagaagatatgttgttttttgtaaatattatattttagtttttcggtataattttaaataatgttatttttgggaaaagttgataagtggtgagaatttaagtttttttatttgttgggaataaaagtgggtagatatgtagaagtttttttttattttatatagttgtattttttcggtatttattttttttttattttttggaattgagttggttagagatgaggatcggtatgttgttttttttagttttgttttgtgtggcgtttgttttgtaatttttttatgtttgttttaataggaaaaaaagtaaagagattgatatatagttatttcgaggttagattgttatcgaaatagatttttttaaataaaaataagggtcgtttttgtttgtaaggttttgtaatgaaatagagttaataaaaattgtatgggaaatttatattgtagttataaaaatattaaaaaatagaatttttagttaaagttagtagtgattgttggttcgaggtagaaattagggagtaaaatattttgaaatatttattgaaagtgaagagagggaagaattattattttttatttatttggttaattttttagaagtaaagttagagttatatttgtttagtaagtgattaagtattgggtttttaagcgtaggatagattatttttttttgtggttaatttgtaataaatagaaaatagggttatttaaaaattagtataaatatatataagaaataaagttgttttaataggaaaatttggtaagattattgacgaaaacgtttatagttttattcgttttttttttttagtttttgtttttgtgtgtgtatattagatgtttttgaggttaaagtttgtgtgtttttttgggttggagtatagggatattttttattattttttagtttttagtgtttagtgttattatttggaatattttttggaattttggagggatggtttgtttttatagttttttattagtaggggttttttttttaagaatggtgtttttaggatttttttaggtttagttttaggcgttattagattattagggaatggtgattgattatttgagaaatgtatttatttgtatttaggatttattaagttattattttaatgggaatttattaattggttttattaatttttatttagaattataagtattaaaagttatagtatttaagataagtgagtttttagtttttggttgtaataggggaatttataagaatatttagaagtgatttaggtttttttttttttttttttttaaagtatataaattttggttatttttataggtttttgttaattaatattattattgtggaaatgggggttgttttataaataagttgtaataaatgggatttttattgttggtggaaaagtttggggaataattagtagatttatggagattttttgatttcgggtatttgtatggtaatggttaattttggagattatttagggaaatggggtcggattttttattttagggtatatttatattgttagttatagtttttaaattgtagtgggataaatgtgggaaaatattttgtgaaatattagataaatgaatttggtgttgattaattttaattaggaaaattggttttgttttgttaagtgttgtatagtagttaagattcg

SEQ ID NO: 1635 - DNA, 2449 bp, Artificial Sequence
  chemically treated genomic DNA (Homo sapiens)
cgagttttggttgttgtatagtatttagtaaagtagagttagtttttttagttgagattggttaatattaggtttatttgtttagtattttataaaatatttttttatatttgttttattgtagtttgaaggttgtaattgataatataaatgtgttttaaggtggaaagttcgattttatttttttgagtgatttttagggttggttattattatgtagatgttcggagttaagggatttttatagatttgttaattattttttagatttttttattagtaataaaaattttatttgttgtagtttgtttgtagaatagtttttatttttatagtggtggtattaattagtaaaaatttgtgaaaatgattagagtttatgtgttttaaggagagggaaagaaaggaatttggattatttttaaatatttttataaatttttttattgtaattaggagttaaaagtttatttgttttagatattgtgatttttaatgtttgtagttttaagtgggaattagtgaagttaattagtgagtttttattagaatagtgatttggtgaattttgaatgtaaatagatatattttttagataattaattattattttttgatgatttagtggcgtttgaaattgagtttggagagattttggaagtattatttttagaggaaagatttttgttagtggggagttgtagaaataaattatttttttagggttttagaagatattttagatgatgatattgggtattggggattggagagtgatgaagggtgtttttgtattttagtttaggaggatatataagttttaattttagagatatttgatatatatatatagggatagaggttgaaggagaagaacgaatgaagttgtagacgttttcgttaatgattttattaagtttttttgttggagtagttttgttttttatatatgtttgtgttaatttttaagtggttttattttttgtttgttataggttagttataggagaaaatggtttgttttacgtttaaaaatttagtatttaattatttgttaagtaagtgtgattttagttttatttttgaagggttaattaaatggataaagggtaataatttttttttttttttatttttaatgagtgttttagaatgttttattttttaatttttatttcgagttaataattattgttgattttagttaagaattttattttttaatatttttatagttgtaatgtgagttttttatgtagtttttattaattttgttttattgtaaggttttgtaagtaaaaacggtttttatttttatttggagaaatttatttcggtgataatttagtttcggggtagttatatgttaatttttttgtttttttttttgttgaaataagtatgggaaagttgtaagataaacgttatatagggtagggttgaaggaagtagtatatcgatttttatttttggttagtttaattttagaaagtgaaaggaaagtgaatgtcgaggaggtgtaattatgtaaggtagaagaaaatttttgtatgtttatttatttttatttttaatagatgaaaaggtttaaatttttattatttattaattttttttagaaatgatattatttgggattatgtcgggaggttggagtgtaatgtttataagaagtagtatgtttttttaaaaaagaaatgggattaggtgtttggtgattttggattgtaattttatggtattttaaattttatttattgtgatttttttggagataaagttaaaattttatttattgtgatttttttggagataaagtttagtttttttgaggtgttttatagggattattaaaatttaaattttagtattttatattaagaaatggtagtatgatagttgtattagttttaggtgtgtatattatgaggttacgttttttaaatatatataagtttgttatttgaagttttggttgtttgattgaaaatagtatttggatttttaaattttaaagttaaattttgaaaataaatgggaaaatataatagagagtaggggaagtgtgaatatttttgaataagtttgatatcgttttagatttttatattattttatttaattttttcgttaatattattaagtagatttaatatttattttttatatatgaagataaggttggtaagagaattagtagttaaagaagtaggtataatttatattttttttttttttagtataattagaaaaagataaagttggaagttattttagagtttttttggttttattttttgttttttagtttatgtgtaatagaagagggataatttagttttttatttgtttttgtaaatgaagttttatggagatatagttatatttgtttatttatatattatttatatttttgtattgtaaaggtagggtttaatagttataatta

SEQ ID NO: 1636 - DNA, 2482 bp, Artificial Sequence
  chemically treated genomic DNA (Homo sapiens)
tatttattattttttataaatttatggattggttggttcggaagttttgttgatttggtttgagtttggttgatttagtttggtttgatttattaatttttggtttgtttggataattcgtttttttttatgttgttttttaatttttagtagattagtttggttttttcgcgtggtggagtttgagattttaaagagtaagtaaaagtttgtaaggttttttgaggtttaggtttggaattggttttgttatttttgttatattttatgtgttagtttaagatatatggttaaatttaggtttaaggaatggaaaataaatattattatttgatggaagaaattgttaaattatattgtatggaagagaaataattggaggaaattttgtaattaatttataatagagtagtttgattgttttaataaataaattttaaattttaggattaaatattataatgtttattttttgtttatagtttaattttgtattatagtttaatagaggtgggtaggggagtgagagagattgttttatatagttatttaggtattaagtttttttttgtttagttgttgtgttatttaaagttatagagtttttgattgggttttgcgtttttatttattagatgagagaagagagtaaatatgtagaagaaatatttgtttttaattgttttaatttggaggtgttatatatattatttttgtttttttttagggttagaatttggttatatgattgaatagaattgtaagggaagttgggaaatgtggtttagttgttaggagaaagaggaaaatggtttattgagtatttagttagattttgttgtagttataggttttgtgattgaggaatttatttttaaagaaagtgtattgggatatattttaaaagttgatgtatgatagtatggggtagataaaggttaaaaagataaggttatgattaagtaggggagaaatatatagatatttatgtaaatatttagggtatgagtaagaatttggggaaagatttggagttaggaggaggtgggtgtttggtaggcggtgagattttaataggtagaggtagaagtgaagggtaaagggaaattttgggttatacggggaaattagatttgtttgtttgtttaatattgtggtttttagtgggatttaaagtcgatgttttaatgtaggacggttatgttagtgttgattagaataatgtattttttagggttatattaaaaaattatgtttagtgttttatttgtatttttaaaatatgtatatatatgtgtgggttagaaaaggttgcgtttaggatatgtatttttatgtgaatcgtaggtaattgtataagtaaataggaagttgcgtaggtatgtaggtagttgtttgttgagaggtgcgtgtgggtatgggtaggcgtgggttttgtttgtttgagtataattttaaaggttttttttgatggaagggagggtaagtaagtttttgggtatttgtttttttaattgttgttgtcgtttgttttttttaaggttttttttttgggtagggttatgttagggagtatttgtggttgtaagaaaaaggtgtcgttttaaggtttttgttaattgtcgagttggtgaataaacgttttgaaattttttttgttgagaattttattttttggttttttttttgattttatggtttagtttttttagtttattttttgttttttttttttgtttgttttttagatgttttttcgtgaatttgtttttaattattttttgattttttgaattagagttatttaatagaattatttgtaaaggtatttgtattgttttttgttgtagttattagttatatatagttattgagtatttgatatggggtttatgggtttgagaaattgatttttaaattttatttaagttaaatataaatagatatatgtggttagtggtttttttattggatagtatagttttagaatagtttttatgggtaataattttttttttatagtttgttttattatttttagtttgtatttttttattttatttgtttttttgaattatgtttataaatattttaatttgattattttgtggtttttttaatgtaatgtggttaaggttgaattttttgtttttatttataaaatttatttttttttgattttttttttgttattttatttttggtttttttttattagggaatagttttgattagattatgttatttatatatattattattaagataggtttaggttttgtggatttgagttaatttgggatttttatttaaaaaaaaaattatagagtataaatgtaaaattagatttagagttttggagtattttcggtaagtgaagatgtttgtgaagtttaagttttatttgttttattgtaaattggttttagtttattattggaatattttatagtttttgggtttgaattttagtttgattatt

SEQ ID NO: 1637 - DNA, 2482 bp, Artificial Sequence
  chemically treated genomic DNA (Homo sapiens)
agtggttagattgagatttaaatttagaaattgtagaatattttaatgataaattgaggttaatttgtagtaaagtaaataaagtttaagttttatagatatttttatttgtcgaggatgttttaaggttttaaatttaattttgtatttgtattttgtaattttttttttaagtagagattttaaattgatttagatttataaaatttggatttattttgatgataatatatatgagtaatatggtttgattagaattgttttttaataagggaggattaaggataaagtgataggaggaaggttaagaagaaatgagttttgtgggtagagataaagagtttaattttagttatattgtattaaggggattatagaataattaaattggagtatttgtaaatatggtttaggagagtaggtagggtaaggagatatagattgggaataatggggtagattgtaagggagaaattattatttataaagattgttttagagttatgttgtttaatagagaagttattagttatatgtgtttatttatatttaatttaaataaaatttaaaagttagttttttaggtttataagttttatgttaagtgtttaatgattatatgtggttagtggttataataaggaatagtgtaggtatttttgtagatagttttgttggatagttttggtttagaaggttagaaagtgattagggataggtttacgggaaaatatttgaggaataaatagaagaagaagatagggaataaattggggaaattgggttatagaattaggaagagaattaggagatggaatttttagtaaagagaattttaaaacgtttatttattagttcggtagttagtaaagattttgaaacggtattttttttttatagttataaatattttttgatatggttttgtttagaaaggaaattttgagaaggataaacgatagtagtagttagggaagtaggtgtttagaggtttgtttgtttttttttttattaggagaagtttttaaaattgtatttaaatagataaggtttacgtttgtttatgtttatacgtattttttaataggtagttgtttgtatatttacgtaattttttgtttgtttgtgtaattatttacggtttatataagaatgtatgttttgagcgtagttttttttggtttatatatgtatgtgtatattttgaaggtgtaaatgaggtattgagtatagttttttaatgtagttttaaggggtatattattttgattagtattaatatagtcgttttatattaaggtatcgattttaggttttattggaggttatagtgttaaataagtaaataaatttagttttttcgtgtggtttaaagtttttttttgttttttatttttatttttgtttattaaagttttatcgtttgttaagtatttatttttttttaattttaagtttttttttagatttttgtttatattttaggtatttatataggtatttgtgtgttttttttttatttaattatgattttgtttttttaatttttgtttgttttatattattatgtattaatttttgaaatgtgttttagtgtattttttttgggaatgagttttttagttatagagtttgtgattgtagtagagtttagttaggtgtttaataagttattttttttttttttttaatagttggattatattttttagttttttttgtagttttatttaattatgtgattaagttttagttttggaaaggggtagaagtgatatgtatgatatttttaggttgaggtaattaaggatagatattttttttatatatttgttttttttttttatttagtggatggaaacgtaggatttaattaaaggttttatggttttggataatatagtaattagatagaaggaaatttggtatttgaatggttgtgtggagtaattttttttatttttttgtttatttttattggattgtgatataagattggattgtgaataagaaataaatattatgatgtttaattttaagatttgagatttgtttattagagtaattaggttattttgttgtaaattgattgtaaaattttttttaattattttttttttatataatgtgatttagtagttttttttattaagtggtggtgtttattttttattttttggatttaggtttggttatgtgttttgaattggtatatgaaatgtagtagaagtgatagagttagttttaagtttaggttttaagagattttgtaggtttttgtttattttttgagattttagattttattacgcgaagaagttagattagtttgttgaaggttgagaaataatatggagaagagcgaattgtttaagtagattagaagttaataaattaagttaagttgaattaattaaatttagattagattagtagaattttcgagttagttaatttatagatttatgaaaaataataagtg

SEQ ID NO: 1638 - DNA, 2492 bp, Artificial Sequence
  chemically treated genomic DNA (Homo sapiens)
ggttattgatatggtttggttttgtttttatttaaatcgtattttgaattataataattttcgtgttaaaggcggggttaggtggagaattattgatttatgggggtagttttttttatgttgtttttgcggtagtgaataagttttatgagatttgatggttttaaaaaggggagtttttttgtataagtttttttttttgtttgttattatgtaagatgggatttgttttttttttgttttttgttatgattgtgaggtttttttagttatgtggaattgtgagtttattaagttttttttttttataaattgtttaattttaggtatattttgattagtagtttgagaatagattaatatagttatttaaattaattttgtaatgattagaggtataaatatagatgatgatgatggtgatgaagataatagatttattttagaataatgagaaattgtggaaagtttgtttgagtcgattttaaaatagatattagtagataatattatagatgaaattaaattgtagttttaggaaaaatattatttttaaatttagggttattaattattttggaattattttatagttgtttaaacgtagtttgtatgtggtcgtttatttgatggttttatttttttttgattttttttttattttaattttgttgaagagattaaatgatcgtttgttaaaaaggtgtataaagtggaattttgtagaagaaataaaaataaatttttttgtgtatttgaatttattgatatatttagtgtttgattttattttttagtgtttgtgattttgggtaagattttttgtttagggatttggagttagttaggtaacgatcgttgcgtgtatttagtatgtacgttaggtatagttgtaaggtttttaattttttcgtttgtttgttagttattattttagatttatttgaaagttagtaaggagatagtggttgtaaagcggttttttgtttttaaagtttaggttttttgaggttttagaatgataaaatggagaggtagggttaggggaagagggtttggtgagattcgttttggttttcgtcggttttttgttaatgttcgtagatggtgggggtttatggtcgggacgttcgtttaggttttggtagttttatgtgttttagtatttttttaaaagttgattattcggtttgttttttttgtgagtcggtttattattattttattgtgtggtggtaatttttattcgtattatgaatattgattttatgtttgtttttttatttgaattataggcgggtaggtcggcggttcgtattgtttgtttagttttagtttttttggtagttatttgaatagttttaaagaaaagttgtttgtttgagtatttagggataatagagagcggttataggtcgttatagtgatttattaaaagataggaaaatgagagaaaagatttttattttttgtattagttgtttgtttttttgtttttttttattttttgttttttttttttttttttttttttttttattttttttttttttttattttttttttttttttttttttttgtttttttttttttttgtgtttttttttttgtttttttttttgtttttttttttgttttttttttgtttatatttttaaaatgagagagggaaaaagacggttgtgtttttaaaatttgtataaatttatgggatataaatattattttattatatggatatattgtatagtagtgaagcgtgagttttttgtgtgttcgtcgtttaaatgttgtgttaagtagatgtttgagggacgttgggtttgtttgttatatttaatgatatattttattaaaggtagatagaatttagggttagtttttgaaggatatgagaggagattgagtatttgtaggtgtgtgtgtgtatttagtgtatatatatatatatatatatatatattgtaaatggtgttagttgttttggaaaaaggaagttttttttttagaaaaataaggtagggtgttttttttttttaatttttttttttttagatatattttagtagtttatgattttttgagtttttattttgaatatagtgtttgttatttgaagaggttatttttgtattgtttagtttgggttttttttaagggaatgatgtatggagagttttttttttttggtgtgttggtttttttagttttaggtttagttttattattatttcgatggtttttttttatatgtaggaaatttgtgggaagtaaatatggttggagtgtgtgtagatttttaaagtgaaggttatattttggtgataatttttgtttaattaattgatttattggagtattaagtaagttgggttaggaaggatacgggagggtgggttgggtgattttggtatgttggtcgtttggtgtgagtaattgtatgggggtagtttttttaaattgagtcgtaaggattttgtttttagatttt

SEQ ID NO: 1639 - DNA, 2492 bp, Artificial Sequence
  chemically treated genomic DNA (Homo sapiens)
aaggtttggaaataaagtttttgcggtttagtttggaagagttgtttttatgtaattgtttatattaagcggttagtatgttagggttatttagtttattttttcgtgttttttttagtttagtttgtttagtgttttaataggttagttggttgaatagaaattgttattaagatgtagtttttattttgaaggtttgtatatattttagttatgtttattttttatagattttttgtatgtagggaggagttatcggggtggtgatggggttgaatttgggattggaagaattagtatattaaggagggaagattttttatgtattatttttttgagagaagtttaggttggatagtgtaggggtggtttttttagatggtagatattgtgtttagggtaggaatttagaaggttatggattgttggagtatgtttggggagaaggagattgagaggagaggatattttgttttatttttttgagaagagagttttttttttttagaatagttggtattatttgtagtgtgtgtgtgtgtgtgtgtgtgtgtatattaaatgtatatatatatttgtaagtatttaatttttttttatattttttaaaggttaattttgggttttatttatttttaatgggatgtgttattagatgtagtaaataagtttaacgttttttaagtatttgtttaatatagtatttgggcgacgaatatataaaaagtttacgttttattattatgtaatatatttatgtagtaaaatggtatttgtattttataaatttatataaattttaaaagtatagtcgttttttttttttttttattttaaaaatgtgaataaaaaggaggtagagaaagagatagaaagaaaggtagagagggaggtatagggagggaggaagatagagaaagggaaaaaaggaaaggatggaagggagggaggaataaagagaaaagagaaaagaggagagagatagagaataaaaggaagtaagagagtaggtagttggtgtaagaagtaagggtttttttttttatttttttgttttttaataaattattgtagcggtttgtgatcgttttttgttatttttaaatgtttaagtaaatagtttttttttgagattatttaagtggttgttagggaggttggagttgagtaagtaatgcgagtcgtcggtttgttcgtttgtaatttaggtagaaaagtaagtataaagttaatatttatggtgcgggtaagaattgttattatataatgaaatggtaatgagtcggtttataaaggagataagtcggataattagtttttaaggaggtgttggggtatatgaggttgttagggtttgagcgggcgtttcggttatgggtttttattatttgcgggtattggtagaaggtcggcgggagttagggcgggttttattaggttttttttttttggttttgtttttttattttgttattttggggttttaaggagtttaaattttgaggataaaaagtcgttttgtagttattgtttttttgttggtttttagatgagtttggggtgatggttggtaggtaaacgggaaaattggaaattttgtagttgtatttggcgtatatgttaaatgtacgtagcggtcgttatttgattagttttagatttttaagtaggaaattttatttaaaattatagatattggggagtggagttaggtattgggtatgttagtaaatttaaatatataaagggatttatttttattttttttataagattttattttatatatttttttaataggcgattatttaatttttttagtaaaattagaataaaagaagggttaaaaggaaatgaagttattagatgaacgattatatgtaaattgcgtttagatagttatgggatggttttagggtgattggtggttttggatttgaagataatgttttttttgagattataatttgattttatttatggtgttgtttattgatgtttgttttgagatcgatttaaataggttttttatagttttttattattttagagtaaatttgttgtttttattattattattattatttgtatttgtatttttagttattataaaattaatttaggtgattgtattggtttgtttttaagttgttaattaagatatatttgagattgggtaatttataaaggaaagaggtttaatgaatttatagttttatatggttggggaggttttataattatggtagaaggtaaaggagaagtaagttttattttatatggtggtaggtaagagagagagtttgtgtaggggaatttttttttttaaaattattagattttatgagatttatttattatcgtaagaatagtatggggaaaattgtttttatgagttaatgattttttatttggtttcgtttttgatacggggattattataatttaaggtgcgatttgggtggggataaagttaaattatattagtgatt

SEQ ID NO: 1640 - DNA, 2491 bp, Artificial Sequence
  chemically treated genomic DNA (Homo sapiens)
gaaaaaataaaaaaagtagttttaaataaatgaaacgaatgattgtaattaaaatttttttagttatatttttttatgatttttatgtgttgagaggattttaagtaaaaatagagacgggtcgtttgtttattttaattattaaaagttttttataagtgagttgaattttgtttaaaaggatattagattttgttatttaattattgtttgttttttagagttattatgaggaagtttatttttaagaatttgggaggttttagttgtagtggattataagaggtattggaatagttgatatattgaggtgttattaagaattatattattatcgaagtataattttgttgtagatatgattgttttgggcgtaggtttttatgttagtgttaaaaacgttaagatttggagaaaggagaggagaaagtagagttattttttttgtatgttttgttgtttggaaaggagatagaaaaatagtaggaaatgtttatttttttttttgggattttttagggattttttatttgaataggacgattgaattttgttttggtaagggatgatttgttggaagatgaaaagttttgtggtggaatatgagtggagttttttatagttttttaggtattgttggtgtagtacggggtagagggtgtggtataggtgaggaggtgggtgtggttttagtttacggtcgatagtttttttgttttttgttagggtagttttggtatgagtagttgggaattagattttgggtaaagtaggagtaaagagtttttttgagttttttcgattgattttaatggatttgtttttagaggggtatgaaggtggttgtgattttataagtagaatggaagtgatttgatttatatcgggtttgggaaaattggtttaggtgtggtaaaggtatagagtgtgaaataggtggggaaaataaatttaagattttgaatttttttatggtttttaaaggggaagttatgggtatagtgaatggaggggttgtttttagtttatttggcgttgtggtgaattgttttagggtttggtatattgttattattttaagatagatgggaaataaatattattagtatgtcgataagtgtttgtttttttttagtattagggttaagaaaaataaagtggggagggtattaagttttggagtaagtttttaaaaggtttttttttttgaattttttacggttgtttatttataatagttataattataatagagaggaaaagattttaattatttttgggatatattttgttaaaattatatttaagtattttttatttgtaagcgagaagtattattttttattatgtttttaaagtagcgtggggaagttgtgtgtataaattaaggtgttgttgtggtttgttgttttttgtgaatttttggaaaggattattaagaaggatgttttgataattgtttgttaggtaatttgtataagaggaaagaggtttttttgaagattattaaaaatgatttattattattggttatatatatatatgttgttttattatttaaaagtataaattatatattggtaagtaattgtgtttattagattattttaggttttgggaggagtagagaggtataaagtgtggtgattatttttaaggaaagtgtattttaattagggagataagaataattatacgtgtagtagttaaaagttatataaaagtttatgattaagtggtgagttgtgaataataggttatttatgttgtgatttttttagcgatgatataagcgatattttggaagaggtaaaatttgagataggtttttaaggattggtgttatttggataggttgaagaggagtaggagggttttcggatgtggagaatggtatgtataaaagtacggaggtgagaatgtatatatgtgtttgggatttttaaaatagggtagtttgattggattggagtttttgggtaatgatgagtgagtaataaaatggaagagaatagggttagaaggggtagataggagttatttatttttataatatgtatttattttttaattttattataaatttatattaaatttttttgtgttgattatttgagtattgtaatttaaaaagagtaattcgtgtatagagttttgtattgggttatagagtttgttttagttgagttttttttagaagtagatatagatagaaagagtttagagtaagtagtttattagggaggttattttaggaaattttagtagaggggtaggaaagtgagataggaagggaaaggaaggtagttagggaagtgttattaagatattaatatggataaatggagtaaaattttagtggtgaattttagaaattagtgtataaaatgtgttttagagtgaatttatttgggaggtgaggaagttggggtatttatttattagttgttattagttattgggtgagggttgtttttgagggtattaattt

SEQ ID NO: 1641 - DNA, 2491 bp, Artificial Sequence
  chemically treated genomic DNA (Homo sapiens)
aagttaatgtttttaaaagtagtttttatttagtgattgatggtaattggtggataaatattttaatttttttattttttagatgagtttattttgaggtatattttatatattgatttttagagtttattattgggattttgttttatttgtttatgttggtattttaatagtatttttttgattgtttttttttttttttttgttttatttttttgtttttttgttaaagttttttagaatgatttttttagtaaattatttgttttggattttttttatttgtgtttgtttttggggaaaatttaattaagatagattttgtaatttagtatagggttttgtatacggattattttttttaaattataatatttaaatagttaatatagaaaaatttggtgtgggtttgtaatggagttgagaagtgaatgtatgttatgaggatgggtaatttttgtttgttttttttgattttgtttttttttattttattgtttatttattattgtttaaaggttttaatttaattaggttgttttgttttagaagttttagatatatatgtgtatttttattttcgtgtttttgtgtatgttattttttatattcgaaagtttttttatttttttttaatttgtttagatggtattaatttttgaagatttgttttaagttttgttttttttaagatgtcgtttgtgttatcgttaagagaattatagtatgggtagtttgttatttataatttattatttaattataggtttttgtatagtttttaattattgtacgtgtaattgtttttgtttttttaattaaaatgtattttttttgggaataattattatattttgtatttttttattttttttagggtttaaaatagtttgataaatataattatttgttaatgtatgatttatgtttttaagtaataaaataatatgtatgtgtatgattaatagtaatgaattatttttaatgatttttagaaaggtttttttttttttatgtaaattgtttggtagatagttattagagtattttttttggtgattttttttagaagtttataaaagataataggttatagtaatattttggtttatgtatataatttttttacgttgttttaaaggtataataaaagataatgtttttcgtttataaataaaaagtgtttaaatgtaattttgataaaatgtgttttaggggtgattgaagtttttttttttttgttgtgattgtaattgttataaatagataatcgtaagagatttaaaaggggaaattttttaaaggtttattttagggtttgatattttttttattttattttttttagttttaatgttgaaggaaaataaatatttatcgatatattaatggtgtttattttttatttgttttggaatggtggtaatgtgttaagttttgagatagtttattatagcgttaagtgagttgaaggtagtttttttatttattgtatttatggttttttttttgggggttatggaaaagtttaggattttgaatttattttttttatttgttttatattttgtatttttgttatatttaagttaatttttttaggttcggtgtagattaaattatttttattttgtttatgaagttatagttatttttatgtttttttagaaataggtttattgaagttagtcgaggaaatttagaaaggttttttgtttttgttttgtttagagtttgatttttaattgtttatgttagagttgttttagtagggaataggaaagttgtcggtcgtgagttggagttatatttatttttttatttgtattatattttttgtttcgtgttgtattagtaatgtttggggagttgtgaagagttttatttatgttttattataaggttttttattttttagtaagttattttttattaaagtaaagtttaatcgttttgtttaggtgggaggtttttgaaagattttaagagaagaagtgagtattttttgttgtttttttgttttttttttaagtagtaaagtatatagaggaagtagttttattttttttttttttttttttaagttttagcgtttttggtattgatatgggagtttacgtttaaagtaattatgtttatagtaagattatgtttcggtggtgatataatttttaatggtattttagtatattagttgttttagtgttttttataatttattgtaattgaaattttttaagtttttgaaaatggatttttttatggtgattttaaaagataagtagtaattaggtaatagaatttaatatttttttagataaagtttaatttatttgtaaggggtttttagtgattggagtgaataggcggttcgtttttatttttgtttaaaatttttttaatatatgagagttataaaaggatatggttgagaaagttttagttgtaattattcgttttatttgtttagaattgttttttttattttttt

SEQ ID NO: 1642 - DNA, 2463 bp, Artificial Sequence
  chemically treated genomic DNA (Homo sapiens)
gaaggtatttatgtttttatttaagttatttagaggaaagaagttgttgtgtgttatattttcgggtagagaagagagtatttaatgaagtttttataagtgaatttttatgttatatgtattttttgtgtataattttttggagtaatgttaagtatatattggtatttatagtaatattttaatgtttttagtttgtttaattaatttttttttaatatatgtttatataatattaaaaatgttttattaagttagatattaggatattgttgaatatgtagatatttattatatatagatggatttaaatttattttgagtttatttatttatttattagtagtgtttgtggttttgtgatattatttgtgatttaattttaagtgtgattttatttatatgtggaaattaaataagtttattttatagaagtagagagtagtaaaggtagtagaggttggggaggagaggaagagaaggggtaagcggagatattgattaaagggtataaagtttttgttagattggaggaataagttgtagtgatggatagtattgtatggagattatagttaataataattgtatcgtatattttaaaattgttaaaagaatagatttttaatgtttttattataaaaaagtatgttggtgaggtgatggatatgttaattagttttaatgaatttttttataatgtatatatagtttaaaatattatattgtatttaatagatataaagaattattatttgtaaattaaaaattaattaataaaaaattagaaagttgttattttttaaatatatttacgggttaatttttttatgtggaaaagtaatgtcggttttattataaatatttttttagttggttaagtagattatttaatttgaattaatatattttttttttatgaggttaataaagatattttaattaaaattaaaaaaaaattttagttttattttttttttttgttttttgatttagtttttgtaggtaagaagttgtttattattgatagagataaaatattttaatgagtgatggaatttttattttttatttaaatattacgttaatatttaatataaaatattattgttttgttttatatagaaattgtaagtttattttgtttgaaatatggggaaataaattttcgttttgattttttttttgttgttttagttgtgtgttattgatattggcgtgatttgttatgggaaggtgtaatgaggtaagattgggattgtaataattattaatttataaatacgttatggtaaagttaaggtaagttagagtgatatttttaaatattttaggaaatagtatttatgtttgaattatttattttattagttcgttttgatgaatatgggagaaattaataattttttaatataaagagtaatttaatgttattaattgggtattttatatgggttgatagattgtttttttttattttcgtttttttggtggtaatttattgagttgggaaagtttgagttcggtgtagtatttggtttttagtgatattttgttggttttatttaattttttagttgggagtatgaggtatagggaggtcgaatgatttgtttaaaggttatttggtagtttaattgggattataatttaaaatttttttgatttttttattttttgtttattggattataaaatttttttgattttgtttttttaagtttgtttgagtaggaagtaaatgtttaggtttagaaaaaagaattttaaattaagtattggttaaaattatttttaaaaatgtgtgaaatttttattggtataatttttaagaaatattttatttttattttaatatttgagaatatgtgtgattatgggagtgttgtttttttttaaggggttattatgggaaagtttatatttattattgtttggatgttgttttggttaaaatattttaggaattttaaaatttgatgtttgtggtagaatataattatttgaatatataatggattttgtttatattatatttagaaatagggtatttgattttattaagtgttataaattatttggtttattttgtagtagaatttttaggtttgttttttttttagtttgtaaatttttttcgggatttttttatggttggtaattttttattatttaggttttagtagaaataatatttttttagagtgagatttgttttaattttttgatgtaatggttttttttgtttgatggttttatttttttttttattatatttattagtatttataattattattgattttattttaaaaattcggtatgttttaattttgagcgtaggagtttgatttgttttgttttttagtatattttagataatgtttgatatataaaagaagtttaataaatattttttgaaagaatggatagttatttttggtaaaagaaggtttttttttt

SEQ ID NO: 1643 - DNA, 2463 bp, Artificial Sequence
  chemically treated genomic DNA (Homo sapiens)
agaagagagatttttttttattaggaatggttatttatttttttaaaaagtgtttattgagttttttttatatattaaatattgtttaggatatgttggaaaataagatagattagatttttacgtttagagttaggatatatcgaatttttaagatgaaattaatgataattgtaaatgttgataaatgtaatgaagaaaaaaatggggttattagataaagaaagttattatattaggaggttagagtaagttttattttgagaaggtattatttttgttaagatttgaatgatgaaaagttgttagttatgaggaaatttcggggaaaatttgtaggttgagggaggagtaagtttaagagttttattataggatgagttagatggtttatagtatttggtggagttaagtgttttgtttttgagtataatatgagtaaggtttattatatatttaagtggttgtattttattataagtattaaattttggagtttttaaaatgttttggttaaagtagtatttaaatagtgataggtatggatttttttatggtgattttttggaaagggataatatttttatggttatatatatttttaggtgttagaatgaaaatgaggtattttttaagagttatattaatggaaattttatatatttttaaagatgattttggttagtatttaatttgggatttttttttttaggtttaaatatttgttttttgtttaggtaagtttgagaagataggattaagggagttttgtggtttagtgagtaaaggatgggaaaattagaaagattttgagttataattttagttgagttattaggtgatttttaggtaagttattcgatttttttgtgttttatgtttttagttggaaaattggataagattagtaggatattattgaaaattagatgttatatcgaatttaagtttttttagtttaataaattattattaaaggggcgggggtggggaggggtaatttattagtttatgtgaaatgtttaattaatgatattaggttattttttatattaaaaagttattaattttttttatatttattaaaacgaattaataaaatgagtaatttaaatatgagtattattttttgagatatttagaagtgttattttggtttgttttgattttgttatagcgtatttgtaggttaataattgttataattttagttttgttttattatatttttttatggtaagttacgttagtgttaatgatatatagttagaataataaagagaaggttaaaacgggagtttatttttttatgttttaaataaaataaatttgtagtttttatatgaaataggataataatgttttgtgttagatattaacgtgatatttagatggagagtaaaaattttattatttattagaatgttttgtttttgttaataatgaataattttttatttataaagattaaattagaaaataaaaaagaaaaataaaattggagtttttttttagttttaattaaaatgtttttattagttttatggaaaaaaagtatattaatttaagttaaataatttatttgattaattagaaggatgtttgtgatgaaatcgatattgtttttttatatgaaaaagttaattcgtgagtatatttgagaagtagtaattttttaattttttattaattaatttttaatttataaataataattttttatatttattgggtataatgtgatgttttgaattatgtatatattatagaaagatttattaaagttaattaatatatttattattttattaatatatttttttgtggtgaggatattggaaatttatttttttagtagttttgaaatatgcgatataattgttattaattgtggtttttatgtagtgttatttattattataatttatttttttagtttaatagaaattttgtattttttgattaatattttcgtttgtttttttttttttttttttttttagtttttattatttttattattttttgtttttatgagatgaatttatttagtttttatatataaatgagattatatttaaaattgggttatagatagtattataagattataaatattattgatgggtaggtagatgggtttaaaataggtttaagtttatttatgtgtaataagtatttgtatatttagtaatattttggtgtttggtttagtggaatatttttaatgttatatgaatatatgttgaaagaaaattaattaagtaagttgaagatattaaaatattattgtgggtgttagtatatgtttaatattattttaaaggattatgtatagagaatgtatgtggtatgaaaatttatttatgaaaattttattaagtgtttttttttttattcgaaaatgtaatatataatagttttttttttttgagtgatttgggtggaagtatggatgttttt

SEQ ID NO: 1644 - DNA, 2485 bp, Artificial Sequence
  chemically treated genomic DNA (Homo sapiens)
atagtttaaagtttaagttataaggagtgtatttgagaatttttagttggttttatagtagtttttgaggtttttttagtatatagttattaatgaagttttttaatggtttatggttatattatgtttttgttatattttgtatttttgggattttattttgaatatgtgttagtagtaaataatttttttgttttatttattattaaagttaggaaataatttttagggatgatttttaagataataattatttgttggaagtggaagttatgagtttgtttagtggtatagaatattttttttttattgagagttttgaaaatttgttgtttttatgtataatagagattataggtataatagagagaagaatggtatgtattttaagttttaattttaagaatttatttggtattagtgagtagtataattttattttttttttaattttgttttttttgaattaattttttttattgtttgataaattatatggtttgattgtgtatgttatatgaaaatatatttgaaagatatttagatttttttttggaattaagtaaaagaagtatttggttataaatatgtggtaattgggtttgaggttatgtatatatatttttttttagttgtagttaaaattaggtttgggggtttttgatgagtttttttgtggttattgttattaaagaaaaatggatttttttgttgtatgtttagaaaattagatattattattatttgattatttatttattggtatagtttgttttatttattaaagaaaagataaggttgaaattggatttatttaatgtatgttcgtggttttatgtgtttgtagataataagtagttttgggtgtttgtttagggttgattttttaggttataattggtattattttgatttttttttggatgagtttatatcgttatggagtttgtagttttaaataagaaaatatttataaaaatgagaggggtaaaatgttttttttggaagtagtaggggagggggtaggaaggggaggtttttgtttatttatggaaaatggacgtgtgttttatggtagtcgtagtttaagtaaatataaattttgaattagagattatattcgttatttttttagtattagtaatattaaattaaaatatagttttatttggttaattttaaagtaggatgtgggtgttagttttgaaaattatatgatcgggtttttagtagatattattagggttatgtttttgttttaagtaagaaagttataaaggtaatattttttgtagtattattattatgtttagtaaatagatgtaattataataatagttaattttagagataatagtttattatagaaaaaggttaagagggttttttattttttatgcgtagaatttgagttattttatattataattttattgagagaagaggtattaaaagagagataatgagaatttagggtataggtttaggtagtggggttgggtggggaaagaatttttttatttttttatgagttttagagtcggttaatttggaatttatgtttagaagtattattttgatttttgtggaaagtcgttttttttaaatagtaatttagtaatgagtaaagtattaaattgtgattttgatatgtttttattttgtttttttttttataaagaagattttttagggtttagggttattttagttattttaagttcggtaagtatttagttagggtttgttgttttagaggtttttatggtgtggttttatttatttatttattatgaagttgttgttttttttttttttttggagttagggagggaggggtagatgatagagttgggtgttttgagttaatgattagttttatatttataagtttatttatttttgtttttatttggcgttttaatgttgttaatgagtgggaattaattttattgagggttatttagttttttaaaagaaaattgtttatttggttggaaatgttttgatagaaggtagagtagtcggttatatttgaatattgtgttttttagatttgggggtagagggggagtggtagatttagagggagaggggattaagtagttattttatatgagttattatggggtggtcggaattttagtagagtttattaatagattttcgtgttaaagatatagtttgttgtttttttatttgttattttttattaaatttgtgtatgattttttagtattttttttaataattagttgttcgtaagaaggtaattattttatggtgaattggagaagaagaaaagatattttaggaaaatgttatgataatagaaaattttttagtgttgtaattatttggtgtgttacggtgataaagaagtcgataattgagtgtttaataattttttttggtttgagataatgggtatttattttgatttgtgttttttataagagtaattcgttattattttatattatat

SEQ ID NO: 1645 - DNA, 2485 bp, Artificial Sequence
  chemically treated genomic DNA (Homo sapiens)
atgtggtgtgaaatgatggcgaattatttttgtgaagaatataaattagggtgagtgtttattattttaggttaaaagaagttattgggtatttaattatcggtttttttgttatcgtagtatattagatggttataatattgaagagttttttattattataatatttttttagagtgttttttttttttttttaatttattataagatgattatttttttacgggtagttgattgttgagaagggtgttggggggttatgtatagatttagtggggagtggtagataaagagataataggttgtgtttttagtacgagagtttgttgatggattttgttgggatttcggttattttataatagtttatgtgaaatgattgtttggttttttttttttttgaatttgttattttttttttgtttttaaatttagaagatatagtgtttaaatgtgatcggttgttttattttttgttaaagtatttttagttaagtgagtagtttttttttaaggaattgagtggtttttaataaaattaatttttatttattggtagtattgaggcgttaggtgaggataaaagtaaatgagtttgtgaatatagggttagttattaatttagggtatttaattttattatttgtttttttttttttggttttagagaagggagaaaaataatagttttatggtaaataaataaatgaaattatattatgaaaatttttgaaatagtaagttttgattggatgtttatcgaatttgggatgattggaatgattttgggttttgaagaattttttttataagagaaaagataaaatgaggatatgttaaaattataatttaatgttttgtttattgttggattattgtttggaaaaaacgattttttatagaagttaaggtgatgtttttaaatatggattttagattggtcgattttagaatttataagaagatgggaggattttttttttatttagttttattatttgagtttatgttttaggtttttattgttttttttttaatgtttttttttttaatagagttgtaatatgggatagtttagattttacgtatgaagagtaaaagatttttttgatttttttttgtagtgaattgttgtttttgaagttaattgttgttatggttgtatttgtttgttaaatataatgatggtattataaggagtattgtttttgtgatttttttgtttaagataaaagtatagttttggtggtgtttgttggaaattcgattatgtggtttttaaggttggtatttatattttattttggggttagttaaataaaattatattttggtttggtattgttagtgttgaggaaatggcgggtatgatttttggtttagagtttatgtttatttaaattgcggttattatgagatatacgtttattttttatgagtgaataaaagttttttttttttgtttttttttttattgtttttaaagggaatattttgttttttttatttttgtaggtgtttttttatttaaagttatagattttataacgatgtgggtttatttaaagaaaaattaaaatgatgttaattatagtttagaaagttaattttgaataaatatttaaggttgtttattatttatagatatataaagttacgaatatgtattgaatagatttaattttaattttgttttttttttaataagtgaaataagttgtattagtaagtaaataattaagtggtgataatatttggttttttaagtatgtagtagaaagatttatttttttttaataataataattataaaagagtttattagaaatttttaaatttgattttggttgtaattagaaaagaatgtatgtatatgattttagatttagttattatatgtttatagttaaatgttttttttatttaattttaaagaggaatttaaatattttttaaatatatttttatgtgatatatataattaaattatataatttattaaataatgagagaagttagtttaaaaaagataaaattaaagagaagataagattgtattgtttattaatgttagataaatttttgagattgaagtttgagatgtatgttatttttttttttattgtatttataatttttattgtatataaaggtaatagatttttaaaatttttaatgagagaaaaatgttttgtattattggataagtttatgatttttatttttaataagtggttattgttttgaaggttatttttaaaagttattttttaattttagtaatgggtagaataagagaattgtttgttgttgatatatgtttagagtagagttttaggaatataaagtgtgataaagatatgatgtagttataggttattaaagagttttattagtggttatatgttaaaaagattttaaaaattattgtgaagttaattaagaatttttaaatatattttttatggtttaaattttgggttgt

SEQ ID NO: 1646 - DNA, 2485 bp, Artificial Sequence
  chemically treated genomic DNA (Homo sapiens)
tgaagtttttaattttttttaaagtatatttttgtggagaaggatagattataaagaagtgaatatataaataagatataatatagtataaatatttaggaaaataaaaatgtagtaatgtgataaattttagtaggttattatatatattttatgtatatatataatataggtttatatatataatataggtatatatatattttttattattaatttaatttagtgataaattattaagttttatttttttattagatgttttttttgtttaaaggattttatatttagatggttgtatgaagtatttgggttttagttaaatgttagttttttattgaagttttttttgatgagttagtttataatagtttattaagatttattatattattggattttagtttttttgaatatttttgttatattatagtgtttgtttatttatgtgtttatttttttgttatttgtttttttttaaaagaatgtgttagggattttatgttttttatttattgatgtatttttagaatgattagtgtttggtatatggtaattttagttataatttttttaattaatggtttatttttgttttttatggatataatattattttatttgaaaaaaataagtatttttagtttatgattatttttgagtaaatgaggatagtaatagtataagatttttagtggtatttttaatgaaagaattatataataatttttgattattttttgtttttatgtgtttataattttattgttaatattaagagagtgtattttgttgttattaattttggttatatttttataagtatatatagtaggttattattttgttttataaatagaagttgattaagttgtttattttgtaggatttataataaattatagtttaatatagtagtagaatgtaaggatttagaaggtttaaaatttataagtttaggaagatatttaattaatagaaattaaagtttaaatttgatttatttatttattggaaattttgggttgttaaataatatttaagtttattttgtaattagattaaagttttgggttttgtgggggtcggagattggaattttattttaaaaagaaacgtgtaaggtattttgttttttattaagaagtgtaatgagtaggttttatttatgatttttagttttaaatgattgaattggtattagtgttaaaaaaattgaaaatgttttaatatgtattaatcgtttaatggatgtgttgtttgtttgaaaagggcggggtggtatttaggttgtttaatgattttatatttttttatggtaaaatatttgtgatttgattatgttgtaattaaagagttatataaataatatttttggaaaggaataaacgggtttttttgaaagagggattttggttagttttagttggtattttaggtttttttatgaggagaaaatttttatttttaggtaaatttttttttttgttttttagaagttgtttttagttttatgtttgtttgtgtgtgtgttgtgagtgtagattatgggagatggggagtgggtagagggaggattttttaaaaaataaatgatatttttaatagataattttaaaataggttgaaatataagtaataaagataagtattttaaatttagaaaaggtttgggattttgaagttaaaaagtttagtaatgagaaattttaagggtagagtgggatttgttttgtaaaattagtcgattaaatgtttattattgtataaggaagaatttttgaatttatgtggtttgtttttatgtgttttagaaattattttttttaggagtatagattttaagttttttaattataggtttttcgtaatttttggtagttaagagaggtttttagtagggaaggtgggtattttattttttaaagaaagtatattagttaggataatttagaaagaaatttagaggtttggttttaggtttatattgaatttttatttttgggtattaggagcgtttttttttttaagtttttattgtaatttttgtttattatatagttataagaaaggtgggaattaatgagaataaatgttaaattatttaattatagttaatttttatagtatatttttttttaattttttagattttaattttttttatgttgtaatttttgttatatttggtaatgagttatttattatgtttattgatttaagttttttattaataatttataatttatttttaaataaaaataaatattaattgtaattttatttttttttagatatttttatttttttagtttttaaatattagaaattaaattttatgagttttttatttattaaatagtttaagttagtaaattgagttgaaattaatttgtttttttattagatatattggtaatttttttaaagttggaatgagagaagaggtttggggtttggggagtttgttttagaggttgtggta

SEQ ID NO: 1647 - DNA, 2485 bp, Artificial Sequence
  chemically treated genomic DNA (Homo sapiens)
tattatagtttttaaggtaaattttttaaattttagatttttttttttattttagttttagaaaaattgttaatatgtttaatggaaaagtaagttgattttagtttagtttgttggtttaagttatttagtaaatgaaaggtttataggatttagtttttaatatttgaaagttgaggaggtgaaaatgtttaaagaaaaataaagttgtagttgatgtttatttttatttaagaataggttgtaaattattggtgggaaatttggattagtgaatatgatgaatgatttattgttaaatgtagtaaagattataatatgaaaaagattgaaatttaggaaattaaaagaaaatgtattgtgaaagttaattatagttaaataatttgatatttatttttattggtttttattttttttgtaattgtataataagtagggattgtagtagggatttgaaaagaaaagcgtttttaatatttaaagataaagatttaatgtaaatttgaggttaaatttttgggtttttttttaaattattttgattggtgtgttttttttggaaggtggaatgtttattttttttgttaaagattttttttgattgttaaaagttgcgagaaatttatggttaagaaatttagaatttgtgtttttggaggaaatagtttttgggatatatgagagtaaattatatgagtttaaaggtttttttttatatagtaataaatatttgatcgattggttttataagatagattttattttgtttttggggttttttattattaggttttttggttttaagattttaagttttttttaaatttaaagtgtttgtttttattatttgtattttaatttgttttaaaattgtttattaaagatgttatttattttttaaaaaattttttttttgtttattttttattttttatgatttatatttataatatatatataggtaggtataaaattaagggtaatttttaagaggtagagagaggagtttatttgggggtgagagttttttttttatgaaggggtttgagatattagttggagttgattaaaattttttttttaaggaagttcgtttgtttttttttaaagatattgtttatgtaattttttaattatagtataattaaattataagtattttgttatgggaaaatgtaaagttattaagtaatttaaatattatttcgttttttttaggtagataatatatttattaagcgattaatgtatgttaagatatttttaatttttttggtattaatgttagtttaattatttgggattggggattataggtgaaatttatttattatattttttgatgggaagtagagtgttttatacgtttttttttaaaatagaattttaattttcggtttttataaggtttagagttttaatttgattgtaaaataagtttggatattgtttgatagtttagaatttttagtaggtggatgagttagatttgaattttaatttttgttaattgggtgtttttttgagtttgtagattttaggttttttaaatttttatattttgttgttatattgggttgtggtttgttgtgggttttatagaatggataatttaattaatttttgtttgtaaaataaaatagtgatttgttatatgtatttgtgaagatgtggttagagttgataatagtaagatatatttttttagtgttagtagtaaaattatggatatataaagataaagagtaattagggattgttgtataatttttttattgaaaatgttattaaaaattttatattgttattatttttatttgtttaaaaatagttatggattgggggtatttattttttttagataaaatgatgttgtatttatgagaagtaagaatgaattattggttgaagaaattgtaattgaaattattatgtgttaggtattggttattttggggatatattaatgaatgagaagtatgaagtttttagtatatttttttggagaaggatagatgataaagaagtgaatatataaataaatagatattataatatagtaaaaatatttagaaaagttaaaatttagtaatgtgatagattttagtaggttattataaattggtttattagggaaggttttaatgaagaattgatatttaattgagatttagatattttatgtagttatttaagtgtagagttttttaggtagaaaaagtatttaatggaaaggtgaagtttaatggtttgttattaaattaagttaataatagagaatatatatatgtttatattatatatataagtttgtattatatatatatataaagtgtatataatagtttattaagatttattatattattgtatttttgtttttttaaatgtttgtgttatattatattttgtttatgtgtttatttttttgtagtttgtttttttttataagaatgtgttttaggggagattagggatttta

SEQ ID NO: 1648 - DNA, 2432 bp, Artificial Sequence
  chemically treated genomic DNA (Homo sapiens)
ttaaagtggaagagtttttagggagaagtttttggaattgtttttagtgaaattaatataaatatgtatgatgtttgattgtttgagtttttatgtgaatatatttaaatatattataatatatatttaatatataggttatttatatatatataaaatatatattatattttttatattatatatttttgttatttattgttttttttatattaaatattttcggtaagtatgttaatgggtttatttattttgtagatgaatgagggttaagtttgtaatgggttttttgtgtttttagaaaatttgtaatttaattgggggatatatattgtttgatgaattttgaaatttgaggtgttatgttttagtttttttttaagtttttttaaagttgattatttaggtattgatatattttgtttatttataaagttatttttgagtaagggaggaattaaggtggaagaaagtttttaaaatttttttgtttaggggaaaattttgtttaaggtattgattattaatttagattttagtaaaagttttaaggggatagtgatttttttgtttaagtgtaatacgtgttgttagtgtttatttatattttaagtttttatttgttagtgaatagaagtttaatttttaaagtttaggatttgtattttttggtttgagggttttttttagattaagaaggtttttttgtttgtttttgtattaagttagtagttgatattattaataagtaattttttttttgtgattgatagcgaggtatgttttgtacgggttttttagaattttttatcgggattgagttttagttgtttatagtggtgattggtttgagtaaatattttttattgattgtatttttttttttggtttatttttttatatttttattaatgttttttgggattattttttagataatttatttgtattgaaatttttattcggggttagtttttatagaatttttattaagatattaggaaagggggaagttttttgtaagtatacgtgataaaagaaagataaagtttagtttgttaaaagggattagagttataaatatgtttataaaaattttgttttgttatttatatttgatttataatgattatttgggaaatttgtttttttgttggggtagggatttgattgattatgtaaaggggaaatagatgtatttagtttgcggttttatatatttgttggatgagtaacgattataatttgttaggaggagataataaaaaaatttatataaaattttttattgtgtaagtgatattggttattgtagtcggtaattagaaagttatttcgaggatagaatttttttgtttattaatgtagagaaaatggttagtttgttttttacgttttagaatataatattggagatgttaggatttattttagaggagttatgatattagtaaaatataaaaaggatgtagtaaatgtgtgttatagtaaagattataaaataaaatttaagtattttagagtttttggggtaaattgaatttatgggaattgaaaaataaatggtttgaaaaaaagtatgttttttttatagagaataggaaaataatatattttttttttttatgaagagtaagtttttttggttttaaaattgtaattgagatattttttaatatataaaaatattattttataaggatttatttatagttttggtatttgtaattaggttttagtttaaaggttttttttttagcgtggatagatgttaatataggaatataatttgtaaataatgagagtaattagtatttttttttatttgtttttattatttaatttttcgtttgatattgacgtttttttttgtagatttagtttttgtgggagtagttagggtgttagcgtttttatttattttatattttttattttaatatagttttagaaggttttgtatttatcgtagggtgtgggagagtttgggatgatgaaggggttagttttataatattagtattattaataaattttaaatatttgaggaaaggggtttattttgaggtattttttagtttaatttaagcgttataataaagattagtatttgtatttgtttttatattttaagttttgatatttaataaaattaaaaaaaaaatagtgtttatattataatttaatgtatgttagtggaggggtaaagggatttagtttatgtagttatatagggatttaggttgtttttgtatattggttttataatgttttaggatataggttagtaagtattatgtttaaagagttagagagtaaatatttttagatttgtgaggtatatagtttttgttttaattattgttattatagtgtgaaagtttttataaataatatatgaataaacggttatagttgtatagtaataaaat

SEQ ID NO: 1649 - DNA, 2432 bp, Artificial Sequence
  chemically treated genomic DNA (Homo sapiens)
gttttattgttatgtagttatggtcgtttgtttatgtattatttatggaggtttttatattatagtggtagtagttgaaatagagattatatgttttataaatttgaaaatatttattttttggttttttaaatataatgtttgttgatttatgttttaggatattgtagaattaatatataggggtagtttagatttttgtgtgattgtataaattaggtttttttgtttttttattaatatgtattaggttgtgatatgagtattattttttttttaattttgttaaatattaagatttggggtataaaagtagatgtaaatgttagtttttgttatagcgtttgggttgggttaaaagatattttagaatagatttttttttttaaatatttaaggtttattgatgatgttaatgttgtaaaattgatttttttattattttaagtttttttatattttgcggtgaatgtagagttttttagagttgtgttggaatggagggtatggagtaggtgaagacgttggtattttggttgtttttatagaggttgaatttgtaggagggagcgttagtattaaacgggaggttggatgatgggggtaaatagaggaggatattgattatttttattatttataaattgtatttttgtgttggtatttgtttacgttgaaaaggaaatttttagattaaaatttgattataaatattaaaattgtgggtgagtttttataaaataatgtttttatatgttaggaaatattttagttatagttttggggttagaagagtttattttttataaaaaggagaaatatattatttttttgttttttgtaaaaagagtatatttttttttaagttatttattttttaatttttatggatttaatttgttttaagagttttgaaatgtttggattttattttatgatttttattgtaatatatatttgttatattttttttgtattttgttggtattataatttttttggaatgaattttagtatttttagtgttatattttgagacgtgggaagtaggttagttattttttttatattaataggtagaaaagttttgttttcggggtaattttttgattgtcgattataataattagtgttatttatataataaaaagttttatgtgaatttttttattgtttttttttggtaaattatagtcgttgtttatttagtagatgtgtgaggtcgtaggttgagtgtatttgttttttttttatatggttagttaggtttttattttagtaaagaggtaaattttttaagtggttattgtaaattaagtataggtaataggatagagtttttgtaaatatatttgtgattttggttttttttgataaattgaattttgttttttttttgttacgtatgtttgtagaggattttttttttttttggtgttttagtaggggttttatagaggttgatttcgagtaagaattttagtgtagatagattatttgagaggtaattttagaaagtattggtaggggtatgggaaagtgagttagagaaaagaatgtagttaatgaagagtatttgtttaagttagttattattgtagataattggggtttaatttcgatggggaattttagaagattcgtgtagagtatgtttcgttgttagttataggaagagagttgtttgttggtggtgttaattattagtttggtatagaagtaggtaaagaagtttttttagtttagagaaagtttttaggttaagaaatgtagattttgggttttgaaagttgagtttttgtttattgatagataaggatttgggatgtgggtaggtattgatagtacgtgttgtatttgggtagaagaattattgtttttttagggtttttattgaggtttgagttaatagttagtgttttaaataaaatttttttttgggtaaaggggttttgagggtttttttttattttgattttttttttatttaagagtggttttgtaggtggatagggtatgttagtgtttaaataattagttttggggggatttggaaggagattgggatatgatattttaaattttaaagtttattaggtaatgtgtgttttttagttaaattataaattttttgggggtatagaaagtttattataaatttaatttttatttatttatagagtgaatgagtttattgatatgtttatcggagatgtttgatatgggaggggtagtggatgataggggtgtgtgatgtgggggatgtggtgtatattttgtgtgtatatgagtggtttgtgtgttaagtgtgtgttgtgatatgtttggatgtgtttatatgaggatttaggtaattaaatattatatatgtttgtgttggttttattgagggtagttttaagagtttttttttaaggatttttttattttga

SEQ ID NO: 1650 - DNA, 2411 bp, Artificial Sequence
  chemically treated genomic DNA (Homo sapiens)
agagtttttttagaggtagtatttgaataattatgttattaaatgttatcgtggtagtagagaataagtatgttaattttttttagttttttagaaaaaggatatttttgtttttttttttttaattttttttatttatttgggagagtatgttataaatgtggtttttaaatatatgaatcgatgtttttattttaatagttaagaatatggtttttagaattatatagagttgaatttatatttagttttattatttattaggtatgatcgttggtaagttaattttttgggatttagttttttttttcgtaatatgagggtaacgtagttataatattttaaggaagttttggggattaaatgagaaaacgtgagtttgaaaaagtggggtatattttttatgttttttgtggttttttttaattttgtaattttgtaataggatttaataaatattttttgtggatttgtaatgtggttttattttgtatgatttttagagtaattttatggagttaaattattttaaattttagtaatttgaaataataaatttttattattttttaaaattttgtagatgagttggttggttttttttatttgagttggtttggttaggtttttttatgtatttgtgatgaaacggaggaatagttgttggttggttgttttaggatggttataattatatatttggtagttggatggttattagtgttgtaggatgattagtaggtgttttttttttttcgtaggttagtttgggttggtggtttattttgtggttataagagagtgagaaaaagtgtgtaatattttttgaagtttaagtttagaattgatatatgtttatttttgttatatttgattagttaaagtaagttttaggttagtttaggtatagtaggcgaggaattagattttattttttgatgagaggagttgtaaagttatgtgtaagtttaggaagatttcgtggttattttagtagtcgattaggttatttagttagttttttggagttatatatgtgggttggtttttttaagtttttttcgtttaaaaagttagatagagtttgtttttttagtagggcgtatatcgtaggtttgggtgggttgtttgtttttgtgtttgttttgatttttagttatttttaggatgttttttttatggaggagaacgatttagttttgtttgttatgtgtattaagatgagttataagagagtattgtttttttgtaatgtaagaaatgtaatgtagttagaggttttgaaatttggtggggatagcggtagtagagattgtgatagtttcgggatataggaggttattttggtttttagttttaggtgtttggagttattagatagttaaagttgtataaggtataggtatgatttgttaggttgtttagttaggttagggatgatagggtacgtttattttattagttaattagagataattttcgtttgaggaatgagcggaatttttagtttttagatgacgttgggtttgagttttttttgttagtatatttggagattttataagagttataaaagtttgtaaagggttttggagtgttttatttaatgaaattatatttttttttttggattgggttaaggaggggttatatatattcgatagggtgtttttagatgggggtgtgtagaggatgggtttttatttagtttcggttattttttattttttttaaaaatttattgtgggttaggataaggagaaataagagatcgtgattggtagagatataggaaggaatgttttaaaaagagtaaaaaatttgtttttatgtattttgttgattgagtttttgggaatggagtttttttttgaggaaatattataatatggtttagaggcggaaggtttcgagaagggttttggtaagtaggggaaaatgtttttttaacggtttttttgattttaggtagagttttatttagtgatatttttgggtgagtgggtaaaatgagaaattttttttataattttttttgtttatagaaggtattaaatgaggttcggtaagaggttaggattaggtaagtttagaggttagaaattttagttaggtttatttagtatttaggaagagtagaggtttagtagtttttgagggaggtatagtttggtttttggaaaatggttttattgggttttattttttaggtatttggtttttggttttagagataatgttgagtttagtttttatttatgtgaaagtttttaaatttaaaagttagggagacgttttatattatatttagatagagggataaggaataaaatttatttattttttttttatgcgtttttttttgtaggttgcggttttatcgtttttaggcggttggatggggtcgtttt

SEQ ID NO: 1651 - DNA, 2411 bp, Artificial Sequence
  chemically treated genomic DNA (Homo sapiens)
ggggcggttttatttagtcgtttggaagcggtggaatcgtagtttgtagggagaaacgtatagaaaggaagtgggtgagttttattttttgtttttttgtttgggtatggtgtgaggcgtttttttggtttttggatttgaaaatttttatatgggtgagaattgaatttagtattgtttttagagttaaaaattaagtatttggagaatgaggtttagtagggttattttttaagagttaagttgtgttttttttaggggttgttgagtttttgttttttttgagtgttgggtaggtttggttgaggtttttggtttttagatttatttgattttggttttttgtcggattttatttaatattttttgtgggtagagagaattgtaggaggaattttttattttgtttatttatttaggaatgttattgagtggggttttgtttgaggttagagaggtcgttgaagggatatttttttttatttgttaggatttttttcggagtttttcgtttttgagttatgttgtggtatttttttaggagaaggttttatttttagaggtttagttagtaaagtatatgagagtaagttttttgttttttttgggatatttttttttatatttttgttagttacgattttttgtttttttttgttttggtttatagtgggtttttggaaggggtgagaagtgatcggagttggataaggatttattttttatatatttttatttggaggtattttgtcgggtgtgtgtgatttttttttaatttagtttagaagggagggtgtgattttattgaatgaggtattttaaggttttttgtaaatttttatggtttttgtgaaatttttaaatgtgttagtagagaaaatttaagtttagcgttatttgagggttgggagtttcgtttattttttaggcggggattgtttttgattagttggtgaggtgaacgtgttttgttatttttggtttggttgggtaatttggtaggttatgtttgtgttttgtgtaattttggttgtttggtagttttaggtatttaagattgaagattaaggtggttttttgtgtttcgaggttgttatagtttttgttgtcgttgtttttattagattttagagtttttgattatattgtattttttgtattataagaaagtaatgtttttttgtagtttattttaatatatatggtagatagaattgagtcgtttttttttatgaaagaaatattttggaaatagttaaaagttaaaataaatataaaaataaataatttatttaggtttgcgatatgcgttttgttggaaaaataaattttgtttggttttttgggcggagaagatttgggaaggttagtttatatgtgtggttttagaaaattggttgagtagtttaatcgattgttaaaatggttacggagtttttttaggtttgtatatgattttatagttttttttattaaggggtggagtttagtttttcgtttgttatatttgggttggtttgggatttgttttgattaattaaatgtggtagaaatgaatatgtgttagttttgaatttaggttttaaggggtgttgtatatttttttttatttttttgtgattataaagtgaattattagtttaggttagtttgcgggaggaggagaatatttgttagttattttgtagtattgatagttatttaattattagatgtgtgattgtggttattttagaatagttagttaatagttgttttttcgttttattatagatgtatgagagagtttggttaagttagtttagatgagaagaattaattaatttatttgtagaattttgaaaaatgatagaagtttgttgttttaagttgttaaggtttgggatggtttaattttatagggttattttgaggattatgtaagataaggttatattataagtttataagaaatgtttgttgaattttattatagagttatagaattggaagagattatagagaatataaaaaatatgttttatttttttaagtttacgtttttttatttagtttttaaaatttttttgaaatattgtgattacgttatttttatgttacggaaaagagggttgaattttaagaagttaatttgttaacggttatgtttagtaagtggtgaagttagatgtgaatttagttttgtgtgattttaaaggttatgtttttaattattaggataaaagtatcggtttatatatttaaaaattatatttgtggtatatttttttaaatgggtaaaagaaattggaaaaggaaagataaaagtattttttttttggaggattgggaaaagttagtatgtttattttttgttattacgatgatatttgatgatatgattatttaagtgttatttttggaagaatttt

SEQ ID NO: 1652 - DNA, 2457 bp, Artificial Sequence
  chemically treated genomic DNA (Homo sapiens)
aatgttaaagggattttaatagtgatttacgtttggaaatagttcgcgggaatttgtgttgatttatcggaggatttagtggaatatggtagttttaaggtagagttagtttgaaattttgtgaatatgttttaggataattagacggttagagcgagatggggttagggtgggggatattttgagttaaggagttagtgatttttagaagagtgaggagaaaatttaaggttttttttatgaaagggggtagagtcgggataatatttaaggaggttagggggatgttgagggggtttggttggagggtttggtaggtgtatggagagtttttttttagataaagatttgggtttagtttttgagaagtattgaggtatttattaggttggaagtagagtttttttcgttttcgtttcggttatatttatagtttgttggtatttgttggtttttattttaggtttagttgagttaaggaattttaaggaatagttatttttttttatgtttattaaggcgattttttatggttttcgtgggacgtttggttatattgggtttagaaatttgtattttgtaaatttatcggttttttcgtgattggggtttttttttgtgttttagtgtttttttgggaaatgtttaatttttttttggtttagttaaggagaaaggaatttttttagatttagttagagatgttggtttagtttgattgggagggaagggtgattttaataaggtcgggggtggtagtggggataatgtgtgattttttcgggaagtgggatcgtatacggtatcggggtgggtagttttggttttttttgatttggttgtttttttttagtgttatgagttttgagtttggttgttttggtgattcgtttttagtttttatttattttttaattattttatgttttttcgagtttttttttatttttagtatagtttatatataatgtaagtgtttaaaagtcgaattgtagtattgagttgaggggtggttagtttcggtgagttttggtgttttattatggtttttttatggttgtttttattttttttttagaaaagttattgagaaatggaattttttgatattatttttagttaaagttgttgaaaatagtttagaggagtgaattttatagagttttatgtttcgtttagatttttggggttttttgttttatggagtttgtagagtcgcgtttagattttttattttggatcgttattcggtatcggttttttttacgtagtttttttgtttttattgtaatttgattttttgttaaattattttttttttggttttaaatttttgtcgggaaagagatgaaattagtatttggagagttggaaagggaaaaatagttgttttttataaaatgggttagggagggggaagcggagtagtatagttggattttggtgggaaagttagagtttggtgggaacgtatagtttatagtaggagagataaatatataaatttagaggggtttagcggtagtagtttaggggtttgtttgttaatggtattttgtgtcgtattttttagatatagttatattttatatttatattaattattttagggttgtagagattttttttattttagagaggtaggtataaaaaaaaaaaaaagatttttttttttttttagtttttttataagaataattatagtgcgtgtgtttgggataaatagagagtggtggggtttgtggtattaaggtcgttaggtaaaattgtttaggttgggcggattttgtggtattttgtaattgtggtcgtgtggttatgtgggtttttgataataattatgattttttaagaggagttagggatttggatttttatttaaaaattatttgagatttaaatattggtaattaatttagaagttttacggtattgagtagttagtagtatattgtgggttaagtaaaatatgtttgtgggtagagttggggttgagggttggagtttgagtttttttttatgggtgagaattgatatatgtattttagttaggagtaggtattgttagtattttatttattttttaaattttttttttttttttttgttttcgtgatttttttagtttcgaagggtttttattttttgtagtatgtatttgatttattttatggtataatttgttttttattattttattttttatttgttttttttaatgataattttaatataatagtatataatagttgttttttgtttggttggttttttgttttttttgttttttttttgagatagagttttattgtcgtttagtttggagtgtagtggtacgattttagtttgttgtaatttttatttttcgggtttaagtaatttttttgttttagttttttaagtaattgggattaaggtgtttattattatatttagttaattttttgtatttttagt

SEQ ID NO: 1653 - DNA, 2457 bp, Artificial Sequence
  chemically treated genomic DNA (Homo sapiens)
attaaaaatataaaaaattagttgggtgtagtggtgggtattttagttttagttatttgggaggttgaggtaggagaattgtttgaattcgggaggtggaggttgtagtaagttgagatcgtattattgtattttaggttgggcgatagtgagattttgttttaaaaaaaaaataaaaaaaataaaaaattaattaaataaaaaataattattatgtattattatgttagagttattattgaggaaggtaggtgaaaagtggaatggtaagaaataggttatattatgaggtaagttaggtgtatattgtaggaagtgaaagtttttcggagttggaggggttacggaaataaaaaagggaggaagggatttgggggatgggtagagtgttgataatgtttgtttttggttggggtatatgtgttagtttttatttataaaggaggatttaaattttagtttttagttttaattttatttatagatatgttttgtttggtttatagtgtattattgattgtttaatatcgtaaagtttttgaattagttgttaatgtttaaattttaggtaatttttaaataaaaatttagatttttggttttttttgaaaaattatagttgttattagaggtttatatagttatacggttatagttgtaagatgttatagagttcgtttaatttgagtaattttatttggcggttttgatgttataggttttattattttttatttgttttaagtatacgtattataattatttttataggagaattaaggggaaagagaaattttttttttttttttgtgtttatttttttaaaatggagaaaatttttatagttttaggatggttaatgtggatatgagatgtgattgtatttgaagaatacggtataaggtgttattggtaagtaagtttttgagttgttgtcgttgggtttttttaggtttgtgtgtttgttttttttgttgtgagttgtacgtttttattagattttggtttttttattaagatttagttgtgttgtttcgtttttttttttttagtttattttgtgaaaagtagttgtttttttttttttagttttttaagtgttgattttatttttttttcgataaaagtttgaagttaggagggaaatggtttggtagaaagttagattgtagtgggagtaagaagattacgtggaggaggtcgatgtcgggtagcggtttaggatgaggggtttggacgcggttttgtagattttatgagataagaagttttaggaatttaggcggggtatagggttttgtggaatttatttttttgagttgtttttagtaattttagttaggggtgatgttaaagagttttattttttaatagtttttttggaagaggggtggagatagttatggggaaattatgatgagatattagggtttatcggggttgattattttttaatttagtgttatagttcgatttttgagtatttatattgtgtgtggattgtgttggggatggaaggaggttcgagagaatatgagatggttaggaggtgaataaggattgaaaacgggttattaaggtaattaggtttaaaatttatggtattggggagggatagttaggttaggaggagttagaattgtttatttcggtatcgtgtgcggttttatttttcgggggggttatatattgtttttattattattttcggttttattaaaattattttttttttttaattaagttgagttaatatttttgattgagtttggaaaaatttttttttttttaattaggttaaaaaaaggttgaatattttttaaaggaatattgaggtataaagggaaattttagttacggagaaatcggtgagtttatagagtgtagatttttgagtttagtgtgattaaacgttttacggaaattatggaaggtcgttttgatgggtatgggaagaggtggttgttttttggaattttttgatttagttgggtttgaggtggaggttagtaaatgttagtaaattgtggatgtggtcggggcgggggcgggaagggttttgtttttagtttggtgggtgttttagtgttttttagggattgggtttaggtttttgtttgggaaggggttttttatgtatttgttaggttttttagttaggtttttttaatatttttttggtttttttgaatgttgtttcggttttgtttttttttatgaggaaagttttgaattttttttttatttttttggaagttattggttttttggtttagggtgttttttattttgattttatttcgttttgatcgtttggttgttttaaagtatgtttatagggttttaggttggttttgttttggagttgttatgttttattgggtttttcgatgagttagtatagattttcgcgggttgtttttaaacgtgaattattgttggagtttttttggtatt

SEQ ID NO: 1654 - DNA, 2446 bp, Artificial Sequence
  chemically treated genomic DNA (Homo sapiens)
tatatgtgtggagagattgtgaattgtgaattatatttacgtaattttgaattcgagttttgtttataagatttagtttatgttttttgcgttgcgaagttttttaggaatggttcgtggttgttttgtttattgttgtatttgatatagggttttgttaaggtatttattatatttgtttgtatatttatttttttattagattttgggtaagtttttaatttttaaattattattatttttttgagatagtgatttgttttgttgtttaggttggagtgtaatattggtgttaatatggtttattgtagtttcgaatttttggattttagtgatttttttattttagttttttatgtagttgggattgtaggtatgtgttattatgtttggttgattttaatagtttttgtagagataggggttttgtaattttgtttaggttggtttcgaatttttgattttaagtgatttatttaatttagttttttaaagtgttgagattatatgtatgagttatcgtgttcggtttaaattttttattttatgttttttttgtttttggtttaatttagtgtttggtatgtggtagatatataggttagtgttataaatgattatatttttatattcgttgttttaaatgatggttttttattaagaatttgagaatttttgtttgcgggttttgtttgggtgcggattaggttaaagttttatggagttaatattttggggtaatatttaagtaatgaaaattagtagttagtggatgaatagtttagtacgggataattttggggtaggttttgtatagttatttggttagatttagtagtattgagttttggttgtttatagtagtgattgtttataattattttgtttttttttttagttttattttttttttattattttacgttttttgggttaaagaaattattattttggggtttgtttttgttggagtttaaattaagataattggttagttggttgattggttgtgtgaatgggtacgattagtagtaaagaaagaaatggaagttcgcgcgtcggttgggttttggtatatgcgttgtttttatagtgtgtttagattacgtcggggtacgtgtatagttaatagattcgatataggaaaaagtattttttagttgtttttattattttgttatttgttattttatttatttgttgtttttacgaaacgtttatttacgttagttaaaatggtatattgggtttggaatcggttggggaaatgttaggttgatagaataggggggataattgaaatagtaattgtgtggacggtggtggtgatataaatttgtttttttgcgtagaaggtaggatttttagagtttaggaggttttttgcggaggaattggtatgtggcgaaggttgtagggagggggttttgggatttaggggtagttagagtagggttttttgttttgagagttttttattttttttttttagaatagaggagattgtttaaatatagaatttagtttgtttaaagttattgtttatttttaaatgtttagttcgttttttaattaattttttacggtgtagtttaagaaaaatgtgtggatttttatgtttgaggttagttgtaggatgtatttcgtagaatagcgtgtgtttttgtaagttggggattgagtgttttgttttgttttgtttttttagggtaaaggggttattttaaaagtaggattgtttggattttagaagattggatatttatttattatttaaattttttttttttttttttttttttttttttgagatgaagtttcgttttgttatttaggttggagtgtaatgggatgattttagtttattgtaattttcgtttttttagtttaagcgattttttcgttttagtttttttaattagtcgggattataggcgtgtattattatgtttggttaatttttttgtatatttagtatagatggggttttattttgttggttaggttggtttcgaacgtttgattttaagtgatttatttatttcggttttttaaagtgttaggattataggtatgatttatcgtgtcgggtttattttttttttaatttattttagagagaaggtttttttatgttgtttaggtcgtttttatatttttgggtttaaatgatttgtttacgttggtttttaaaagtgttaagattataggtgtgagttatcgcgtttggttatggatatttatatattttttttataaatatttattgagtgtttgtgttgatttaggtattgttttgagttttaggaagaaagtagtgagtaaatttaataaaattttttattttttcgagattatagatttgtgggagggttggatagtaaataaatatatgtataaatgttaggagattttaagtgtgaagaaaagtataggggttaggtgt

SEQ ID NO: 1655 - DNA, 2446 bp, Artificial Sequence
  chemically treated genomic DNA (Homo sapiens)
atatttggtttttgtgtttttttttatatttaaaattttttgatatttgtatatatatttgtttattgtttagtttttttataggtttgtaatttcgaagaggtggggaattttgttgaatttgtttattgttttttttttggagtttaagatagtgtttagattaatataggtatttaataaatatttgtagaaagaatgtataagtatttatggttaggcgcggtggtttatatttgtaattttagtatttttggaggttaacgtgggtagattatttgagtttaggagtatgagaacggtttgggtaatatagggagattttttttttaaaataaattaaaaaaaaaataggttcggtacggtgggttatgtttgtaattttagtattttgggaggtcgaggtgagtggattatttgaggttaaacgttcgagattagtttggttaataaaatgaaattttatttatattaaatatataaaaaaattagttaggtatggtggtgtacgtttgtaatttcggttggttggggaggttgagacgggagaatcgtttgaattggggaggcggaggttgtagtgagttgagattattttattgtattttagtttgggtgatagagcgagattttattttaaaaaaaaaaaaaaaaagaaaagaaaaaaatttaaataataaataaatatttaattttttaagatttaaatagttttgtttttagaatgatttttttattttgagaaaataaaatagaataaaatatttaatttttagtttgtaggggtatacgttgttttgcgaggtatattttgtaattgattttaggtatgaaaatttatatattttttttgaattgtatcgtggaagattgattggaaaacgaattgaatatttaaaaataaataatgattttaaataaattgagttttatgtttggataattttttttattttgggaggaaggggtgaagagtttttagggtagagggttttgttttagttgtttttgagttttagggttttttttttgtagttttcgttatatattaattttttcgtaagaggttttttgagttttgggagttttgttttttacgtaaaggggtagatttgtgttattattatcgtttatatagttgttattttagttgttttttttgttttgttagtttgatatttttttagtcgattttaagtttagtgtattattttagttgacgtgggtgagcgtttcgtggggatagtagatggatggaatgataaatagtaggatggtggggatagttgagaagtgtttttttttgtgtcggatttgttggttgtgtacgtgtttcgacgtagtttagatatattgtgggggtagcgtatgtgttagggtttagtcggcgcgcgggtttttatttttttttttgttgttaatcgtgtttatttatatagttaattagttaattagttagttgttttggtttgagttttagtagaagtagattttaagatagtagtttttttgatttagaaagcgtgagatggtagaggggaagtgagattgaaagagaaggtagagtggttatgagtagttattgttgtggatagttagggtttagtgttgttgggtttggttaggtgattgtgtagaatttgttttagggttgtttcgtgttgggttatttatttattaattgttggtttttattgtttaagtgttgttttagggtgttaattttatggaattttggtttgattcgtatttagataaaattcgtaggtagaaatttttaggtttttagtaagaagttattatttggaatagcgagtgtgagggtatggttatttgtaatattgatttgtgtgtttgttatatattaggtattgagttagattaggggtagaggaaatataaaatgggaggtttaggtcgggtacggtggtttatgtatgtaattttagtattttggaaggttgagttgggtggattatttgaggttaaaagttcgagattagtttaggtaaaattgtaagatttttgtttttataaaaattgttaaaattagttaggtatagtagtatatgtttatagttttagttatataagaggttgaggtgggaggattattagagtttaggagttcgaggttgtagtgagttatgttggtattagtgttgtattttagtttgggtaatagagtaagttattgttttaaaaaaataataataatttgaaagttggaggtttgtttagagtttagtggggagatggatatataagtagatgtggtgaatattttggtagagttttgtgttaaatgtaatagtagatagaataattacggattatttttgggaagtttcgtagcgtagggaatatgagttgggttttgtgagtaagattcgagtttagggttacgtaagtgtagtttatagtttatagtttttttatatatatg

SEQ ID NO: 1656 - DNA, 2476 bp, Artificial Sequence
  chemically treated genomic DNA (Homo sapiens)
agatttttgtttatttattgatatgtattttttagttatagatttatgtttttttatttgttgaaacgtttttaaatatcgtttttaatgttttgtttgtgtcgttggttttttgttatttagttaataatgaaatagttttagtgaatttgtagtagtagttgttttagttttagtgtttatttatttttgtagttgaattattttgaatattttttgatggtgtaagagatagttttattattttttttattggtttttttttgtgttcgttacggttggtatgagttattttttgtgtatgttatggcgagaagggatgaatgaggaaagatagggtggttttatatttgattttgggatagttattgggtaaggaagggtttggggttgtttttttaggttttttttaatgcgtgaaggtttgagttaggttagttggtagaggtgtgtgtatgtttaatttagaattgaatgttgaaggttttgtgatttaaagggaagaattattgggatttgatgttttagtaggggaaattttaagtttaaaaagttatagttagaatttagaattgtgttgttattttgtttttgagtttttttttacgtttagttttttttttgtggatgatcgtgaagttgtttatatgttgttttttttcgtgaattgatttttgtaaatagtgataggattttatttaaatatttttgatttttaagggaaaaatagagtaatttttttttagtgtttttttgttgattttgtttgggggagaggttagtagagttaaggatgattttatttttttttagtaggattttttgggatgtatagaatttttttttttagttgtttttttgtgattagttatatttaatttataaatttttagtgtagatgatggggatatttaatattgggtttgtttatattttagtaggaggtgaaatatataaagtaattattaggttttttgaagttttaaggattttttacgttagtggtagaggtgggaggtgggttggcgaggtggggtagtttaggaattgcgttggtggggataggaaattgggttgaagggagatgtaaggttttggtgggaaataaatggtattgtgttgttgacggaaaaagattttggtaggattgttgttgtgagtgttttgtggtttagaaaggaattttttataggttggattaattattaaaaatgtttttatttttaggagttttcggcgtgtagtggagtttcgttgggggaaatgatagtttggattatgggcgttcgcggtttggataagcgaggaagtttttttaaggtaaaaggaagttttgattgggattttaattcgtcggtttgttgtttgagtttgggagttgcggtgttttatggagttgttgagggaagtttgttttttgagttagtatcggttaagggagtttgttcgagtttagttgttgattgttattagggtttataataggttgcggggtttgtgatttagtgtttttatataggtataggattcgggtacggagaggggtcgtgttgtgtaagacggttgaggttgtttttatttgagagttgtttagtttgtttttttttagttgtagggttttatggtggaagttgtattttgttttttagtgaattaatgttgtcgtttatgtgttttttttttggtttgtttgtatgaattattgaagggttttaaaataaataaataaataaataaataaataaaaaatagttttttggatcgtattttagaatgatgaaatattattttttggtatattttattaaatatttttaaaggttttttatgataatgaggaagtatgattataattgtttaatttttttgtgtttatattgatgttaatgggattaaattattttgttagtttaatgagataagattttaaatgggtgttttatgtattttgtgtgtgtgtatttaatgaagatttggtggtcgtttttgatttatatttgggaattaattttttttttgtggttttttgttttgtttttttttatttattttcgaattaaggtatttttagtatagaaaattttgaaaatatagaattatgtttaaaaaggtagaaaaatggaggtaaaatatgtatttgaaatttgttataggtagtgttttaatattaggttttgtttttagaggaggaagacggaggagattttattatcgaggataagtgattatgtttaataattaattaatttttatgggttggaagtatttattaatatttatttatatgttttttgtttttaagagattaaaattgatatattgtgttaattgttgattttataaaaaaaaaaaaaaaaaaaaaaaattattagaagaatttgttgataaagtaaagtttatgagatttattgaaataaggaagaatattattaggatatagttttatttatgtttaagttaggggagattaagaggt

SEQ ID NO: 1657 - DNA, 2476 bp, Artificial Sequence
  chemically treated genomic DNA (Homo sapiens)
gttttttaattttttttggtttagatatgaataagattgtgttttggtgatgtttttttttattttagtaaattttatgaattttgttttattagtaggtttttttgatggttttttttttttttttttttttttgtagagttaatagttgatataatatattagttttggttttttggaaataggaaatatgtaaataagtgttaatagatatttttaatttataaaggttggttaattgttaaatatagttatttgttttcggtaataaaatttttttcgttttttttttttgaggataagatttggtgttggaatattgtttatgatagattttaagtgtatattttatttttatttttttatttttttaaatataattttgtatttttaaaattttttatattgaggatgttttaattcgagggtgaatgaaaggaaataaagtaaaaagttataagaggggaattgatttttaagtgtaaattagaagcgattattaagtttttattaaatatatatatatagagtatataaaatatttatttaaaattttattttattaagttagtaaggtaatttagttttattaatattaatatgaatatagaagagttagatagttataattatgtttttttattattataagaagtttttggggatgtttgataaaatatattagaaaataatattttattattttaaggtgcggtttaggaagttgttttttgtttgtttgtttgtttgtttgtttgttttggagttttttagtgatttatataaataagttaaggagagaatatatggacgatagtattgatttattggaaagtaaagtatagtttttattataaaattttgtagttgaaaaaggataaattgagtagtttttaaataaagatagttttagtcgttttgtatagtacggttttttttcgtgttcgagttttgtgtttgtatgaaagtattaaattatagatttcgtaatttgttataagttttggtaataattagtagttgggttcgggtaagtttttttagtcggtgttggtttagagagtagattttttttagtagttttatggagtatcgtagtttttaggtttaggtagtaagtcgacgagttgagattttaattaaggtttttttttattttaaagaaattttttcgtttgtttagatcgcgggcgtttatggtttaagttgttattttttttagcgaggttttattgtacgtcggggatttttgaaggtagagatatttttaatggttagtttagtttgtaggaaatttttttttaagttatagaatatttataataatagttttgttaagattttttttcgttaataatatagtgttatttattttttattaaggttttatatttttttttagtttaattttttgtttttattagcgtagtttttagattgttttatttcgttagtttattttttatttttgttattgacgtagaaggtttttgggattttaggaagtttaatgattattttgtgtgttttattttttgttgaaatgtgaatagatttaatattagatgtttttattatttgtattggaagtttatagattgaatgtggttgattatagagggatagttgaagaaggaggttttgtatattttaggaaattttgttggaagggggtgaggttatttttagttttgttggttttttttttaggtaaggttaatagaagggtattgggaagaaattgttttattttttttttagaaattagaaatatttggataaaattttgttattgtttatagggattagtttacggaagaggataatatgtaaatagttttacgattatttataaaaggggagttgaacgtagaggaaaatttagaggtagggtaataatatagttttgaattttaattgtagttttttgggtttggaattttttttgttagggtattagattttaataatttttttttttgggttataaagtttttaatatttagttttaagttaaatatatatatatttttgttagttgatttggtttaggtttttacgtattgaggggggtttgggggagtaattttaaatttttttttatttagtgattgttttaggattaagtataaaattattttgtttttttttatttattttttttcgttataatatgtataggaggtagtttatgttaatcgtgacggatatagaggaaggttagtgaagggaatagtgagattgttttttgtattattaaggaatatttaaagtggtttagttgtaggggtgggtaggtattgaagttaaggtagttgttgttgtaggtttattgaggttgttttattattagttgagtggtagagagttagcgatataaataggatattgagggcgatatttagggacgttttaataagtggaaaagtatgaatttatagttgagaagtgtatattagtgagtgagtaaggattt

SEQ ID NO: 1658 - DNA, 2463 bp, Artificial Sequence
  chemically treated genomic DNA (Homo sapiens)
gtgatttgtttgtagaaataattttgaaagttttttgaggaaaataaaaattaagaagaatattttttttttttttttatataaattaaaatttaatagtattaaattattgggattagaaattaagtaatgtataatgtggtttttgttgagttaaataagatgttatataatggagaagaatttgaaaatgtataaaaaaattaatttatattattagaatttgtagtgaaattaaatttatgttaaataaaattagtttgtaggtgtataaattatgagggttttgtatttacgtaatataggtagttataaaaatatgttattgtattgtgtaaagatgtatagttattttatttggttggttttgtattttgtattttttttagttttggtttttgttgaattagaatttttagtatatattgtgttgtatttttgtaaatgattttttaaatggaattttgtatataatatattgtaatattgtatgataattatgtgtgaaaataatttttgaaatattttttggttgtttttttttttttttagagtaagaatatatttatgtattacgtagtgttatggatagatgaaattcgaattagggtttgtggttagataatgtatcgtgggggtgagtagaaaagtttatattttttagaagttttttttgatatggggtaaaagttaaggagtagaaggaaaagattatttttttatttgaaagtgtttttattgttatttagtgttgtatttggtttagtgggatttagagtaaattataggtaatttgaattcggagttagttggggttttgtagatagttttattttgtttttacgtaatttttgtaatgttttgggtgatagtttagtgttgttgtaaaattgatagcgtagaggtttggatttttcgttgttatattttttatgtttggaagggtgtttggtatatattaatagtaagtgtttaataaatttttgttggttgaaggaaggaaaatatgagtttagaagggtttttaatttattagtgggagagattcgtaaagattagaatgagaattgaatgggttgtttgtttttgatatttataacggattaaaagatgatagtttaatttatatggttgtttttttaattttttaaattaagattattatgttttgttgatttaaagtaggttatagtttttggatgcgaggtagttttgtagttttcggtgggacgagagcgggtttagaagaggaaaaggtagcgtgggtagaaagtaatattataagacggtttttggttttgttattgggtaatgttttttcgttaaaattataatataatatgtgtttttatttttttttttacgtaggtattttttattttttaaattgttaggaaatagatttgggtgaaggttggagggaataagaggagagtaaaaatatatatgttgggtggaggaagaggagaacgtatttttaaatttaaaaatatattatagttgaggtgggaggatcgtttgattttaggagtttgagggtgcggggagttatgatttcgttattgcgttgtagtttggacgatagagtaattttgttttttttttataaaaaagtaaaaataaaaatatgttataaaagttgaacgtcggttaaaggaagggatttttttttttttttatgttgtatgcgttgttaaatatttttattttagtattatttttatattttcgggatatagaatagaaatagaaattgttgaagtagtttatattatgtggaggttataattttagatttataagaaaatataaaggataggaaatttagttatgaatgtttttatttataaatgcggtttcgtttttattgggtagttgttatttttattttttttaagagatttgaaatgaggtagcgttttaatttttaacgtttgtttatgtcgttatgtttggttatatttagttatttttggttttttattagtagttttagagaaatagaaatagtataagaaggatttcgaagggtatagtgtgtgtggaatataggtattttaattatttggtagtatttgatagtaaaattttaagtgtttttattttttcggtttatttttatgatggtgaattagagattaaaagtattttttgttatttggttaattttaatttagttggaaatatgggaaagaaatcgtttaatattgtaaaattttaaatacgtgataaggaaaggaaggaaagaaggtagagaggggttaggcgcggtggtttatgtttgtaattttagtattttgggaggttaaggtgggtgaattatttgaggttaggagtttaagattagtttggttaatatgtgaaattttatttttattaaaaatataaaaattagtcgggtatggtggtaggtatttgtaattttagttattcgggaagttgaggtaggagaattttttgaag

SEQ ID NO: 1659 - DNA, 2463 bp, Artificial Sequence
  chemically treated genomic DNA (Homo sapiens)
ttttaagggatttttttgttttagtttttcgagtagttgggattataggtgtttgttattatgttcggttaatttttgtatttttagtagagatggggttttatatgttggttaggttagttttgaatttttgattttaagtgatttatttattttggttttttaaagtattgggattataggtatgagttatcgcgtttggtttttttttgtttttttttttttttttttttattacgtatttaggattttgtaatgttaggcgattttttttttatatttttaattgaattagagttaattaaatgataaaaagtatttttggtttttaatttattattatgaaaatgggtcgaaaaaatgaggatatttagaattttattattagatattgttagatgattaaaatgtttgtgttttatatatattgtgtttttcggagttttttttgtgttgtttttgtttttttgagattgttggtaggagattaggagtgattaggtgtgattaggtatgacggtatgagtaggcgttaaagattggagcgttgttttattttaagttttttaaagaagatgaaggtaatagttgtttaatgaggacggaatcgtatttgtgaatggaagtatttatagttgggttttttgttttttgtatttttttatagatttgaagttgtaatttttatataatatgaattattttaatagtttttatttttattttgtgtttcgggggtgtgggggtggtattagagtgaaagtatttggtagcgtatgtaatataaaaaaaaaaaaaaatttttttttttggtcggcgtttaatttttataatatgtttttatttttatttttttgtagggggaagatagggttgttttgtcgtttaggttgtaacgtagtggcgggattatagtttttcgtatttttaaatttttgggattaagcgatttttttattttagttataatgtatttttaaatttggaaatgcgtttttttttttttttatttagtatgtatatttttattttttttttattttttttaatttttatttaagtttgttttttggtaatttgagaagtgagaaatgtttgcgtgggggaaaaagtggaggtatatgttgtgttgtaattttaacggggaaatattgtttaatgataaaattagggatcgttttgtgatgttgttttttgtttacgttattttttttttttttgagttcgttttcgttttatcgaaggttgtaaggttgtttcgtatttagaggttgtgatttgttttaaattaataaagtatgatgattttagtttgaagagttgggaggataattatatggattgagttgttattttttggttcgttgtaaatattaaaagtaggtagtttatttaatttttattttgatttttacggattttttttattgatgagttagaaatttttttaaatttatgtttttttttttttagttagtaaggatttattgagtatttattattaatatatgttaggtatttttttaagtatggggagtatggtagcgaggagtttaagtttttgcgttattaattttgtaatagtattgaattgttatttagggtattgtagaggttacgtgaggatagggtggggttgtttgtaggattttagttaatttcgggtttaaattatttgtgatttgttttaagttttattgagttaagtatagtattagataataatgaaaatatttttaggtgggaggatgattttttttttttgttttttaatttttgttttatattaggaggagtttttgagaaatgtgagtttttttgtttatttttacgatatattgtttaattataaattttggttcggattttatttgtttatgatattgcgtggtgtatgaatatatttttattttaaagaaaaaaaaaaatagttaaaggatattttaaaaattatttttatatatgattattatatagtattataatgtattatgtgtaaaattttatttaaaaaattatttataaaagtataatatagtatgtgttgagggttttagtttaataaaagttaaggttaaaaaaggtataaggtataaagttaattaaatgagatgattatgtatttttatatagtataataatatgtttttgtaattatttgtgttacgtggatataagatttttatagtttgtgtatttgtaaattggttttatttaatataagtttaattttattgtaggttttgataatgtagattgatttttttgtgtatttttaaatttttttttattatatagtattttatttaatttaataaaagttatattatatattatttggtttttggttttaataatttgatgttgttaagttttaatttgtatggaaaagggagaaaagtgttttttttgatttttattttttttaaggggtttttaaaattgtttttataagtaaattat

SEQ ID NO: 1660 - DNA, 2483 bp, Artificial Sequence
  chemically treated genomic DNA (Homo sapiens)
gaaggaatggtatggggtggaaaagtttttttttttttttagggttgggttttttttttgttgttttttgtttttttttgtaggtttgtttttttttttttatattgttgttgtttatatattatttggttagagttatttggtttttttttttttttttagataggttattgttttttgatataggtgttttaattatttgtgtgttttgttatggattcgagtttgttatttttatggtaaaagttgatgtgtagatttaagggattatgtagaatttttgtattattagcgttagaaaatagtttagatttatagaaatggatcggtaagttaaatatttttttgtagaagttattgatagttttgttttttttattttgtatatatatagttatttattggtatatgttggggattggttagggtatatatatatatttaaatttgtatattttgagttttatagttagttttgttgtgttatacgaaaaatttgtgttatatgaaaatttgattttttatatataagtgggttttatatttttcgaatgttgtatttttaatttttgtttggttgaaaaaaaatttgtatgtaagtgtaattgtgtagtttaaagttgtgttatttaagggttaatggatatatatatattttttttttaattgaagaaaagtttatttttagtggttagtttttattttgtgatgtgatattattttagtattgtttgttatttttttgaatattattaaattgatttaaaatatttttttaatttgtttaattaagaagttggaatttaaaaaattttattaggagtgtttcgtgtgttttttgtaatatttagtttgttatgaagttaattagttgtgttatagtcgaatgttagtaaaagaatgttaagttgtaaaaggagattagaagtatattttgtgatttattttttggtaggtggtattgtttgtttgaaattatatattagtgttattatatatagttaagagggtttttagaatggattattttattgttttttttttatttaagaattttattttttgatatagatggatgtagggatgggagtcggggtagtttgggagatggaatttggcggtttaggtgttgaagggtcgagatagatttaggatggttaatgataggaaatttatttggttgtttaaatacggtgttaggtaattagtagttatttaggtaatcgatggggttggggaagtttagtaagaggtgatagcgggttttgatgataggattgatttgttttcggaggtaggttatggaagtaggtattatttagagacgtaggtaggtggttggttttggggacgtttgttagttgtagggatgggacgttaggttttgggaagagtaagagtaagatagtattttaggattagggtaattggagttcgtggatgttgttaagaaggaggtgggtattggggaaagagatgtaggagcgagtaggtggtttaggatgttaggttcggtaggattttaagagtaagtagatttcggggtagttgaagggttaagaattgtggtgttgtgaagtggtttttaggattttttaggttttttttttaggaaggtttattaaagggttttaggtgtgaaaatagcggattatggaagtgggaataggacgggatatttttaagttgggagtttttggttagaagttattggattggaaattatggagggttttttttggaagggattgttattttatagtttgtgtgtgtgttcggggtgtgtgtgtaagtgagagtgtgtgtataggtatgtgagtatatataggttaatgtgtagggttgtgagtgtgtagagttgtaagtgtgtttatatgtgagtgtgtacggagttgtgagtatgtgttggtgtgtgagtgtgtgtaggtatgtgattgtatatatatatgtgaaatattggttgggaagttttttttaagtggttagaagatggaatgttgttattttagtaataattttgtgtgcgaggtttaagcgtgggttgtgtttataaggtagggattggagtattatttttatttttttagaaggtgttcgtttatgtttaatttttatttattagatgggtagattgataagtgagttttgatataataatttttttcgttttgaatagagagcgttagaaaaggaagttagaagaggttttaggttgtttttattttgttggggtttttgtttgggtttttgtaatattaggagagtgagggtttttattttttagaaaatgtggtttggattggggagagaaatagggttatgatcgtcggagagatagggttgaagtaaagttagaattttgagtgattttagatttaagattgttttttttgtggttttgtaagtagtgaaggtcgtagagaagattatagttatttattttttttttgttcggattttttttgttggggtttatgtagtag

SEQ ID NO: 1661 - DNA, 2483 bp, Artificial Sequence
  chemically treated genomic DNA (Homo sapiens)
ttgttgtatgggttttagtaggagaaattcgaatagaaggagagtgagtggttgtggttttttttgcggtttttattgtttgtaaggttatagaagggataattttgagtttgaggttatttaaagttttgattttgttttagttttgttttttcgacggttatgattttatttttttttttagtttaggttatattttttgaagaatggagatttttatttttttagtgttatagaagtttaggtagaggttttagtagggtaaaagtaatttgaagttttttttggtttttttttttggcgttttttgtttagggcgaggggagttattgtgttaaagtttatttattagtttgtttatttgataggtggaaattaaatataggcgggtattttttgagaaaatgaaagtggtattttaatttttgttttataaatatagtttacgtttagatttcgtatataaggttattgttagggtagtagtattttattttttggttatttaagagggattttttagttagtattttatatgtatatgtataattatatatttgtatatatttatatattagtatatgtttataatttcgtatatatttatatatggatatatttataattttatatatttataattttgtatattggtttgtgtatatttatatgtttgtatatatatttttatttgtatatatatttcgggtatatatatagattgtggaataataattttttttaagaaaaattttttatagtttttaatttaataatttttaattagggatttttaatttgaaaatatttcgttttgtttttatttttatggttcgttgtttttatatttaggattttttggtaggtttttttgagagagaaatttaagaagttttgagaattattttatagtattatagtttttgattttttagttgtttcggggtttgtttgtttttggaattttgtcggatttggtattttggattatttattcgtttttgtatttttttttttagtgtttattttttttttgataatatttacgggttttagttgttttggttttggaatgttgttttgtttttgttttttttaaggtttggcgttttatttttgtagttgatagacgtttttaaggttagttatttgtttgcgtttttgaatagtgtttgtttttatggtttgttttcgagggtaagttagttttgttattaggattcgttgttattttttgttggatttttttagttttatcggttgtttgggtgattgttagttgtttagtatcgtatttaaatagttagatgggttttttgttattggttattttgggtttatttcgattttttaatatttggatcgttaggttttattttttaggttatttcggtttttatttttgtatttatttgtgttaggagataaaatttttagataaaaaaaaaatagtaagataatttattttaagaatttttttggttatgtgtaataatattgatgtataattttaaataagtaatgttatttattaagaaatgggttataaaatgtgtttttgatttttttttatagtttggtatttttttgttggtattcgattataatatagttaattggttttatgataaattagatgttataaaaggtatacgaggtatttttaataaaattttttaaattttaattttttagttaagtaaattaagaaaatattttaaattaatttaatgatgtttaaagaagtagtaagtaatattaaaatgatattatattataaaatagaaattagttattaaaaataaatttttttttaattaggagaaaagtatatatatatttattgatttttgaataatatagttttgaattatatagttatatttatatgtagatttttttttaattaaataaggattgaaaatatagtattcgagggatatgaaatttatttatatatggagggttaagtttttatataatatagatttttcgtataatatagtagggttgattgtgggatttaaggtgtgtagatttgggtatatgtgtgtgttttggttaatttttaatatatattaatgggtgattatatatgtataaaatagaaaaaataaagttattaatagtttttataagaagatgtttggtttatcgatttatttttgtaaatttgagttattttttgacgttgatggtgtaaaggttttatataattttttagatttatatattaatttttattatgaaaatggtaagttcgggtttatggtaaggtatataggtgattgggatatttgtattaaaagatagtggtttatttggaaagaaggaagaaagttaggtgattttggttaggtgatatatagatagtagtagtgtggaggagagaggataaatttgtaggggagagtaggggatagtagggagagggtttagttttgaaggaggaggagggtttttttattttatgttattttttt

SEQ ID NO: 1662 - DNA, 2493 bp, Artificial Sequence
  chemically treated genomic DNA (Homo sapiens)
gcggttttatttttttagtttcggtttcgcggttatcgcgtagttttagcggagggggtagttttttcgcgtcgcgcgcgttttgtttgttttttttgtcggattgacgtgagttaaaatattggttatatgtttagcggtaataaattgggtatgagcgtaaatatatttgggtttcgatggtttttttagttgttatatggtaggttttgcggggagggggtttttatttcgtttcggttttttgtttttaaacgcgcgggtagatttttttttttttgcgtttttttgagtaggagatttgggattttaggttttttttgattttcgtttttttttcgtttttagtagtgttttggatttcgtagtttttggcgagttcggattgttggttaataaggtcgttatttataaattgttcggtcgttaagacgttataaaattaaagggttagatgtggtacgttatttatgtgtgaaatcgcgtttatattagatacgcggatttaaggtcgatagtacgatttcgcgggaggttatagatttttcgtttcggttttaggttttttttttagtacgattttttttttaggttgaggggtgtcggttttgtcgggaaagggatttatttttgtagtttaggaggaaagtgattttagtgcgtttgtgttaaaatgttatttgtttaggattaaaggtagtttttggggtttattttcgtagttttttttttttttttgtttttggtttttttttattacgggtttttgggaggttgttttattttttaggtagttgatacgttttatgggatttagatttgatatagtaagggtagtgtgttagagatgtttaattttgtgggtgggcgggatttgagggtggggttttttgagttttgagggaaggattttgggaagcggagtagtttatttggttgagggagtatttgaaattatttttgtttcgggcggtggtcgattttagtgtcgtatgttatttgttttatttaatttgaggggtagtcggagtattgggagaggtagttttggtttcggaatatggaattcggtggttttgggtgttgtaggaaagggaagtaaatattttgttttaatagaaaataatcgttttgttttttttttttagaaggcggttttaggattgtatgtttttaaattggttatttcgtattttatttatatgaatttattaatagttattgtttttttattgttattattttattattttttgaagtgaattaaattttttttgtggttaataagtattgagttaggttttttatttttttttttatttttaaaatatttggggttttttgaatggtatttttcgtttggttaaggaaaataagagatgaaaaatgttgttttattgtagggaaaaatataagtattttattttattattattagttattttaggtttgtgtttattagataattgtttttaggtggttgttaagggtggaaaaatgatgttgttgaaagagggtgggagagaaggggagaattaatatgagttgggggtggggaggagagatttatttgataggggtaaaaagagttataaaatgaatttttgaatttgaagtgttgagtaggaatagtgattttttgggtttgtttttttgggttttagatgagtttttagaaagttttagttaattgtagaaaaatttgggattagttttagggttataggagtggttgattttgggaaattatattgttttttattttttttttttggatttttatatttttatttatggttaaaaattaaattatagggtttatttttgggtttatattatttttaagtggaagcgttgagattatagattaattgtttttttgggtgaaaatattgttttatgattaaaattagataaggggatttgaaggtaggtttttatatttgtagttttcgtgggaatgggtgtttttgttttataagtgttttgtgaagaagtttatgttttttttttgtatgtattatagatatgtgttaggtagaggattgagacgtagataaggagtttagaaagttagtgtttggtgtttttagggtggaaaattgagagatacgaagtaaagagtatattaaggtaggttttatattattttttagttaggaaaatttattttaaattagtaaatgtagtagggtatttattagttaattgataataaaaatttatgataaagaagatgtagtggggagtaagtataaatgaaatacgattgtttagatataatttttgttttttttttttggttttatttagtaattcggtgttaaattttatatattatattttttaattttaatagattgtatgttgtttttagttttattattttttatgttatttttattttagaaatatttttgttttatttatggatttaaaatttattgattttttatattggaaaaatttttttttacgaagtttttcgtagat

SEQ ID NO: 1663 - DNA, 2493 bp, Artificial Sequence
  chemically treated genomic DNA (Homo sapiens)
gtttgcggggagtttcgtggaggaaggtttttttagtgtgaaaagttagtgaattttgagtttatgagtaggataggaatgtttttgaagtaagaatagtataaaagatggtggaattaagaatagtatgtaatttgttgaggttggaggatgtagtgtatgaagtttagtatcggattgttgaataaggttaaagagaagaaataggagttgtatttaagtagtcgtattttatttatgtttgttttttattgtattttttttgttatggatttttattattagttaattagtagatgttttgttatatttgttggtttaaaatgggtttttttaattagggaatgatgtaaagtttgttttgatatattttttgtttcgtgttttttagttttttattttgggagtattagatattgattttttaagttttttgtttgcgttttaattttttgtttagtatatatttgtggtatatgtaggaagaaagtatgagtttttttatagggtatttgtgagataaagatatttatttttacgaagattataaatgtgaaggtttgtttttaaatttttttgtttaattttggttatgaagtaatatttttatttaaagaagtaattgatttgtaattttagcgtttttatttggaggtaatgtaaatttaaaaatagattttatagtttggtttttaattataaataaagatgtaaaaatttaagaaaaaagagtgaaaaatagtgtaattttttaagattaattatttttgtagttttgaagttagttttaggtttttttgtagttaattaaagttttttaggagtttatttaaagtttaagagagtaaatttagagagttattgtttttgtttagtattttaggtttagaggtttattttatagttttttttgtttttattaaatgggttttttttttttatttttagtttatgttggtttttttttttttttttatttttttttaatagtattatttttttatttttaatagttatttaaggatagttatttagtgaatatagatttggggtaattggtaatagtaaagtgaaatgtttatgtttttttttgtagtagggtaatattttttattttttattttttttggttagacggaagatgttatttagggaattttaggtgttttgaagatgaaaaggaaggtagggggtttggtttagtgtttattaattatagagagaatttggtttattttaagaaatagtaaaataatggtaatggagagataatgattgttaatgaatttatgtgagtaaagtgcgaggtgattagtttggggatatgtagttttaaggtcgttttttgaagaaggaaagtaaaacgattgttttttattagaatagagtatttattttttttttttgtagtatttagggttatcggattttatatttcgaggttagggttgttttttttagtgtttcggttgttttttaagttaaataaggtaggtgatatgcgatattggagtcgattatcgttcgaggtaagaataattttaggtgtttttttagttaggtgaattgtttcgttttttaaaattttttttttagggtttaggagattttatttttaaatttcgtttatttatagagttgggtatttttagtatattatttttgttgtgttagatttaggttttatgaaacgtattaattgtttggaaaataaaatagttttttaggggttcgtaataaaaggaagttaagagtaggggaaagaggaaagttacggaaataaattttagagattgtttttaattttggataggtggtattttggtataagcgtattgaaattattttttttttgggttgtaggggtgaatttttttttcggtaagatcgatattttttaatttggagaggagatcgtgttgggggaggagtttggagtcggggcgagaggtttgtgatttttcgcgaagtcgtgttatcggttttggattcgcgtatttagtgtaaacgcggttttatatataaataacgtgttatatttggttttttggttttatggcgttttagcgatcgagtaatttatagatggcgattttgttaattagtagttcgggttcgttaggagttgcggagtttaaggtattgttggggacggaggaggggcgagggttaggagaaatttggggttttagattttttgtttagaggggcgtaggagggagggaatttattcgcgcgtttgggggtagggggtcgaggcggggtggaagtttttttttcgtaaagtttattatgtggtagttgaaagagttatcgaagtttaagtgtgtttgcgtttatatttaatttattatcgttgaatatatggttaatattttgatttacgttagttcggtaaggaaaataaatagagcgcgcgcggcgcgggggagttgtttttttcgttggggttgcgcggtggtcgcggggtcggagttaggagggtggggtcgt

SEQ ID NO: 1664 - DNA, 2443 bp, Artificial Sequence
  chemically treated genomic DNA (Homo sapiens)
gaaataaaaataaaaaattaaaaaaaaaaaaaaagaaaagaaaagaaatgaaagatggaatttttaagagttttgggttattaaaatgaaataaatatatgtttatgttattattatgtaaaggtatttaagtttttgaaatatattttatttatttattttttaagagtttgagttgaatttatttagaaaattttatgttttgttaatagattaggtttatgatgatgatttttaaatttagtaatttatatattttttattgttattgttttatgtatgggtggttattgtattatttttattttgtagatgagggagtggaggtgttaggttgttaatgagttggttagggattgttggaagtaagtgttaggagtgagattggaatattgtatatttttatttggttgtttttttttcgtagaacgtgtagattgaaataaaatgagtttgataggggttttatttagtttcggattattgtttttttttgtagagttagttttgatgagggttatttttataggaaagaaattagtagaggaattagttttggatttttaagaagttaaggtgtattataataattttgtttttaaaatttttgggataggttaagtagtttatttattaaatgtatatagaatgatcgttatttgtttagtagatgagacgtttgggaggttaagagaggaaattgaagtttatgtggaggtttgtggtttatagtagttttagttattaggttttttttttttttttgaaagttgtagagatgtgtatgtttgtagtttgttgagaaatttggtttcgggttagttaatttgaattttatttatatatatttttttaaggtgtgagttgagaaggggtttttagatgtagatgtttaggaataaattttaggtagttggtgggatttgttttttggttattgtttatgtttttttcgttttttttatttttgtatttattttgttttagatatttggttttgtgtagttttttttatgttagataggaggtaatatttattggaagttgttggtgtcgtagcgtgttggtttgggttgagatggtgtgaaaattttgttcgtttcgttgttttttaatttttttaggtagtgatagttttttggtttgttttattggtaacgtttgtcgtggggttttattaatttattatatttttaatgtgtagttgttgtaggtagtgcgattttttggcgtttcgttgggttgttatatttggaattgatttgggatttaaaaaggttgtggatcgaggaaattttaaagcgttgtttttttttatttttggttatttatttttgagttgaggtagtgggatttggttaagttgagttaaagtgaaattgttgaaattaagaaagatagtagttaacgtgacggtagtgggtggtgagaattttttttttttttttagtttcgtggattgttagttcggacgtttgagtggggtttcgttaattttgtttgttgtttttgttgttaggtttggtattcgttttttatttttatatgattgtttgttttgagtttagtgagtgttgtttgtatttttggttgtcgtagatagtagtttgattttttaagttggatattgttttgatttttttttggtttatagattatattataattttttttttttttataagcgtaagtatttttttgtagtatttaaaggtttttgacgtagtggaggtttttaagatttttttttttttaagttggtgtatcgttttttttttatttcgtttttacgttttaaatttaattgtatggatattattaattgtatgttaaatggtgatgttagaaacgatttttcgtaatgatttagaaaaagttttattttttataaaggtttttttttttttttttatgatttagttttatatatgattattgtttgtaataaagattaagttttgtaatttattatgttttttttcgatttttttgtttttatggtattgtttttcgttttatgttcgagtattttttttttttttttagtttttattttttggtgggttgtgttaatagtgtagtaagaggaatttttggaaggaggttaaatttggtttcggattatttttttttaatatatattggtttttgaaaattagattttgtttgttatttggtttgtttttttagcgttgtgttatttcgatggtaatgttgatggattttaagtttgtttcgtagagtaacgtataaggtttttataagtatattaattttaaaagaaaaattgttagatgtaaataatatttatatgattgatgttgtaaagatataaattaatttttaatatttatttttaaggaatattattttataggggtttgatgttgtttttaatttttttttaatataggtatttgtgttgtaggattttgtggtacgt

SEQ ID NO: 1665 - DNA, 2443 bp, Artificial Sequence
  chemically treated genomic DNA (Homo sapiens)
acgtgttataaaattttgtaatataagtatttatgttggaagagagttaaaggtaatattaggtttttgtaagataatattttttgggaatggatgttaagagttagtttgtgtttttataatattagttatatgggtattgtttgtatttgatagttttttttttaagattaatgtgtttatgaaaattttgtgcgttattttacgaggtaagtttgaaatttattagtattattatcggaatgatataacgttgggagagtaaattaaatgataaatagaatttggtttttagaggttagtgtgtgttgaagagaaatgattcgaagttaaatttggtttttttttagaaattttttttgttatattgttggtatagtttattaaagggtgggggttgagggaggagggagggtattcggatatggagcgggagatagtattatggggataggggagtcggaagggagtatgatggattgtaaaatttgatttttattgtaaataatagttatatgtaaaattaagttatggagaaagaaaaaaaaatttttgtgaaaaatgggattttttttggattattacggaaagtcgtttttaatattattatttgatatgtagttggtgatgtttatgtaattggatttgaggcgtaagagcggaatggggaggggacggtgtattagtttaaggggaggaaaattttgaggatttttattgcgttaggaatttttagatattgtaaagggatgtttgcgtttatgagaagagggagaattgtggtgtggtttgtaggttaaggggaaattaaagtaatgtttagtttgagaaattaggttgttgtttgcggtagttagagatgtagatagtatttattgggtttagggtaaataattatatagagatggaaaacggatgttaggtttggtagtaagagtagtaggtagggttagcgaggttttatttaggcgttcggattgatagtttacgaaattgagagggaggaggggatttttattatttattgtcgttacgttggttattattttttttgattttagtagttttattttggtttaatttggttagattttattattttagtttagaaataggtggttagaaatagaagggaataacgttttagagttttttcgatttatagtttttttgagttttaaattaattttaaatgtggtagtttagcgaagcgttaagagatcgtattgtttgtagtaattgtatattggagatatgatgaattggtggaattttacggtaggcgttgttagtggagtaggttaagaggttgttattgtttgggagagttaggaaatagcgggacgggtagggtttttatattattttagtttaggttagtacgttgcggtattaatagtttttaatgggtgttgttttttgtttggtatgggagaagttgtataaaattaagtgtttgaaatagagtagatgtaagagtggggaagacggaagaggtatgagtagtaattagagagtaaattttattagttgtttgggatttgtttttagatatttatatttgggggtttttttttagtttatattttagaaaagtgtgtgtgagtggagtttagattggttggttcgagattagattttttaataggttgtaggtatgtatatttttgtagtttttaaggaagggagggaggtttggtggttgaggttattgtgagttataagtttttatatgggttttagtttttttttttgattttttaggcgttttatttgttggatagatgacggttattttgtgtgtatttggtgggtgggttatttagtttgttttaggggttttgaaagtagaattattataatatattttggttttttgagaatttagagttgatttttttgttgattttttttttatggaggtggtttttattaaagttagttttgtagggagaagtaatggttcggaattgggtgaaatttttgttaggtttattttattttaatttatacgttttgcgggagagaggtagttaggtgggggtatatagtgttttagttttatttttgatatttatttttagtagtttttgattagtttattaataatttggtatttttatttttttatttgtaaaatgggagtaatatagtgattatttatgtataaggtagtggtagtgaggaatgtataggttattgggtttaaaaattattattataaatttagtttattgatagaatatggggttttttaagtgaatttagtttaaatttttgaaaagtaaataaatggagtatattttaaaggtttgagtgtttttgtatgatggtgatatggatatatatttattttattttggtgatttaaagtttttaagaattttattttttatttttttttttttttttttttttttttttggttttttgtttttgtttt

SEQ ID NO: 1666 - DNA, 2469 bp, Artificial Sequence
  chemically treated genomic DNA (Homo sapiens)
taaattttgtttgttatttgttttgtaaataaagttttattggaatatatgtatgtttatttgtttatgtattgtttttatgttgtagtggtagagttgagtagttttaatatagattgtatggtttttaaagtttaaaatatttattattttgttttttataaaaaagtttgttgatttttgttttaagaagtttttaaatagatttatatttaaaatgtagtaatggttaaatttatagtaatgattttttttgttaggaagatggaaggtttttttattgtaaaatatttgtagattttaatatttttttttgttatgttttgtttaatagatagataggtatggagaaggtattatgtggtagtaagggaggtgggtgttaagggtgtattataatattgggaagtatattttttaatattaggagtttatgtgatttagttgaagagagaatatttgtattagttaaaagggaatatttagtagtatttaaataaaagttattttatatgttattaagtatattataagaatttttagaaagaagtattattttttgtttaatagtttagaggatttttattagtaaatgaaaaatgatagttttattttattttttaaatatgttaaaattattttgagttgttgggtattagaattgataggtgttatgtatttaagtttatttgaaaaatatattttaataatggagtgagattttgttttaaaaaaattttaaatgtttttttttaattgaaaaaatttattatttttagatagataagtaaataatttttgtaaattcgagttatatttttttttttttttttaaaatttagtttaatataattgaaaattgaagtttgattttttaagtttataagggataaaagagagataggatagatagaaataattggtaacgaggagttattgggttttggttttatgggagataatagtggttttatagaaggtaatggtggatttttagttaattgaagtttgggtggaatttagttgtataattaagaagttgaatttgttttattttatttttttataatataaagagtgtgaaaaggttattttaatgtttagagagtggttttttttggaaaatattttcgaatatattatggagtagtgttaattgtagtataaaatgttttagaaattttgtaatttatgagtttaatggtatatttgaggattacgaggtttttttcgtttatttataatagttcggtgattgatttagtagagaggaagtaaaatgaataattttgattattttttaatattttttttgttttgttgattttagagttttaggggtatagtatttgtaggaattgtatgtttttttggtaatattttaaaattaaatttaaaagatgaagaagaaaaatggttattagatagttataaatatgttattatttgtaaatggtattgttttgtggatatgaagttttttattgtttatttgtttttaagtttaacgatttatatataaaggtgtaaggatttattgatattgtgttttttttttgttgatattattagttcgagaattaaggataatggatagttgtatataagtttaagttttgtatttattttttagtttttttttttattttttagttgtgtttgttttttttttgaaatttgtaaagtaggaataataataaagttattattttttgtagggttttgaaggatttttttgagataatgtaaagtattaggtatataattagtttaaatgtaatttaatcgtgtttttttattttaatatatatgttattatttatttttagtgtagagaattaatagaatataaataattttgaagatttatataatatttatacgttgtaaaattttgtttgtggagtttttattgtagtttgtatgatttaaacgatgttacgtagttttttaaatatttttagatattaaggaattttatattgttgtgttattttttaaatgtttgtatttttttgttttttttttttttaatttttttgaatttgtttatttagtgaataaaattaggaagaagtggatgttgtaagaatatttatgtgtttaaaggttgtggttgttttattatagttatttattagtagttttagtacgtagttagagattgtagaaaaaagaattatttttttttttgatttgaggatgtatttttagagtgtttttggggtaatggatttaaaattaaaattttaaatgttagtttttaagtgtgaatttttttttagtatttttgttttttttttataattttttattttattgagttttagagagtagatagtttaggttttttgatttggtagattaatgaggaaggataattaaagaaagtttaaaggtattttttatattaaaatattttattttttttttattgtaggtgtagttaaaagtattaatgttatattt

SEQ ID NO: 1667 - DNA, 2469 bp, Artificial Sequence
  chemically treated genomic DNA (Homo sapiens)
gggtatggtattagtgtttttaattatatttgtaatgaaagagaagtgaggtattttggtataaaagatatttttaaattttttttagttatttttttttattgatttgttaaattaagaaatttaagttgtttgttttttggaatttaatgaaataaaaggttataaggagagaataaaagtgttgaagaaaaatttatatttaaaaattagtatttaaaattttgattttagatttattattttagaaatattttggagatgtatttttaaattagagaaaagaatgatttttttttttatagtttttgattgcgtgttgaagttgttggtaagtaattataatggggtaattataatttttaaatatataaatatttttatagtatttatttttttttaattttatttattggataaataaatttagagagattgagagagagagagatagaaaaatgtagatatttaaaaagtgatataatagtgtaaaattttttaatatttggaaatgtttaaaggattacgtggtatcgtttgaattatataggttataatgagggttttataaataagattttgtaacgtgtgaatattatatgaatttttaaaattatttgtattttgttgattttttgtattagagatgggtagtgatatgtatattaaaataaaaaaatacggttgagttatatttaggttaattatatgtttggtattttatattattttaagaaaattttttaaaattttataaagaatagtaattttattattatttttattttatagattttaaaaaaaaaataaatataattgaaggatggaaagggaaattaagaagtagatgtagaatttgaatttatatatagttatttattgtttttagttttcgggttaatggtgttaatagagaggaagtataatgttaataagtttttatatttttatatgtggatcgttgaatttaaaaatagatgagtaatgaagagttttatatttataaagtaatattatttgtaaataatgatatatttataattatttaataattattttttttttttattttttgagtttgattttaaagtattgttaaaaagatatataatttttgtaaatgttgtatttttaaagttttgaagttagtaagataggaaaaatgttaaaaggtgattaagattgtttattttgttttttttttgttaaattagttatcgggttattatgagtggacggaaaaaatttcgtaatttttaggtgtgttattaaatttataaattgtaagatttttaggatattttatattatagttgatattgttttatggtatgttcggggatattttttaagagaagttattttttgaatattaaaatgatttttttatattttttatgttatagaaaaataaaataaaatagatttagttttttaattatgtagttaagttttatttaagttttagttgattaagagtttattattgttttttatgaaattattattgttttttatggagttaaagtttagtaatttttcgttgttagttatttttatttattttgttttttttttattttttataggtttggagagttagattttagtttttaattatattaagttgaattttaaaagaaaggggaaaagtgtggttcgagtttgtaaaggttatttatttatttatttagaaataataggtttttttaattgagaaaagatatttgaaatttttttgagatagagttttattttattattgaaatgtattttttaaatgggtttaaatatatgatatttattagttttggtatttaataatttaagataattttgatatatttggaggataaaatgaggttgttattttttatttattaatagaaattttttgaattattagataaaggatgatatttttttttggaaatttttatagtatatttagtgatatgtgaaatagtttttgtttaaatgttgttaaatatttttttttaattaatataggtgttttttttttagttaaattatataaatttttaatgttaaggaatatgttttttagtgttgtgatatatttttagtatttattttttttattgttatatggtgttttttttatgtttatttgtttgttaaataaggtatggtagagagaagtattaaaatttgtaaatgttttatagtaagaaaattttttatttttttggtaaaagaaattattattataaatttggttattgttgtattttagatataaatttatttgaaagttttttagagtaggagttagtaaatttttttgtaaagagtaaaatagtaaatattttaggttttggaagttatatagtttatgttagaattatttaattttgttattgtaatatgaaaatagtatataaataaatgagtatgtatatattttaataaaattttatttataaaataagtggtaggtaagatttg

SEQ ID NO: 1668 - DNA, 2442 bp, Artificial Sequence
  chemically treated genomic DNA (Homo sapiens)
agtttaataattatattttggttataggttaaaatagtgtttataaatagttttataaaataagaagaatttttttgtattttttaaagtattaaatttgtgattttttttttttttttttttttttgagatagggtgttattttattatttagtatggagtttagtggcgtaattatggtttattgtagttttgattttttaggtttaggagatttttttattttagttttcgggtagttgggattataggcgagtattaacgtgtttagtaattttttttttgtatttttgtagagataagttttcgttatgttgtttaggtttgttttaaatttgtgggttaaggtgatttttttgtttcggatttttaaagtattgagattatagaggatagttattgagtttggttttatatttgttttaattttattttagaaattttattgtttaaagtagatgttaaaattttttagtagaagtaatggttgtgataaagttttagagtagagagttattaagtttgaaaaataatagtaggttatatgaatttttgaagaaattagtcgtttattttttttaaggagagaagtagttaagaagttgaaaaaatatgaaagttatattgtttattttattgtaatttttaaatttttttttgggtataagtttttttagaggataattggaaaggttatatatttagtgtatgtaaagaattttggtttgttttttattgtattaggaatgaaagaaagatattatcggttagtgtgtagggttttttggggagaagttgagttgaagtgatttagtatgttttatgttgtttgattaatgttaagcgagggggttattgagtgaaagtttatagtaatgttattttttgtaattgaaaatgttatgtaaaaaataaaatatgttaatagtttttgttgtttgttttatattttggagagttgtgtatattttaagttatttttgtaatttaaaagaattgtaattatagagattgtgaggggagtagttggtttgtaaagttgtttggggtaaatttgttagagtttatgagtaaatataatttgaaaatagaggttgttcgtggggaaattagttgtttttttaataaaataaaaggaagagttttgtttagggtaatgtgacgatgacgtgtaattgttttgtattaattataatttttttttttgtttttttattgtttagtttttttttattttatagtaagaaattgaggttgtatattgtatattgggaatatttaaattggaaataattaaaatatatattttatttatagtgggttttatgtgaggagaagtaaagattgttatagttttttgagtatatgagttaatgatgtgttttgtatttttttgattttttatattttaattgtttttgttttttatttgggggtagggaattttgagaggtatggaatatagatttgtatgagtagaaacgtatagtttttgagtatgtgaggggatggcgtggagaaggttgggtttattatgtggttttttggtattatttttttttagtttttttttttagtgttaaagtaagtatgttattaagaatgttttaaattagaaattggtttaagattattgtagtattttattaggttgtgtttttagaatatgatgaataaatggatttttaaaatgaagttttaaaaatgatagttaaaaaaggaatatagatttattgaaggaaaaaatttataaaagattttgtgtgtgtgtgtgtgtgtgtgtgtgtatgtgtgtgtgtgtatgtatgtgtgggtgtgtgtgtgtgttgtaagtatatttaatatatatttatattgaatgaagttattggtaaagtaaagtaaaattttcgttttttagatttaattaggatattattttgatggaggttaagttagtaaaaatatagttagaaattgggtataaagggtaaattgattgtaaattttggagattgtttgtatgattgggttgtatgattgaagtttaaaaagtaaaaagtgttttatatagaattgcgagtgtgtttttggttatggttagttataaagggaagaaatatgaaagttatttttaaaatgtttggagatagaaattttgtgggggtaaatttaaggggttagaatgtatttttatttattgtgtgagtttttaaattgtgaagaaatattatttttagaatgagtttaaagttgatttaaagtgataattaaaggtaatgaattgagaaataaaagtgtgaaagatatgaaatattttattcgtttaatttttataaaaatttaatgaaaaaatgaaaaagtgttttttttaatagtaatttatagtttttggtttagagttgggatatgtggaaggaatatagatatgtttttttaaattgtttggtatttttggattag

SEQ ID NO: 1669 - DNA, 2442 bp, Artificial Sequence
  chemically treated genomic DNA (Homo sapiens)
ttagtttaaggatgttaagtaatttgggagagtatgtttgtattttttttatatgttttagttttgagttagaggttgtgaattgttattgaggaagatatttttttatttttttattgagtttttatggggattaaacggataaaatgttttatgttttttatatttttattttttaatttattgtttttagttattattttgagttaattttgaatttattttagaaataatatttttttataatttgaaaatttatataataaataagaatgtattttgattttttggatttatttttatagagtttttatttttaaatattttgagaatgatttttatattttttttttttatagttagttatgattaaaagtatattcgtaattttatgtaagatattttttattttttaagttttagttatgtaatttagttatataaataatttttaagatttataattaatttgttttttgtatttagtttttagttgtgtttttgttaatttagtttttattaaaatgatgttttaattaagtttgaagaacgggaattttgttttattttattaatgattttatttagtatggatatatattgaatgtatttataatatatatatatatttatatatgtatatatatatatatatatatatatatatatatatatatatatagagttttttgtaggtttttttttttaatgagtttgtattttttttttaattgttatttttggaattttattttgaagatttatttgtttattatattttaaaaatataatttaataggatattgtaatggttttaaattaatttttggtttgaaatatttttgataatatgtttgttttgatattgaagggagaaattggagaaaaatagtgttaagaaattatatgatgaatttaattttttttacgttatttttttatatgtttaaaagttgtacgtttttgtttatgtaagtttgtattttatgttttttaaagttttttatttttaaatgaggaatagaggtagttaaaatgtggaaaattaagaaaatgtagaatatattattaatttatatatttaggaagttgtggtaatttttatttttttttatataagatttattataaatgaaatatatattttaattatttttagtttagatatttttagtgtgtaatatataattttaattttttgttgtagaataaaggggaattgggtaatgagaaagtaaaaaaaaaagttgtagttaatgtagaatagttgtacgttatcgttatattgttttgagtaaaatttttttttttattttgttgaaaaagtaattgatttttttacgagtagtttttgtttttagattgtgtttatttatgagttttgataggtttattttaagtaattttgtaaattagttgttttttttataatttttgtggttataatttttttaagttgtagggataatttaaaatgtatatagttttttaggatatgaggtaggtagtaggaattgttgatatattttattttttgtatagtatttttaattatagaaaatggtattgttatgaatttttatttagtggttttttcgtttgatattaattaggtaatataaagtatgttaagttattttagtttagtttttttttagaaaattttgtatattggtcgataatgttttttttttatttttgatgtaatgaaaaataagttagagttttttatatgtattgagtatatggtttttttagttattttttgagagggtttatatttagaagggaatttggaaattgtaatggagtgggtaatatagtttttatatttttttagttttttggttatttttttttttgaaaaaaataaacggttaatttttttaaaagtttatataatttgttattgttttttaagtttagtgattttttattttaaaattttattataattattgtttttgttgaagagttttgatatttgttttaggtagtagagtttttgaaatgagattaagataggtgtagggttaggtttagtggttgttttttgtaattttaatgttttgggagttcgaagtaggaggattattttagtttataagtttgagataagtttgggtaatatgacgagaatttgtttttataaaaatataaaaaaaaaattgttggatacgttgatgttcgtttataattttaattattcgggggttgaggtgggaggattttttgagtttgggaggttaaggttatagtgagttatgattgcgttattggattttatattggatgatagagtgatattttgttttaaaaaaagaaaaaagaaaaaaaagttataggtttagtattttgaagaatataggaaggttttttttattttataaaattgtttataagtattgttttggtttgtagttaaaatatgattgttaaatt

SEQ ID NO: 1670 - DNA, 2396 bp, Artificial Sequence
  chemically treated genomic DNA (Homo sapiens)
agtggtttacgtttgtaattttagtattttgggaggtcgaggcgggtagattacgaggttaggaaatcgagattattttggttaatacggtgaaatttcgtttttattaaaaatataaaaaattagtcgggtatggtggcgggcgtttgtagttttagatattcgggaggtcgaggtaggagagtggcgtgaatttgggaggcggagtttgtagtgaatcgagatcgcgttattgtattttagtttgggcgatagagggagattttattttaaaataaataaataaataaatttttaaaggagatttttttttttttaataaaaattatgtattggattagttatttttttaaatttttagtttaaaataatgtgggtagttttataaggaaatatatatattggattatatgaaatgaatcgttaatatttgttataaatttatgaaaatattaagtttaaatggtttcgtttaatatttatgtaatataattagtaaattttaggtattgtgcgatttaggtagagtatatgtgtgtatatgtgtgtgtgtgtgtgtgtatgtatgtatatgtacgtgtgtatatattttgtagagtttagggttttttgttaaatttttgggtttaagcgatttttttgttttagttttttaaagtgttaagattatagttgtgagttattgtattcgatatatgtagaaaatattttattgtagtataaaatatatatttgagaggaaaagaataagagagagaggtttttaatttaaatatagttaattaaggaaaaaataaaattaatatttgaatgaatattgaaatttttttaaaaaaagataaatgagggggaaattatataagtaagtaaggttttatatatatggtgttttagaaattaattagtggatagatttagaatttatatttttttttttaaaatgttttttggtagaagttattttgtaggataaattggaattaaaagagttatgaaaattgtataatgggatgaaggggttttttttgttggggaatagatagttgatatgttggatggggttagggtttaaataaaggtttttgttgagtgggagtaggtataagatagatggtttgttaaatattgttagtatgtttgcgtagtgtcgtgcggcggttagagtttggataatggttattagggtattgtgtagtagcgtattggttaattttagtttagttaaagttattgtttatttttgttggttttgtaaagattaaggtagtttttttgttttgaatgtattatagttgtttagtaaagtatttttgaagttttgtttgaatttttattgttaagaggggttaagtaaaaggtggttcgtgtaaggatttgttttaagtttatatgtgaagttgtttttttttaattaatttggattatttttgatttttatttttgggtaaaattttttagagttataggggtttttttttttagtgagtttttttttgtgtggttcgaaatgtatttgttggggatttatattttttagatttatattttttattgggattgatttatttgttatttttgtggaaaaaggtaaatattattgtaaattttattcggtgaattatggggaggcggtggttttaattaaacgtgtttgttttcggaagggggtttttggttttttatttttatgtatagaagaaaatagagtttaatcgggtttttgtagttaatggaaacgtatttggtttagttagttgttaggttgagtttttgttgttttgggttttaattcgtttttttcggttgtttgtagataaagggagagtagttgcgggttatgtagaggggatagtttttttggttttgtttatagttttaaagtaaagtagggggtgtagttattatttgggtatgttaggaaagggtgatggttgatcggtttagtatttttaatagtttaaatgtttttatttttttttaaaggtagtgtatatttatttttatttaattgaattagtgttgtatttattttaggtagttttttttgtttaaattagattatttttagttataaaattaagaaagtgtgtttagtagattaagttttaaaagtggatttgttaattatatttatagaagtaaagagagtaagagaatttttatatatttttttttttttttttttttttttttttttttttttttttttttttttttttttttttttttttttttgtttttttttttttttttttttttttttgttttttttttttttttttttttttttttttttttttttttttttttttttttttgttttttttttttttttttttttttttttttgttttttttttttttttttttttatgtatgtattatatatttttatt

SEQ ID NO: 1671 - DNA, 2396 bp, Artificial Sequence
  chemically treated genomic DNA (Homo sapiens)
ggtaggggtgtgtggtgtatgtatgagagagagagagagagagaaataagagggagagagggagagagagagagaaataagagggagagaaggagagagagagggaaagagagagggagagagggagagaggtagagagagagggagagagggagagaggtagagagagagggagagagggagagagggagagagagagagaaaagagagagagagggagagagggagagtatataaaaatttttttgttttttttgtttttgtagatgtagttaataagtttatttttagggtttaatttgttgggtatatttttttgattttatagttagaaatgatttaatttaggtagagggggttgtttgaagtaaatatagtattggtttaattaggtggggatagatatgtattatttttaaaagaagataaagatatttgaattgttggaaatattaaatcgattagttattatttttttttaatatatttagatagtagttgtattttttgttttgttttgggattataggtagagttaaggggattgttttttttgtatgattcgtagttattttttttttgtttgtaaataatcgagaggagcgagttggagtttagagtagtagagatttagtttagtagttgattgggttaggtgcgtttttattggttgtagaggttcggttgagttttatttttttttgtatataaagataagaagttaagggttttttttcgaaagtaaatacgtttaattggaattatcgtttttttatgatttatcggatggaatttataatggtgtttatttttttttataaaagtagtaaatgaattaattttaataggaaatataaatttaggaaatataaatttttagtagatgtatttcgaattatataggaaaggatttattgagaaagaaggtttttgtaattttagagggttttgtttagaagtaagagttaagagtggtttagattagttgaggagaagtaattttatatatgagtttaaaataagtttttgtacgagttattttttgtttggttttttttagtagtgggaatttagataaaattttaggaatgttttgttgggtagttgtggtgtatttaaagtagagaaattgttttaatttttgtaaaattaataaagataagtaatagttttagttgggttgaaattagttaatgcgttgttatataatgttttggtgattattatttaggttttgatcgtcgtacggtattgcgtaagtatgttggtaatgtttaataaattatttgttttgtatttgtttttatttaataggggtttttgtttgaattttggttttatttagtatgttagttatttattttttaataggggaagtttttttattttattgtataatttttataatttttttgattttagtttgttttatagaatgatttttgttagagaatattttggaaagggagatatggattttgaatttgtttattgattagtttttagagtattatgtgtgtgaaattttatttgtttatgtgattttttttttatttgtttttttttaagagaattttaatatttatttaaatgttgattttattttttttttggttagttgtgtttaagttagaaattttttttttttgtttttttttttttagatatatgttttatattgtagtaagatattttttgtatatgtcgggtgtagtggtttataattgtaattttagtattttgggaggttgaggtagaaggatcgtttgagtttagaagtttgataggagattttggattttataaaatatatatatacgtgtatgtatatatatatatatatatatatatatatatatatatatatattttgtttaaatcgtatagtatttggaatttattgattatattatataggtgttagacgaaattatttgaatttaatgtttttatagatttataataaatattgacggtttattttatatggtttaatatatgtatttttttgtaaaattgtttatattattttagattagagatttgagaagataattgatttaatatatggtttttattaaaaaaaagaaagttttttttgagaatttatttatttatttattttgagatggagtttttttttgtcgtttaggttggagtgtagtggcgcgatttcggtttattgtaagtttcgttttttaggtttacgttatttttttgtttcggtttttcgagtatttgggattataggcgttcgttattatgttcggttaattttttgtatttttagtagagacggggttttatcgtgttagttaggatggtttcgattttttgatttcgtgatttgttcgtttcggttttttaaagtgttgggattataggcgtgagttatt

SEQ ID NO: 1672 - DNA, 2417 bp, Artificial Sequence
  chemically treated genomic DNA (Homo sapiens)
tgtttttgggaagtggagttagtatggtagatagaataaagttgtagttgttttagtatttaatagagatgagatttggatacgaataatcgtaatataagatgggatgtgatttagtaatgtgagatagagtgttgtgggagtttagggattgtttttgaaagtgaggttgtagtttgtaaaggtttttttttttttttttaaagtaaaatttgtaaaagtagtattgttttttggaaataagtaaaatgttattaattgtatgaaataaaatacgaaagttttttttttttttttatttttacgttttagtgtaatttatggttcgtaataggatttttttagaatgttttttttgagtatatatatagagtattttttttaaaagaaataagatagtagtagtattatgtatttttaaaaattttaatttgttttttaaaaggttatatatttatatagttttgaattgaaaagatataaacgtagagttttttttttgttttttttttttaattgtttagtttttttttttagagatagtgttgttagttttttaagtttttttgtagagattgtttttttttatatatatttttatttatttttttttttttatttttttatataaatagtattatattttatattttgtattttggtttttttatatatgttgtgtattttaaagatgtagtttaggtgttattttaggtatgttttggttttttttttgataagtatgaagttttttatgataatttagtgatatggaggtagatttgtatgatgttttgggtttgtgatttgaggttttaaggattagagggtaaggtagtagtatttggtttttatttttttttggtttaattgagttttgggggtttgcgtattgttttgagtgtttggttgaatttgtatattttgttggattaattttgatattgttttttttttatttttttcgatgaaggtcgttttattgaattttgtttgttggggaagttttttattgttgagagtagtagttaaaaaagttgttagttacgtggttgggtttttatttttgtagaggtaggttgagttatagtttggtggtgtggatttaggtaggaattggttaatattttgaattttgagttgttatttgtttcgtagtttgttgggatgtttagtttagataatatataaagttttttggatacgggataaatttaggtttatggaaagagtaggaaggttaaagtgtgtggtattttgggtaatgacgaaggcgtaattagggagttgatatgtttgttttaaagttaagaattttaggataatttgttatttagttgaagttagtgtagttgttataaaaaagtttggggataaaagtatgttttttatttgtttttttgtttttttgtatatttattttattttttaaagttgtagtaaaggttgttgatattggaaatgtttgatgatttttgttatttttttcgtaaatgaataagagtttgggtttaggttaaattatggttttatgtgttgaaagtattagttttttgaaatagttttataaatgttgatattttatttagattaggagggttaggggaaaggtttaagtaagtattaggttttattatgaaagaatgattttaatagattaaatttggtttgatggtattaaatgttttttttttatttttttttttttttttttttaaagtattattggttagagaggaaatagaaatttgggttgttagatttgaagagatttatatagtatgggattggtgttttagaatattgtaggtgtgtgaatgtatgaagagttgtatttaagtgttattgtttagtttgtttgggtattgatggttttaggtttttttttaggagtaagggtgggagatatttttagtgggttaagatattagttagtggttataatttgtaatgtgaaaagtagtttggggtagttttatttaagtttgtttagtggtgaagagagaggagaaggttgtagttttgtattgacgtatttttattattatatttagggatattttgtgatatagatgagtggggttttttttttttttttgtaaaattttggttttatatatagtagagtttttttttttttttttttttatatatatatatatgtgtgtgtgtgtgtgtgtgtgtatgtatatatatatatgtatatgtatatatatagtattttttttttttttttttttttttgagacggagtttttttttgttgtttaggttggagtgtagtggtatgattttagtttattgtaattttcgtttttcgggtttaaataatttttttgttttagttttttgagtagttgagattataggtacgtattattacgtttggttaatttttgtgtttttagtgtagatga

SEQ ID NO: 1673 - DNA, 2417 bp, Artificial Sequence
  chemically treated genomic DNA (Homo sapiens)
ttatttgtattaaaaatataaaaattagttaggcgtggtggtgcgtgtttgtaattttagttatttaggaggttgaggtaggagaattgtttgaattcggaaggcggaggttgtagtgagttgagattatgttattgtattttagtttgggtaatagagggaaatttcgttttaaaaaagaaagaaaaagaaaagaatattatatatatatatatatatatatatatatatatatatatatatatatatatatatatatatatatatatagagagagagagagagaaaagttttattatgtataaaattaaagttttataaaagaaaaaaaaaaattttatttatttgtgttatagagtgtttttgagtatggtgatagaggtgcgttagtgtaaggttatagtttttttttttttttttattattaagtaagtttaaataaggttgttttagattgttttttatattataagttatgattattgattagtattttgatttattggaaatgttttttatttttgtttttgaaagaagatttgagattattagtgtttaaataagttgggtaatagtatttggatgtaattttttatgtatttatatatttgtaatgttttgggatattagttttatgttatgtgggtttttttagatttgatagtttaagtttttattttttttttgattaataatgttttaaaaaaaaaaaaaaaaaaaggtgggggaagggtatttgatgttattagattaggtttagtttgttgaaattatttttttatgataaaatttagtatttgtttaggttttttttttgatttttttggtttgagtgaaatgttagtatttgtgaagttgttttaggaagttgatatttttagtatatagagttatggtttggtttgagtttagatttttatttatttacgaggagaatagtaaaaattattaaatatttttaatgttagtaatttttattatagttttagaaaatagagtaggtgtgtaagaagatagggaaataagtaaaaagtatgtttttgtttttaggtttttttgtagtaattatattggttttagttggataataaattgttttggaatttttggttttggagtaaatatgttagttttttggttacgttttcgttattgtttaaagtattatatattttaatttttttgttttttttataggtttgggtttgtttcgtatttaggaaattttatatgttgtttaaattgagtattttagtaggttacgaggtagatggtagtttaggatttagaatgttgattaatttttatttggatttatattattaagttgtaatttagtttgtttttgtagaaataggagtttagttacgtggttaatagtttttttaattgttgtttttagtaatgaggaatttttttagtagataagatttagtaagacggtttttatcgagagaaatgaaaaggaagtaatattaagattgatttaataggatatataggtttaattaaatatttaagataatacgtaagtttttaaagtttaattaagttaggaggagatgaggattaggtgttgttattttgttttttagtttttgggattttaggttataaatttaggatattatgtaggtttgtttttatgttattagattgttataagaggttttatatttgttaggaaggaagttaggatatgtttgaggtggtatttgaattatatttttaaaatgtataatatgtatgaaaaaattaaggtatagagtgtaaagtatgatgttatttgtgtaaaaaaataagagaaggagggtaggtaggagtatgtataggaagaaatagtttttgtaagggaatttaagaaattggtagtattatttttggggaggggagttgagtagttgggaagaaaaggtaggaggaagattttacgtttgtatttttttaatttagaattatgtgaatgtataattttttaaagaataaattaaaatttttaaaaatgtataatgttattattattttattttttttaaaaaaaatgttttatgtgtgtgtttagagaaaatattttggaagaattttattgcgaattatgggttatattgggacgtgggagtaggggaaggaaggagattttcgtgttttattttatatagttagtagtattttatttgtttttaaaaggtagtattatttttgtaaattttattttaaaaaaaaaaaaaaaaatttttataaattgtaattttatttttaaaaataatttttaaatttttatagtattttgttttatattattgaattatattttattttgtgttacgattattcgtgtttaggttttatttttgttaaatgttggagtaattgtaattttgttttgtttattatgttggttttattttttagggata

SEQ ID NO: 1674 - DNA, 2449 bp, Artificial Sequence
  chemically treated genomic DNA (Homo sapiens)
aaaaataatttttatttttacgtttgtaaatatgtttatttatatttttttagttattttttttgtaaatattttgaataaaaaggatttcgttttatggttgatttttatttaatttatttattgagataggggtttattttgttatttaggttatagtgtagtgatataattatggtttattgtagttttaattttttggtgttaagtaatttttttattttagttttttgagtagtttgggattataggtgtgtattgttacgtttggcgaatttttaaatttttttgtagagatggggttttattatgttgcgtaggttggtcgtgaatttttgggtttaagtgattttttagtttcggttttttaatatgttaggattataggtatggttgatttttatagtttttttttatttaaaatgtaatatgtagtgattttatagtttttttttaattttatttttgtgttttgaaagtgattagtttagtttttgttatagtagagtttttagtaattaattttagtaataaaattttataattgtgggatggaatagtgtgttaattgcgttttcggagaaatttatgtttaatttgtatatagaacgtttatagatttttgtttattagtttggttggaaggatagggtttgttgtaaggatagtaattttatttagggtttttttagaggtttgagaggttttgttaaggttttgggtttaggggtttaaggtgggagagggcgagagaaaataacgtgttaatgtagttttgagtggtttttaaataggagtagagggaaggttgtgaggggagttggttgttttttttggagttagaaaggttgttgtttaattttttggattttttattatagttgggtagggagagggttagattgggtatgattttttcgaataggtttttttaaagttttttggttgaattgattttttttttagagttaaggaagtagtgtttgggtgaagttaatttttttatttttaatatatttttttagagttaggtgagtttggaagtttaggtttttggaaggtagagttatatagggtaagaggtttaaggagtcgtgaattttggttggagaaattttttttttggttttgttaaatttaataggtataattgtattttgttgattttaatttttttggcgggtttaattggttttggtattgttttattttttgttttgtttttgtagaggtaaagagggtgtttgtatagttggtgtagggcggggaagtttttttttgagggtgggtaggggttttggtagtttttaggtgggtggaggaagttttttcgtgttttatttttgtgtttttaagggagtgttgagaagtttggggatttttagggagtagttggttggagtaggtagtttcgtagattcggaattaggttagatttttattttagtgggaggtattgtaggggagttggcgggaatagatgaattttttatttggggtgtttacgatattattaggtttttatagtgttgtaggtattgtgttattgggtattttttatatgtgtgttggttaaatgttcgtagttatgttgtgagagggaggtaatggggtagagtagttatgagtagagttttgggttagatgggtttaattttaattttatgattttgttttgtgatttagtttttttgttatatttgtgaaatggggattaaagagttgatatttatatagtattcgttatgtttatatttattgttgtaatgttttatttattttttgggaggtagatgttttttttacggatgaggaaataggtgaagatattgttttaagtttatagttattggtcgtagcgttttattgatagattttttaattattgtatggtagggagttgtaagattcgaaggaaggatatttatgaagttgtttattttagggtttggtttattttagaaagagtttaataagagtaattatttgggaataataattataataaaagtagtattaatgtttttgaagttgttttaggttggattttggttttattgggaggtggttttggatttgaatgtgggtagtttgaagttatttattagttgagtgattgtggggataagttatttttttttgtgagtattagtttttatatttttaaaatggtgtaatattggtttttatagttttttttgaggatttagggagttggatttttggtatagtttggtttggtcgttggtgggtatttaataaatgattggtattgataattataataataataaggagatgttagtaaggtttagtatagggaggtaataaattttagtttggagttttttggttaattagttatttatttattagatattgatgggtaagtttattttgtgttggggatgtgtttagtttttggtttttagggggtttttagatagtg

SEQ ID NO: 1675 - DNA, 2449 bp, Artificial Sequence
  chemically treated genomic DNA (Homo sapiens)
tattgtttgggagttttttgaaggttaggggttaaatatatttttagtatagagtggatttgtttattagtgtttgatgagtaaataattgattaattagaaggttttagattggagtttgttatttttttatgttggattttgttggtatttttttgttattattgtggttattaatattagttatttattgagtgtttattaacggttaggttagattatgttaaagatttagttttttggatttttagaagggattgtaggggttaatgttatattattttaaaggtgtggaaattgatgtttatagagggaagtggtttgtttttatagttatttagttagtgaatggttttaaattatttatatttaaatttagagttattttttaatgagattaaaatttagtttgggataattttaggggtattagtgttatttttgttataattattatttttaaataattatttttattgaattttttttaaaatggattaggttttggggtaagtagttttatgagtatttttttttcgagttttataattttttattatgtagtgattaggagatttgttaatgaagcgttgcgattagtaattgtgagtttggaataatgtttttatttgtttttttattcgtaaggagagtatttgttttttaggaggtagataaagtattataatagtgagtgtgagtatagcgagtgttgtataaatgttagttttttaatttttattttatagatgtgataggaaaattgagttatagggtaaagttatagagttgggattggatttatttaatttaaggttttgtttataattgttttgttttattgttttttttttatagtatggttgcgagtatttagttagtatatatgtaaagagtgtttaatggtatagtatttatagtattgtgggggtttgataatgtcgtggatattttaggtagagggtttatttgttttcgttagtttttttgtagtgttttttattgggatgagagtttggtttggtttcgaatttacgggattgtttgttttagttagttgttttttgggagtttttaagttttttagtatttttttggaggtataggggtggggtacggggaaattttttttatttatttaggggttgttagagtttttgtttatttttaagaaggggttttttcgttttgtattagttgtgtagatattttttttgtttttataggggtaggataggaagtggggtaatgttaagattaattaaattcgttaggggaattaaggttagtaggatgtaattatgtttgttggatttaataaggttagagggaaggtttttttagttagagtttacggttttttaggttttttgttttgtgtagttttgttttttaggagtttaggtttttaggtttatttagttttggaagaatgtgttgggggtgaaggggttaattttatttaggtattgtttttttggttttggagaggaaattagtttagttaagaggttttaaaaggatttgttcggagaagttatgtttagtttgattttttttttgtttagttgtgatggaaaatttaaagagttgagtaataatttttttgattttaaagagagtagttaattttttttatagttttttttttgtttttgtttgagagttatttaaggttgtattagtacgttgttttttttcgtttttttttattttggatttttgagtttagggttttggtaggattttttaggtttttggaaaagttttaggtaaggttgttgtttttatagtagattttgtttttttagttaagttagtaagtagaggtttgtgggcgttttgtgtgtaaattggatataggttttttcgaaaacgtaattgatatattgttttattttatagttatagaattttattgttaagattaattattgggggttttattgtgataaggattaaattggttatttttaggatatagagatgaaattgggggagagttatagaattattgtatattatattttaggtgaaaaaagattataaaaattaattatgtttgtaattttagtatgttaagaggtcgaggttggaggattatttgagtttaggagtttacgattagtttgcgtaatatggtgagattttatttttgtaaaaaaatttaaaaattcgttaggcgtggtagtgtatatttgtggttttaagttatttaggaggttgaggtagaaggattgtttgatattaggaggttgaggttgtagtgagttatgattgtgttattgtattatggtttgggtgatagggtgggtttttgttttaataaataaattaaataaaaattagttatagagcgggattttttttgtttaaaatatttataaagaagatggttggagggatataaatggatatatttataggcgtagaaatagagattattttt

SEQ ID NO: 1676 - DNA, 2340 bp, Artificial Sequence
  chemically treated genomic DNA (Homo sapiens)
ttttttttttttttagtttagtttacgtaggttttgttttagtatcgtgagtagttgttttttttagttatatttgagaaatcgaagaagtttttaggtttaaagttattgttataattcgcgtttttttttttttttttttggagacggaattttgttttgtagtttaggagggagtgtaatggtattatttcggtttattgtaattttcggtttttgggtttaagcgatttttttgttatagtttttcgagtagttgggattatagatatatattattatgtttggttaatttttgtagttttaatagagatagggtttttttatgttggttaggttggtttcgaatttttggttttaagtgattttattgtttcggtttttaaaagtgttgggatgataggtatgagttattatatttagtttataatttttatttttgttaggttttttaaaagtttttattgttagtgtaggtagttgtttggaagttattttaggttattttttttattttttaggtaggtgaattaagattatttaggtgcgaggttggtttgagttagagatggtttgggagagtttttggggggtagggagggtttagtttttttaggtttggttgtgttttttgttttttatttataattaggtttagggttggggggtgtatattaaggaggggtaggaagtgtttaagaagtagaatcggttttgtgtttttagtggcggcgggtgtttggggtaggaggaggttatttgattttttttttattgtttcggttatgattttttttttttttttttcgttttttttttttttttttttttttttttttttttttttttttttttatggttggggtagttagtattttgggttgtagttgagaatttagcgttttttaatttcgttagtattttagtgagaggaggggtggggggagattgtatttagagttttagggataggggtatttttggggttgttttattttgggagggttaaggttaggttgtttttaattttatcgttttttgttttcgttttttttattttttagtagtagagttgtttaaatttggttttaggagggaatgggggaggtagcggtaggcgggtgtcgttagaggttagggcgtcgttttcgtttagtcggttggtatttttgttgtttggaggagggtaggggggttcggtagttttttttcggaaagggagatgttcgtattttttgatatatattgagtaatgtgtaaacgatatgtaaatcgagttttaaattagtattttagttagggaatagtttgagagttgtttttgggatgagagtagaaggattagagtttagtgtttaggggttttagtgggggtggggtggggtggggggcggtatagagtgtttagggttgggcgttgggagatttagttttttgttagttgtagggttttgttttagtggttggattttttgggttttagtttaagggtagggttatggttttttttgtttgttttagtaaagtattgggtatattttgttacgtggttaagtacgtgagttttgtagttattttgtttaggtttgaattttggttttttatgggttagttgagtgaattttttaatcgagtatttaggtaagtagttagtggaattgggtgtttgttttagaatagttattttttttttttggaagttgggtacgggggtatgacgtgagagaatttgggttttggaattagaattggattttaggttttatttagttagtgaggttttttgagttttattttttttatttgggaaatgggtttaggattttaaggttagttgtgacgtttacgtgatgattttgtatatggtgggtatatataggtttttttatggtgtagttttattgttgtttgtatttatgtgatttttagttttattttgttttatcgttttttttttttttgtttttttgttttggttttttcgtttttagatgtaaattttttgcggttttttttttttttgtttttttttttaattggtgattttggaaaagttattgttttttagagttttagtttgtatattttttaaatgggagtaaatgagaggtggataatgagttttgtttggggtttgaggtttatttttataagatcgtttatttattattttaaagggttattaggggtaggttgtgtttttaattttatcgggtatggtgtgttgggggttttattttttagtaattttgtttaattttagataattgtttttttgtttttcggtcggggttgatatgagttgaatttagttttttgttatttaaaagttattttttg

SEQ ID NO: 1677 - DNA, 2340 bp, Artificial Sequence
  chemically treated genomic DNA (Homo sapiens)
taggaagtggtttttgggtggtaggaagttggatttagtttatattagtttcggtcgaggggtaggagagtagttatttggggttaaatagagttattgagaagtggagtttttaatatattatgttcgatagagttgagggtatagtttatttttggtggttttttggaatgatgggtgggcggttttgtaaagatgagttttaggttttagatagagtttattgtttattttttatttatttttatttagaagatatgtagattgagattttgagaggtaatgatttttttaagattattagttaagaagagagatagaagggaaaaagatcgtaagaaatttatatttagagacgaaaaagttaggatagaagaataaagagaagaggagcgatgggataggatggagttaggagttatatgaatgtagatagtagtgaggttgtattatgggaaggtttgtgtgtgtttattatgtgtaaggttattacgtggacgttatagttgattttgagattttgaatttattttttaaatgaggggagtgagatttagagagttttattggttgagtgaggtttggaatttagttttgattttaaagtttaggtttttttacgttatgttttcgtgtttaatttttagggaagggaagtggttgttttaaaatagatatttagttttattagttgtttgtttgggtgttcgattgaggaatttatttagttggtttatggagagttagggtttaaatttaggtaggatggttgtagaatttacgtgtttaattacgtgatagggtgtgtttagtgttttgttggagtaggtagagaaagttatggttttgtttttgggttgggatttagagggtttagttattggaataaagttttgtagttggtaagaaattgagttttttaacgtttagttttagatattttgtgtcgttttttattttattttatttttattggagtttttgggtattgggttttggtttttttgtttttattttaaaagtagtttttaagttgttttttggttgagatgttgatttgaagttcggtttgtatgtcgtttgtatattatttagtgtatgttagaaggtacgaatattttttttttcgggagagggttgtcgggtttttttgtttttttttagatagtaaaaatgttagtcggttagacgggagcgacgttttggtttttgacggtattcgtttgtcgttgttttttttatttttttttggagttaaatttaggtagttttgttattgagagatggggagagcggaggtaggaaacggtgaggttggaggtagtttggttttggtttttttagagtggagtagttttaggggtgtttttgtttttaaagttttgggtgtagtttttttttatttttttttttattggaatgttggcggggttggggaacgttgggtttttagttgtagtttagggtgttggttattttagttatgaaggaggagggagggagggagggagggagggagggagggagggagcgagggagggagggaggaggttatggtcggggtagtggggaagggattagatagtttttttttgttttagatattcgtcgttattggggatatagagtcggttttgttttttggatattttttgtttttttttggtgtgtattttttaattttgggtttgattgtgggtggggggtaggggatatagttaggtttgaggggattgaattttttttgttttttaaaggtttttttaggttatttttgatttaggttagtttcgtatttgaatggttttggtttatttatttgggaaatggaaggggtggtttagaatgatttttaagtagttgtttgtattgatagtaggagtttttgggaggtttgatagaaatgagggttgtgggttgggtgtggtggtttatgtttgttattttagtatttttggaggtcgaggtagtgggattatttgaggttaggagttcgagattagtttggttaatatagggaaattttgtttttattaaaattgtaaaaattagttaggtatggtggtgtgtgtttgtaattttagttattcgggaggttgtagtaggagaatcgtttgaatttaggagtcggaggttgtagtgagtcgagatggtgttattgtatttttttttgggttatagagtaagatttcgtttttaaaaaaaaaaaaaaagaaacgcgggttgtggtagtggttttaggtttagaaattttttcgattttttaggtatggttaggagaggtagttatttacgatgttgggatagaatttgcgtgggttgaattgaggaaaggaagaa

SEQ ID NO: 1678 - DNA, 2438 bp, Artificial Sequence
  chemically treated genomic DNA (Homo sapiens)
tgtttagaattttatagtattttatatagttttatatatgtatacgggaattttttttttcggtttttatatttgtttagtatcgattttttagatgtatttattgatttaataaattttttttgagggttttttttgtggaggttttgggttaatttataattagaatgattggaataggaataaataattagttgttttgtgttgttgttttcgtttttttatttgtgagatggggattttagttttgttatatgggattgttaatgttaggagtgaatgtgtggaaagttttcggttcgtgtttggtttatagtgttatttaagtaaggttattttggttagttaaaagtattttatgtttagttttacgtagaatatttggtatatattatttttttgagtttttgtttaagtttttagtagttggggttatcgtttttattttttagatgaggaaatcgaggtttagagaagaggtttatagtttgtaggttgttttatcgattttatgttatgttatagtgttgttttagtttgtttcgttattttttatatatatatatatatatatatatatatatatatatatattattttttttggttagaaggttttttttatttgtatatagtatgtttagtttttttgagttgtttatttatatttttgtgaaatggggatattagttcgtgttagtttttgtttattttttttagggtattggattttaagggttaagagtgaagattattttgttttgttttttggtatatagtaggtattcgataattattttaaaattaaaggaataagtaagtggttttatggttattgaggatagagtttggaattgaatgtagggtattttgaagttggagtttatttttatattattgttttttttatgttattagtaggtattgaatgtgttagtgagtgaatgaatgaaattaagattttaggattttagttaagtgttttttgagttttattttttggtagtgtggatatgagttaagttttagttattttggatggtggtgggggtggcggggttgatgggtcgtttgaagtcggttgttaggagttcgtttggttatagtcgttagtaggagagattagttggcggtgtagggtttatcggttcgggtttggaatttgagttgtttttagaggtttagtttttttttgggtttttataaattggtttttgtttttgggtcggttaagatttagtagtttgggttttttgtttgttcgcggtattcgcgttgagttggcggggtaaatgggttagttttttttttgtttatgtttaggacgtcgttttaggattaaatggagatgtaattttttatataaatttatgataatttagatggagtgattgtaattggttttttaatgggggttttgtttagagttggtggttagaattgggtggtttgtttgaggtaggttttatttaaatgataataaagtaataatattgaggatttgtatagtgtttagtattttttttagtttaagtagagttttatgtttatggatttggtttttttttgaggttgtttggataggcgggtggtggggggcgttaagtttaggagataggtggttatatttttgggttttaggatatagagttttagaatggttggggtaaggtttcgtatttattggtttatttgtgtttttatttttgaaattgttattaattagtgttttttcgggttagttgttagtttaggtttcgggggtattaagataatgagagttgtttaggtaggttagagggagaaggttataatggttagtatagtatgatatttgagagtatgattaagagatgattaatagttagatagtttgagtttaaattttattttatttttttttaaaaaaattttttttgagatagggtttcgttgtgttatttagattggagtatagtggtaggattacggtttattgtagtttcgatttttaaggtttaagtaatttttttattttagttttttaagtaattggattataggtatgtgttattatatttggttaatttttttatttttttgtagagatagagttttattgtgttgtttacgttggtttcgaattattgggtttaagagattttttcgttttagtttttgaaagtgttgggattataggtgtgagttattgtgtttagtttttattttatttttgattcgttttttgaattttattaagttatttaatttttttatgttttagtttttttagttataatatgaagttgtagtgaaagtttttgtgaagatgaaatattttaatagtgtttggtatgtggaaggtgttatatataagttattgtcgtgatttattttaagttttagttttggtgttagggtgattttgggtacgtgatttaatttttttaaatttttatt

SEQ ID NO: 1679 - DNA, 2438 bp, Artificial Sequence
  chemically treated genomic DNA (Homo sapiens)
agtggaggtttaaagaggttaagttacgtgtttaaggttattttgatattagagttagagtttggaatgaattacggtaatgatttatatatagtattttttatatgttaggtattattaaggtgttttatttttataaaaatttttattgtagttttatgttatggttggggaaattgaggtatggagaggttaagtaatttggtaaggtttaagagacgagttagaagtagagtaggggttgagtatagtggtttatatttgtaattttagtatttttagaggttgaggcgggaggattttttgagtttagtagttcgagattagcgtgggtaatataatgagattttgtttttgtaaaaaaataaaaagattagttaggtgtagtgatatatgtttatggtttagttatttgggaggttgaggtgggaggattgtttaagttttggaggtcgaggttgtagtgagtcgtgattttgttattatattttagtttgggtgatatagcgagattttgttttaaaaaaaatttttttaaaaagaagtggagtaggatttgagtttaggttgtttggttgttggttattttttggttatgtttttaaatgttatgttgtattggttattgtagttttttttttttgatttgtttgagtagtttttattgttttggtgttttcgaaatttggattagtagttagttcgaggaggtattagttagtgatagttttaggaataaggatataggtaagttagtggatgcgggattttgttttagttattttgaagttttgtgttttgaagtttaaagatatggttatttgttttttgggtttagcgttttttattattcgtttgtttagatagttttagggaaggattagatttataaatatgaggttttatttgggttgggaggagtgttgggtattgtataagtttttaatattattgttttattgttatttaaatggagtttgttttaaataggttatttagttttagttattagttttggataaaatttttattgaaaagttaattataattattttatttaaattgttatggatttgtatagaaaattatatttttatttagttttaaagcgacgttttgggtatggatagaggggaggttggtttatttatttcgttagtttagcgcgggtgtcgcgggtagatagaaagtttaagttgttgggttttggtcggtttaggaataaaggttagtttgtgggggtttagagagaagttgggtttttgagggtagtttagattttaggttcgggtcgatggattttgtatcgttagttggttttttttgttggcggttgtggttagacgagtttttgatagtcggttttaggcggtttattagtttcgttatttttattattatttaaggtggttggagtttggtttatgtttatattattaggaaatgaaatttagggagtatttgattgggattttgagattttggttttatttatttatttattgatatatttagtgtttgttagtagtatgagaaaggtaataatgtagaagtgagttttagttttagagtgttttgtatttagttttagattttgtttttagtagttatgaggttatttgtttatttttttagttttgaaatagttgtcgagtgtttattgtgtgttagagaataggataaaatggtttttatttttggtttttaaagtttagtgttttggggaaaataaataggggttgatacgggttagtatttttattttatagaagtgtaagtaggtagtttagaggagttgggtatgttatatgtaagtgagaagggttttttagttagagggaatagtgtgtgtgtgtgtgtgtgtgtgtgtgtgtgtgtgtgtgtagggggtggcgaggtaggttggagtagtattgtggtatgatatgagatcggtggggtaatttatagattgtgggttttttttttgagtttcggtttttttatttgaggaatgggggcgatgattttagttgttggggatttggataagggtttagggagataatgtgtgttaggtgttttgcgtggagttgggtatgggatgtttttggttaattaggatagttttatttagatgatattgtgggttaaatacggatcgagggttttttatatatttatttttaatattgatagttttatgtggtagggttaggatttttattttatagatggggaaacggaggtaatagtatagggtagttaattatttgtttttgttttagttattttgattatgggttagtttagggtttttatagagaagatttttaaaaaggatttgttgaattagtgaatgtatttggaaggtcggtgttgggtaggtgtgggggtcggggaggaagattttcgtgtatatgtgtgaagttgtgtggagtgttgtgggattttgagta

SEQ ID NO: 1680 - DNA, 2364 bp, Artificial Sequence
  chemically treated genomic DNA (Homo sapiens)
ttaatagatatagaaaaaaagttcgataaaatttaatatttttttataataaaaacgtaaaattaggaatggaagagaatttttttaatttgataaagggtatttatgaaaaatattgttaatattaaatttaataaataatgaaagttttttttttagaattagaaataaagtaagtgaaaattataattttggttagttgtggtggtttatatttgtaattttagtattttgggatgttgaggtaggagaattatttgaatttaggaggtagaataaaattataattttagaaaaagtatgtgttttgtatttgttattgtgagtttgatagtttgttaatattcgaagatttttgtgattggatatggtagtttatatttgtaattttaatattttggaaggttaaggtaggaggattgtttgagtttaggagtttgagattagtttggttaatatagtaagattttatttttatttttttttttttttttttttttgagatagagtttttgttatttaggttggagtgtagtggtgtaatttgagatttgtttcgagattaaaaagtttgagaattattgttatagaaaagtattaggatatgtattaaaatggtttcggaagtattgtttttaattataatttattgggaatattttatatatttattagtagtataatatgttatatatatatatatatatatatatatatatatgtatgtatatatttagtgttttagataagggaggttatgtttaaggtagtttatttttaaatttttatttaaagaaattttgaatgttttttgggtttttgttggattttagaatttttgtttttatttttagttattgtaaatgaattttggttttatgtttatagtaattagttttagttttggtattattttaaaggaaaaatgttaaattatatttgttcgaggtttttggaatggtttaaaagtttagggaaaagggtgtatagggtaggaaagtggggtgagtgaggtattatttttttagttagaaagcgtagttttgttaggagttttttggttagtgttatttttttttgtatattgcgtcgttttaggtcgcgtagaagtcgtagtttttgtttagttaaaaggttttgggagggtaaaaagatagtatgagcggaaggttttagttaggcgtttttgagttttttttcgaggtcgtattaggttgtgtattaggagtttttttcggtatcgatttagggtattgggtcgggttatcgttttgcgttcggtatcgtggtaaaattgtttgtagtgagtagggatgtgtatagtagataggaattaaaggaaaggagaaggatagtgattttggggttatttgttttgagttgattttttatttttagttttttttatagtttttttagttttgggttttgaagaggtatttttttttttgtaaagttggtttatttttatttggattatttttaaaaattattaaggttagttttgtttttgagttttagagttcgttaatatttaattatttattattttggttattttaggtgtggtttatggattaatagtattggtattatttgtaggttatttaaaattgtaggattttagttttattttaggttttgttgaattagaagttgcgtttatgttttcggggatttttaagtatattgaagttttagacgtttttattagtttggttaacgtatagtttgaatattatatgtttaagttaaatgtatattttttaatgatttttttcgtaaaataaaataaaataaaataaaaattttattttattttagaattttcgagttattttttattgtttttttttttttattttatattaatttattagtaaattttttatgttttatttttaaaaaatatttagaatttggttaggtgtggtggtttaggtttgtaattttcgtattttgggaggtcgaggcggtgaattatttgaggttaggagttcgagattagtttggttaaaatggtgaaataattgtgtttattgacgttgaaaggttgagtatggtgagaatagaaaagtgattatttatagttttttattttattgttttttttgattagggtttttggttgagtttttgttttttttttgtttttaaatgttggaacgttttaggtttttagattttttttttttgtgttttgttaatgttgttatttagttttatttatataatgatagtttttaaattgatatttttagtttagaattttttttagaatttaatttatatagttaattgtttattatatatgtttatttataatttaataagaattttatagttaatatgtttaaaattgag

SEQ ID NO: 1681 - DNA, 2364 bp, Artificial Sequence
  chemically treated genomic DNA (Homo sapiens)
tttagttttggatatgttaattgtgaaatttttattgaattgtaagtggatatgtgtggtaggtagttagttatatgagttgagttttggggagaattttaggttggaaatgttaatttgggaattattattatgtagatggagttggataatagtattaatagagtatagaaaagagaaatttgagaatttggagcgttttagtatttagaggtagggaggaagtagggatttagttaaggattttgattaggagaggtagtgaggtaggaggttgtaggtggttatttttttgtttttattatgtttaattttttagcgttagtagatatagttgttttattattttggttaggttggtttcgaatttttgattttaagtgatttatcgtttcggttttttaaagtgcggggattataggtttgagttattatatttggttagattttggatattttttgaaggtagagtataaagaatttgttgatgaattgatgtggaataagagagaaagagtagtgagagatgattcgaaagttttgaggtgaaatagggtttttgttttgttttgttttgttttgcgggggggattattggaaagtatgtatttggtttgggtatgtaatgtttaagttatacgttagttaagttggtggagacgtttgaggttttaatgtgtttaggaattttcgagggtataaacgtagtttttgatttagtagggtttggggtggggttgaggttttatagttttaaatagtttgtaggtgatattagtgttgttggtttatgggttatatttggggtagttagggtagtaggtggttaagtattagcgagttttggagtttaagagtaaggttggttttaatgatttttgggagtggtttaaatagagataggttagttttgtaggagaaagggtgtttttttagagtttaagattgagagggttatgagggaggttgggggtgggaggttagtttagagtaagtggttttaaggttattgtttttttttttttttttgatttttgtttgttgtgtatatttttgtttattgtagatagttttgttacggtgtcgagcgtaggacgatgattcggtttaatgttttggatcgatgtcgagggaaatttttggtgtatagtttggtacggtttcgggaagggatttaggggcgtttagttggggtttttcgtttatgttgtttttttgtttttttagaattttttggttaagtaaggattgcgatttttacgcggtttgagacggcgtaatgtgtaaaagaaggtggtattggttaagaagtttttggtaaaattgcgttttttggttgaggaggtaatgttttatttattttatttttttattttgtatatttttttttttaagtttttgaattattttagaggtttcgggtaggtgtgatttaatattttttttttggaatgatgttagggttgggattaattgttgtgggtataggattaagatttatttgtagtagttaagggtgaggataagagttttagaatttagtagagatttagggaatatttaggatttttttggatgaagatttgagagtaggttgttttgagtatgattttttttgtttgaagtattaaatatatatatatatatatatatatatatatatatatatatatataatatattgtgttgttgatgggtatgtgagatgtttttaatgggttgtgattagaaataatgttttcgagattattttggtatatgttttggtgtttttttatggtagtggtttttaaattttttggtttcgggataggttttagattatattattgtattttagtttgggtgatagagattttattttaaaaaaaaaaaaaaaaaaaaaaatggagatggggttttgttgtgttgattaggttggttttaaatttttgagtttaagtagtttttttgttttggttttttaaagtgttgggattataggtgtgagttgttatgtttagttataaaaattttcgagtgttggtaagttgttaagtttataatggtagatataagatatatattttttttgaaattgtaattttattttgttttttgggtttaagtgatttttttgttttagtattttaaagtgttgggattataggtgtgagttattataattagttaaagttgtaatttttatttgttttgtttttgattttagggggaaagtttttattatttattaagtttgatgttagtagtgttttttataaatgttttttattaggttgaggaagtttttttttatttttagttttgcgtttttattgtgaaagggtgttagattttatcgaattttttttttgtgtttattaa

SEQ ID NO: 1682 - DNA, 2386 bp, Artificial Sequence
  chemically treated genomic DNA (Homo sapiens)
ggtaggagaattgtttgaatttgggaggtggaggttgtagtgagttgatattgaattattgtattttagtttgggtgatagggtaagattttattttaaaaaaaaaaaaaaaaaaattaggttttgatgtttaataggttggttttattatttataatttataatgtgtaggatttggagtaaattattttatttataggatttttagtttttttttttgtaaagtggagataatatttattttttagggatagtgtaggaggatgaaagagcgttgagttagtggttaatataggttgagtatttagtggatggtagtaattgttattattattattattatattattatattattataatataaaatattgagtaaatttgggatattttggtatttaatatttgttttttttttttttttttttattttttttttttttttttttttttttttttttttttttgtttttttatttttttttattttttttttttttattttttttttatttttttttggtatatttggttgtagttgtaaggagtggtaggagtttatataggaaaaggaggtgtggttagattttggggggatttgaatgttagagggagtttgatttttagtttaggggtaatagtgagttattaaagtttgcggtggagtagaaataagttgtggtgaaagtggggaagtgagtttggtagtagagattgggaaggggttgtgagggtagaagttggagttagagaggtgagttatttagggagtttaaaggttaagtgagagagatggggaagtagaggttgtatttttgtttagagttcgtttgggagaagtagttttattttttacgtttattttgtttataaaatttagtcggagtatttatttttgtgtgattttagataagtgtttaatttttttgagtagtagtaaggttattttagtttttggtgatattttttggttttttagtaaagatatttttggattttataggtttttattattttttaggttgttttttgtttagagattaatttgtttatttttttgtttggagatgaatcgagggaattaatcgtttattagcgtaggtttttttaatttcgtatcgtttcgttttaaatgtttattttttggtaaaatatgtttttgtcgttgataaggttgtttggaaaatgttaattttattttcgaattaaaatttgtttttttattttcgttttaataaaaatgaagtattcggaaatattgttacggtgtagaagagaaagatttgatataatttttaaaatgtttttaattacgttgatttttgaacggtttgttttttaattttgattttttttttattttttaattttttgaggtagtatttatattttttaataattttttattaatatttatgagaaggggcgggtaataacggttgagtatatcgtattaatttaatttttattcgttttagcgtgtttatttaattattaagggattcgggttatttagtataattatttattcggaattagatttggaggtatttggattggaaatagggaattaagagtaaaatgaaaatcgaatttttttcgttttttttttttagtcgtttttttttgatcgtgtgttaacgttttaggtagttagtagggtttagaggataaggtttcgtgttcgtcgggtagtttttgaaggaattggttcgtgaggggttgaatgtgttttagatgttttggtttcggtaggaattttttattaatagtagttttggagttatcgtaaggtttagtagtgggttagttgtatcgttttagttaagagtatggttagttagagttagggtgtttaggagatgttggggtattggtttaatttggatatgtagtgtggatagatttttgattataggttttgtggaggtgagagtttgtgatatggggtttaaataatatttgtttattttcgaattttcgtttaattgttattttttttaagaagttttttttggtttttagataaggttagttttttttattatatatattttttgttataattaggatgggtttggttatagtattttgtttattgtgggtgtttatataatggtttttaattagttgtttagggtttgttttttttaatagttagtttcgtgggagtaggttttatggttgttttggttacgtgtttttagtatttagtaatgtttagtatagagatgtttaatagtatttgttaattttttgattgattgattttattattgatttttgatttttaagtttttgtttttttatttgtaaaatgaagttaagaatatttattttgtaggattgtcgtggggatttagtgttttttatgtaaagaggatgta

SEQ ID NO: 1683 - DNA, 2386 bp, Artificial Sequence
  chemically treated genomic DNA (Homo sapiens)
tgtattttttttatatggaaaatattgagtttttacggtaattttataagatgaatgtttttagttttattttgtagataaggaaatagaggtttgagaattaggagttaatagtagaattaattagttaagaagttaataaatattgttgagtatttttgtgttgggtattgttagatgttaggaatacgtgattaggatagttatgggatttatttttacggaattgattattgggagaaatagattttgaataattaattagaaattattgtgtgaatatttatagtgggtaaggtgttatgattaagtttattttggttgtaatagaaggtgtgtgtaataggagaagttaattttgtttggggattaggaaaggttttttggaggaggtgatagttaagcgggggttcgaggatgagtaggtgttatttagattttatgttataaatttttatttttatagggtttgtgattaaaagtttgtttatattgtatgtttaggttgggttaatattttagtattttttgaatattttaattttggttggttatgtttttggttgggacggtgtaattggtttattgttgggttttgcgataattttaaggttattgttgatgagagatttttgtcggggttagagtatttggaatatatttagttttttacgagttagtttttttaggagttgttcggcgggtacggagttttgttttttaagttttgttggttgtttggagcgttggtatacggttaggaagaggcggttgggaggggaggacgaagagaattcgatttttattttgtttttggttttttgtttttagtttagatgtttttagatttaatttcgaataaataattgtattgagtaattcgggttttttggtgattaagtaaatacgttgaggcgggtggaaattgaattagtgcggtgtgtttagtcgttattattcgtttttttttatgaatattaatgaggggttattaagaaatgtaaatgttgttttagggggttgggagatggggagggggttagggttagaggatagatcgtttagaagttagcgtgattgaaggtattttaaaaattatgttagattttttttttttgtatcgtggtaatgttttcggatgttttatttttattaaaacgagggtaagggaataaattttaattcgaggataaaattagtattttttaagtagttttgttagcggtaaggatatattttgttagaaaatggatatttggggcggggcggtgcgaggttgggggagtttgcgttgatggacgattagttttttcggtttatttttaggtaagggagtaaataaattaatttttgagtagagagtagtttggaagatgatggaagtttgtaggatttagaagtgtttttgttaggaagttagggggtgttattaagagttaagatggttttattgttgtttagagaggttaagtatttgtttgaggttatatagaggtgggtgtttcggttgggttttgtgggtaaggtgaacgtagagaatgaggttattttttttaggcgagttttagatagagatgtagtttttgtttttttattttttttatttgatttttaggttttttggatagtttatttttttggttttagtttttgtttttatagtttttttttaatttttgttgttaggtttatttttttatttttattatagtttgtttttgttttatcgtaggttttagtgatttattattgtttttaggttgaagattagattttttttgatatttaagtttttttaggatttgattatattttttttttttgtgtaagtttttgttattttttgtagttgtaattagatgtattaaggaaggatgagaagaaagtgagaagaaggggaataaaagaaggtgagaagatagggaaaaaggaggaaggaagaaaaggagggagaaaggtagggagaaaggaagaggaaataaatgttaagtattaaaatattttagatttgtttaatattttatattgtaatgatgtggtgatgtgataatgatgataatgataattgttgttatttattgagtgtttagtttgtgttagttattggtttagcgtttttttatttttttgtattgtttttagaaagtagatgttatttttattttatagaggaggaaattgagagttttgtaggtaaaatgatttgttttaggttttatatattataaattataaatgatagaattagtttgttggatattaaaatttgatttttttttttttttttttgagatggagttttgttttgttatttaggttggagtgtagtggtttaatgttagtttattgtaatttttattttttaggtttaagtaatttttttgtt

SEQ ID NO: 1684 - DNA, 2734 bp, Artificial Sequence
  chemically treated genomic DNA (Homo sapiens)
ttttttgttgtttttggtttttagtttttggtttaagtatggtttttagtttagataaggtttttttaggaggtttaggagttttgcgggaggtagagtgtagataaaggttcggagttcgtttatgtggaaaatttgggtttgcggcgatcgtgaattatatgggtagaggggttagatttggggtttttatgatgggaatatgatgtgattgtggaggttagttaaggtttttgttagcggtgagtggaatagataaagaaattagttattagaggagagaagtattttagatcggagtgggaggttatatatcggttttttgtgttgttttttagaggggaattggggtagaggggtttttttattttacgaggttggttgggtttaatttaaggaatttttgtttttttatttttgttggaatttttattgtagtttattggatttttgtacgagatatatttggggtgtttagtgagtaggtagatttttagatatttatttcgaaaagttagtttgaaagagaatatttaggggtggggtttggttatagttagtttttttagagagttttaagtttagtaatatttaataattttgtgtttaggttaatggtgtttaattttagttgtggattgtgattatttggggaattttttttaaattttgatatttagattttatttaagattaattatgttagaatttttggggtgtgttttgggtatttatatatttttaaagttttttagtcgttttagtgtgggtttaaggattgttttagttttagattaattttaagagttttaagatgaatatttggggaaaaggagaagttatgagttttagataagagaaataatttgtttaaggttatataaggtggtgatggtaaagttcgttttgaaatttaggttttttttttgatcgtgggttaatttttttttgatgttgtatttttttttaaaaattagagtttaggtaggtaatgtttatagtattttattttaataatattggaaatcggtatagttagggttattatagtggtggggcgggagtttcgatggcgattaggggagttgtaagtttttcgttttatttaaattttgggtagtaatttagaaaatttaattaaagggggagaaatggggatatttcgcgttttttgttttttgttataatgagtgaaatatattaggttgtaaaaggaaatgttgtttgagacgtagtttcgatgttttattgttaagttttatttattgatgtaaacgtaatcgttggaaatcggagtttttattaatatatatatttttatatattcggggttttttttgtttttttttttttttttgggtttgtttatttattttttagggttagttttgttgttttttgggtatgtttatgttaagtttggagtttcgtatcggttttatatttttttatggtagataagattttaatagaattttattgttttttagagtttagtaatgtattttggaaattaggcggttatatattaaagttattgtttttttttataaatgggtttttttaaagttagtgattatgggggttttgataagtttttatgaagttttattttatatgttattggtgtgttaaaaggtgtaattttaggtttatattgtttattgttaggggttgatatatttaagtagtttttttatgaattaggtagtttaggtattttttttatttttggtattgatagatgagtaaaaggaagttatttagatggtgttatatagggttttagtttacgtggtgaatgatttttaatgtttggtttaatttatttttaaatgaaatttgttattgattttggattaaaaggataaattttatagttgttattattgatagagttatagtgtttaagtgatattttttaaggaggggagggagggtggtttgtttgagttaaggggagggtatggagattttttagggagtttggtttagtagtaaggggtagtgtaagattttatgtttagagggaagtttaaaaatattattttttttaattgaaatatttgacgtgatgtttatttttgagttttatttatataatggaaatagtagtgatatttgttttatggtatttatacgattattagaggtatgttagttgtttttagggatgggaggttttttattttttgtagtatttttagaatgaaatgagtgataggcgttatttattttagtgaatttttagagattgttttttgggttagtttttgtttattttttgtttttattaggttttcggtttttacggtgtttagagattatatttgtattgggaagtagataagaggtataattatataggggaggaggatgggttgggatgtgttcgtttatatttagtttttgttttattttattgtgtaattttgtgtaggttatattatttttttgagttttgtttttttatttgtaaaagaaggaagggtataatagtagttttaggggttgttgtatgaattataggagattatgggtgtgaatgtgatttgtaaattgtaaagtgtagtttaggtgttgtaggaaatataagtgggatagtatagtatagtgggaggtttttgagttgggagataaaggatttggatttagttttgttatgagtggttgtgtggttttgagaaagtgaattattttttttgggttttagttttttaaggtgttaagaggg

SEQ ID NO: 1685 - DNA, 2734 bp, Artificial Sequence
  chemically treated genomic DNA (Homo sapiens)
tttttttggtattttaagaaattaagatttagagaaagtaatttatttttttagagttatatagttatttatgatagaattggatttaggttttttgttttttaatttagagattttttattatattgtattgttttatttgtattttttgtagtatttaaattatattttatagtttataaattatatttatatttatgattttttataatttatataataatttttgaggttgttattatattttttttttttttatagatggagaaataaagtttagaaagatgatgtaatttgtataaagttgtatagtgaggtagggtagaggttgaatgtgaacggatatattttagtttattttttttttttgtgtaattgtgttttttgtttgttttttaatgtaagtgtaatttttgggtatcgtggaagtcgagagtttagtggaggtagaaggtaagtaaagattagtttaggaaatagtttttaggaatttattagagtgggtgacgtttgttatttattttattttgggaatgttgtaggagatggaaagttttttatttttggaggtaattaatatgtttttagtggtcgtgtggatgttatgaggtaaatattattgttatttttattatataaatgaggtttagaggtgagtattacgttaagtattttaattgggaaagatgatatttttaaatttttttttaagtatgggattttgtattgttttttattgttgagttaagttttttggagagtttttatattttttttttgatttagataggttatttttttttttttttttgagaggtgttatttgagtattgtggttttgttagtggtaatagttgtaagatttgtttttttaatttagaattaataataaattttatttaaaaataaattaaattaggtattggaaattatttattacgtgggttggagttttatatagtattatttaaatggtttttttttgtttatttattaatgttaagagtgggggaaatatttaggttgtttgatttatggagaaattatttaaatgtattagtttttaataatgagtaatgtaagtttggagttgtattttttagtatattaataatatgtggagtgaggttttatgagagtttattagagtttttatggttattggttttgagagagtttatttataagggggaataatggttttagtatgtagtcgtttaatttttagaatgtattattgagttttgaggagtaatggaattttattaaagttttatttgttatgggagggtatgaaatcggtgcggaattttaggtttggtatagatatgtttagaaagtagtagggttgattttaggaggtgggtgaataagtttagagggagaggggggagtaggaggggtttcggatgtgtgaaaatatgtgtgttaataagagtttcggtttttagcgattacgtttatattagtgaataaaatttggtaataaaatatcggagttgcgttttagatagtatttttttttatagtttggtgtattttatttattataataggaggtagggagcgcgaggtgtttttatttttttttttttaattaaattttttaaattattgtttaagatttggataaagcgaaagatttatagtttttttaatcgttatcgaggttttcgttttattattgtggtggttttgattgtatcggtttttaatattattaaagtgaaatattgtgggtattgtttgtttgggttttggtttttaaaaagagatgtagtattaggaagaaattggtttacggttaggaaagaggtttgggttttaggacgggttttgttattattattttgtgtgattttgggtaagttattttttttatttgagatttatgatttttttttttttttagatgtttattttgaggtttttagaattgatttggagttggggtagtttttggatttatattgggacgattggggagttttaagaatatatgggtgtttagggtatattttagagattttgatataattggttttaggtgagatttgggtattagggtttaaaaaaaattttttaggtgattatagtttatagttaggattgaatattattggtttaaatatagagttattagatattattggatttgagattttttggagaggttggttgtggttaggttttatttttgggtgtttttttttagattggtttttcggggtgggtatttgggaatttgtttgtttattaagtattttaggtgtgtttcgtgtagggatttagtgggttgtagtgaggattttaatagaggtgggaggataagggttttttgaattgagtttagttagtttcgtggaatgaggaggtttttttgttttagtttttttttggagggtagtatagggagtcgatatgtgattttttatttcggtttggggtattttttttttttgatgattgatttttttatttgttttatttatcgttggtaggagttttgattggtttttatagttatattatgtttttattataggaattttaggtttggtttttttgtttatgtggtttacgatcgtcgtagatttaggttttttatatggacggatttcgagtttttatttgtattttgtttttcgtagggtttttaggttttttaggaaggttttgtttaggttgagagttatgtttgggttaagggttaggagttagggatagtaggggg

SEQ ID NO: 1686 - DNA, 2441 bp, Artificial Sequence
  chemically treated genomic DNA (Homo sapiens)
ggatattttttaggatttttggtaaaggtaggagttagaatgaatgaattttttgtgtttaggtttttttgttgtttttggtttttagtttttggtttaagtatggtttttagtttagataaggtttttttaggaggtttaggagttttgcgggaggtagagtgtagataaaggttcggagttcgtttatgtggaaaatttgggtttgcggcgatcgtgaattatatgggtagaggggttagatttggggtttttatgatgggaatatgatgtgattgtggaggttagttaaggtttttgttagcggtgagtggaatagataaagaaattagttattagaggagagaagtattttagatcggagtgggaggttatatatcggttttttgtgttgttttttagaggggaattggggtagaggggtttttttattttacgaggttggttgggtttaatttaaggaatttttgtttttttatttttgttggaatttttattgtagtttattggatttttgtacgagatatatttggggtgtttagtgagtaggtagatttttagatatttatttcgaaaagttagtttgaaagagaatatttaggggtggggtttggttatagttagtttttttagagagttttaagtttagtaatatttaataattttgtgtttaggttaatggtgtttaattttagttgtggattgtgattatttggggaattttttttaaattttgatatttagattttatttaagattaattatgttagaatttttggggtgtgttttgggtatttatatatttttaaagttttttagtcgttttagtgtgggtttaaggattgttttagttttagattaattttaagagttttaagatgaatatttggggaaaaggagaagttatgagttttagataagagaaataatttgtttaaggttatataaggtggtgatggtaaagttcgttttgaaatttaggttttttttttgatcgtgggttaatttttttttgatgttgtatttttttttaaaaattagagtttaggtaggtaatgtttatagtattttattttaataatattggaaatcggtatagttagggttattatagtggtggggcgggagtttcgatggcgattaggggagttgtaagtttttcgttttatttaaattttgggtagtaatttagaaaatttaattaaagggggagaaatggggatatttcgcgttttttgttttttgttataatgagtgaaatatattaggttgtaaaaggaaatgttgtttgagacgtagtttcgatgttttattgttaagttttatttattgatgtaaacgtaatcgttggaaatcggagtttttattaatatatatatttttatatattcggggttttttttgtttttttttttttttttgggtttgtttatttattttttagggttagttttgttgttttttgggtatgtttatgttaagtttggagtttcgtatcggttttatatttttttatggtagataagattttaatagaattttattgttttttagagtttagtaatgtattttggaaattaggcggttatatattaaagttattgtttttttttataaatgggtttttttaaagttagtgattatgggggttttgataagtttttatgaagttttattttatatgttattggtgtgttaaaaggtgtaattttaggtttatattgtttattgttaggggttgatatatttaagtagtttttttatgaattaggtagtttaggtattttttttatttttggtattgatagatgagtaaaaggaagttatttagatggtgttatatagggttttagtttacgtggtgaatgatttttaatgtttggtttaatttatttttaaatgaaatttgttattgattttggattaaaaggataaattttatagttgttattattgatagagttatagtgtttaagtgatattttttaaggaggggagggagggtggtttgtttgagttaaggggagggtatggagattttttagggagtttggtttagtagtaaggggtagtgtaagattttatgtttagagggaagtttaaaaatattattttttttaattgaaatatttgacgtgatgtttatttttgagttttatttatataatggaaatagtagtgatatttgttttatggtatttatacgattattagaggtatgttagttgtttttagggatgggaggttttttattttttgtagtatttttagaatgaaatgagtgataggcgttatttattttagtgaatttttagagattgttttttgggttagtttttgtttattttttgtttttattaggttttcggtttttacggtgtttagagattatatttgtattgggaagtagataagaggtataattatataggggaggagga

SEQ ID NO: 1687 - DNA, 2441 bp, Artificial Sequence
  chemically treated genomic DNA (Homo sapiens)
ttttttttttttgtgtaattgtgttttttgtttgttttttaatgtaagtgtaatttttgggtatcgtggaagtcgagagtttagtggaggtagaaggtaagtaaagattagtttaggaaatagtttttaggaatttattagagtgggtgacgtttgttatttattttattttgggaatgttgtaggagatggaaagttttttatttttggaggtaattaatatgtttttagtggtcgtgtggatgttatgaggtaaatattattgttatttttattatataaatgaggtttagaggtgagtattacgttaagtattttaattgggaaagatgatatttttaaatttttttttaagtatgggattttgtattgttttttattgttgagttaagttttttggagagtttttatattttttttttgatttagataggttatttttttttttttttttgagaggtgttatttgagtattgtggttttgttagtggtaatagttgtaagatttgtttttttaatttagaattaataataaattttatttaaaaataaattaaattaggtattggaaattatttattacgtgggttggagttttatatagtattatttaaatggtttttttttgtttatttattaatgttaagagtgggggaaatatttaggttgtttgatttatggagaaattatttaaatgtattagtttttaataatgagtaatgtaagtttggagttgtattttttagtatattaataatatgtggagtgaggttttatgagagtttattagagtttttatggttattggttttgagagagtttatttataagggggaataatggttttagtatgtagtcgtttaatttttagaatgtattattgagttttgaggagtaatggaattttattaaagttttatttgttatgggagggtatgaaatcggtgcggaattttaggtttggtatagatatgtttagaaagtagtagggttgattttaggaggtgggtgaataagtttagagggagaggggggagtaggaggggtttcggatgtgtgaaaatatgtgtgttaataagagtttcggtttttagcgattacgtttatattagtgaataaaatttggtaataaaatatcggagttgcgttttagatagtatttttttttatagtttggtgtattttatttattataataggaggtagggagcgcgaggtgtttttatttttttttttttaattaaattttttaaattattgtttaagatttggataaagcgaaagatttatagtttttttaatcgttatcgaggttttcgttttattattgtggtggttttgattgtatcggtttttaatattattaaagtgaaatattgtgggtattgtttgtttgggttttggtttttaaaaagagatgtagtattaggaagaaattggtttacggttaggaaagaggtttgggttttaggacgggttttgttattattattttgtgtgattttgggtaagttattttttttatttgagatttatgatttttttttttttttagatgtttattttgaggtttttagaattgatttggagttggggtagtttttggatttatattgggacgattggggagttttaagaatatatgggtgtttagggtatattttagagattttgatataattggttttaggtgagatttgggtattagggtttaaaaaaaattttttaggtgattatagtttatagttaggattgaatattattggtttaaatatagagttattagatattattggatttgagattttttggagaggttggttgtggttaggttttatttttgggtgtttttttttagattggtttttcggggtgggtatttgggaatttgtttgtttattaagtattttaggtgtgtttcgtgtagggatttagtgggttgtagtgaggattttaatagaggtgggaggataagggttttttgaattgagtttagttagtttcgtggaatgaggaggtttttttgttttagtttttttttggagggtagtatagggagtcgatatgtgattttttatttcggtttggggtattttttttttttgatgattgatttttttatttgttttatttatcgttggtaggagttttgattggtttttatagttatattatgtttttattataggaattttaggtttggtttttttgtttatgtggtttacgatcgtcgtagatttaggttttttatatggacggatttcgagtttttatttgtattttgtttttcgtagggtttttaggttttttaggaaggttttgtttaggttgagagttatgtttgggttaagggttaggagttagggatagtaggggggtttgggtataggaaatttatttattttggtttttgtttttgttagaagttttagggagtgttt

SEQ ID NO: 1688 - DNA, 2473 bp, Artificial Sequence
  chemically treated genomic DNA (Homo sapiens)
agtaattatgttataagggtggtgggtgggttaaatgagttgagttttggtatataagtaatttagtatggagtataataaatgtttattttgtgtttgtcgttattgtttttaagttttttttttggtttttattggtgtggagtattttattgttttttttttttatagatttttattttgttatttaggttggagtgtagtggtttaattatagtttattgtagttttgaatttttgggtttaagagattttttttttttagtttgttaagtatttaagattataggtatgtattattatgtttagttaagtttaaataaattttaatttatttttatgttattttatttattgtgtagatagggttttgttttgttattttgggttggagtgtagtggtaggattttggtttattatagttttaattttttaggtttaaatgatttttttgttttagttttttagtagttgagattataggtatgtattattatgtttcgttaatttttgtattttttgtagggatggggttttgttatgttgtttaggttggttttatttgttttaatttaagtattttttttgttttagttttttaaaatgttgggattatcgttgtgagttattatgtttggttatatatttttttttatttaaggttagaagaatttttaattttaattaattttttttggttaaatagttttttttttaattattggttaagttgaaagtagagattaaaaaatattatattattatttggttagtaaagaaatttttttttttttattattattattttttttttttttttttttgttttttttttttttttttttttttttttttttttttttattttttttttttttttttttttttttgtttgttttggtttaatgaaaggttttataggacgttgttcgtggtgttgatttgtttttttgttttgtttaaattttgtatgtaaatgaaaagataatatagttattgaatgttgaagttggggatattttttaagttaatttttgtgtttgtggtgtggttacggttttggttattatttttggttatagtgtttcggagatgttgatgttgatttggattagaggtgttagtttgggtattgttagtttttatagttattgattagagttttagggtataggtagttagtaatttatttgggtgttttagggattgttattggtaaagtgatggttttatagggattaaatgtgaagttaaagtaggatacgtaggtcggagataaggttaagaatagattttttttagcgtttaagtgttgtttgttagaaattgatagttttacggttttggtcggtgataggtatagggtgataataatattatatgattagtattattggaggataggttgttattggtttttagagataaggaaataatgggcgatttttttgtttagggaaaggtttgtatggagtttttagggtaaagtagtaagatttaaagtgtgtttttgatttttggtattttattagtattttttttttttagtaggtttttagagtttttttttgttatttagggattcgtggtttttattgtgtatttattattttgatttttgttttttggagttaattatgttatttttagagtataggtgttagtggatgataatagataagtagttttttttttagttttttgtattatagacgttgttaagggaatggagtgggagaatagagttttttcgaggtggtttatgtaggttatggatttagtattaatagtttttttttagtattggatttttgagaaataaaaaggttgggtgtggaggggtttttatattttttagtgtttttttattttattttattggagtaaagttgttgattttatatttggggatatattttgggatgggttttattgttttggtttggttatatttttttttttattgttgcgtaatttttttttattatagttttaatagttatgaaatggggatttagtatatttaggttttagttttttttttgattttagtttgatgaatgatttagggattatagttaagttattttattttttggttttagtttttttaattgtaagttggggttatttatttgtaattattagatttgttaggtggtatgaagttttagtgagataaatatatgtgagggttgggcggtgggagatttgagatttattttttattaattaggtttattgagtatagtgtggagtattgttgggttttagtttggaggtttgttttgtttgattttttaggtggtaagattattttttcgtttttttttttttttatgtttaggttgtgattttttatgggtttattttttatatttttttgtttttttttttttatgtttgttttttaattggtttttgtttttgtttttttttttgattttttacgtatatttgtaaattttattt

SEQ ID NO: 1689 - DNA, 2473 bp, Artificial Sequence
  chemically treated genomic DNA (Homo sapiens)
gagtgaggtttgtagatatacgtaaaagattagaaaaaaaggtaagaataagaattagttgagagatagatatgagagaaagaaaataggagggtatgagaggtgagtttatgagaaattatagtttaagtatagaagaggaggggaacggggggatgattttgttatttggggagttaggtagagtagatttttaagttgagatttagtagtgttttatattgtatttagtgggtttggttagtggggggtaaattttagattttttatcgtttagtttttatatatatttattttattggaattttatattatttggtagatttgatagttatagatgagtagttttaatttatagttgaagaaattgaggttagggagtgaagtgatttgattatgatttttaaattatttattaagttggggttagggaaagaattaggatttaggtgtgttgagtttttattttatggttattggggttatggtagggaaaggttgcgtagtagtgggggaagggatatagttaagttagggtagtggaatttattttaaaatatgtttttaagtgtagggttaatagttttgttttagtggggtggaatgggaagatattagaaaatgtgggagtttttttatatttaatttttttattttttaagaatttagtgttggagagaggttgttagtgttgaatttatggtttgtataaattatttcgagaaagttttgtttttttattttatttttttagtagcgtttgtggtgtagggagttggggagggaattgtttgtttgttattatttattaatatttgtgttttagagataatatgattaattttagagaataggggttagaatagtgggtgtataatggaggttacgggtttttgggtgataggaaggagttttgggggtttgttgggaggagggggtgttggtgaggtgttaggggttagagatatattttagattttgttgttttgttttgggggttttatgtaggtttttttttaggtagaggggtcgtttattgtttttttatttttgggagttagtgatagtttgttttttaatgatgttgattatatggtattgttattattttgtgtttgttatcggttagggtcgtggggttgttaatttttgataaatagtatttgagcgttaaagggaatttgtttttggttttattttcgatttgcgtattttgttttagttttatatttggtttttgtggggttattattttgttaatagtagtttttggggtatttagataagttgttagttgtttgtgttttggggttttagttaatggttgtggggattggtagtgtttaggttggtatttttggtttaggttagtattagtattttcggggtattgtggttagagataatggttagagtcgtggttatattataggtatagagattagtttggggaatgtttttagttttaatatttaatagttgtgttgtttttttatttgtatatagagtttgaataagatagaaaaataagttagtattacggatagcgttttgtgaggttttttattaagttaaagtaagtagggaagaaaggaggaaaggagaaggtaagggagggaggagaaagggagggaaagggggaagaggtaaaaggaaaaggagaggaaatggtgatggtaggggagggagagtttttttgttggttaaataatggtgtggtattttttagtttttatttttagtttggttagtggttgaagaaaagattatttgattaaggaaggttaattgaaattaaaggtttttttgattttagataaagaaggatatgtggttaggtatgatggtttataacggtaattttagtattttgagaggttgaggtagaaggagtgtttgagttaaggtagatgagattagtttgggtaatatgataaaattttatttttataaaaagtataaaaattagcggggtatggtagtgtatgtttgtagttttagttattggggagttgaggtaggaggattatttgagtttgggagattgaggttgtagtgagttaagattttgttattgtattttagtttagggtgatagggtaagattttgtttatataataaataaaatagtataaaaataaattaaaatttgtttaaatttagttgggtatagtggtgtatatttgtggttttagatatttggtagattgaggaaggaggattttttgagtttagaaatttaaggttgtagtgagttatgattgagttattgtattttagtttaagtgatagaatgaaaatttgtgaaaaaaaaaagtaatgagatattttatattaatagagattaaagaaggaatttggaagtaatgacgataaatataaagtaagtatttgttgtgttttatgttaagttatttatatgttagaatttaatttatttagtttatttattatttttatgatatagttgtt

SEQ ID NO: 1690 - DNA, 2500 bp, Artificial Sequence
  chemically treated genomic DNA (Homo sapiens)
atgatagattggattaagaaaatgtggtatatatatattatggaatattatgtagttataaaaaatgatgagtttatgttttttgtagggatatggatgaaattggaaattattatttttagtaaattatcgtaagaataaaaaattaaatattgtatatttttatttataggtgggaattgaataatgagaatatatggatataggaaggggaatattatattttggggattgttgtggggtgtggggaggggggagggatagtattaggagatatatttaatgttaaatgataagttaatgggtatagtatattagtatggtatatgtatatatatgtaattaatttgtatattatgtatatgtattttaaaatttaaagtataataataaaaaaaaaaatagatatgatataattataaaaaaagaaagaatagtatattagagggaaggagtagtttttattttttattttttattttttttgagatagtttcgttttgttatttaggttggagtgtagtggtataattttggtttattgtaatttttgttttttaggtttaagtaattttttttttttagtttttcgagtagttgggattataggtatgtattattatattcggttaatttttgtatttttagtagagatggggttttgttatattggttaggttgattttaaatttttgattttaggtgatttgttcgttttagttttttaaagtgttaggattataggcgtgagttattatattcggttagtagttttatatatttaggaaaaaagtattagatgtgatttttaagttaataataatttagaatagaaaatttaaatattgttttagtgtttggtttagttttagtttaatgttgtattttgtatttgtttattgtaagatgtgaatgttttatttaatttttttggtagatgtatttttttttatatttttttaaaaattgaaagatgatttttttattttttatttagttttgaaagggaggtatagttaatgatttcgtacgtattttagaaattgatttttttagattttaatagaagttatttaagtgtatagatgtttgttggttttatatggaggttttgttggttatgaaaaaatatttttttttaattttttgtttaatttgttttaagttggtaatgaaatttgtgaatttgtgttttttttttataggaaaaatagaattttgattttttttaaaaattagaacgtaataggataatggagaaattagttttaatagtatattttttgttcgttttagagcggtgatgtaaatacgatgatgttatgtttttggggtttttgaggtttttgttaaaagtatagtagtttaggtggattcgtgtttatcgtatgtttttttggtggatttttgtcgataaattgtatgtttgtttttttgaaatagtattatgaagttgttaatgtttttgtataaagattattttattttgtttgttttggggataaagattttgtattaattattttgtttttttttggagcgaagagttgaagaggtaataggaaatgtttatttattgagtttttattgggtattaattgtggatatttatagaaggggtttgagtaagtatttttttattgtttaggggttagagtagagaatagaaaggaaatagtttggtttttggttttataaaataaataagaataaaatagaatattgaatatttgtgttttttttattattttaatgtatgtattttgtagattttgtatttaaatatgtagaataggttaatgaaagaaaatgttaaggtcgggtatagtggtttatatttgtaattttagtattttgagagttcgaggtgggtggattataaggttaggagttcgagattagtttggttaatgtagtgaaatttcgtttttattaaaaatataaaaattagtcgggtatggtggcgggcgtttgtaattttagttattcgggaggttgaggtaggagaattatttgaattcgggaggtagaggttgtagtgagtcgagattgtattattgtattttagtttgggtggtagagagattttattttaaaaaaaaaaaaaaagaaagaaagaaagaaagaaaatgtttttaaattttattatttagagataaaattatttatttttggagagtatttttttaaatttcgtttttttttaatggtttttagttgaggataattttggtcgtttgcgtatatttggtaatgtatggaaatatatttggttgttatatattaggaaggggtgtttttggtatttagtgggtagaggttgaggatgttattaagtattttatattgtaaaggatagtttttttttttattataaagaattatttagtttaaatgttagtggtgttgaggttaagaaattttgttatagatatatggatgtgtagttttgtgataattatataattaagtttatattatgttagttgtttattatttt

SEQ ID NO: 1691 - DNA, 2500 bp, Artificial Sequence
  chemically treated genomic DNA (Homo sapiens)
aggatgatgagtagttggtatagtatgaatttgattatgtaattattatagagttatatatttatatgtttatagtagggttttttggttttagtattattggtatttgagttggataattttttgtggtggagagaggggttgttttttgtagtgtgggatgtttagtggtatttttagtttttatttattaaatgttaggaatatttttttttagtgtgtgataattaaatatgtttttatatattgttaaatgtacgtaggcggttaaaattgtttttagttgagaattattggaagagagcgagatttggaagaatgttttttaaaagtgaatgattttgtttttgggtggtgagatttgagggtattttttttttttttttttttttttttttttttttttgagatggagtttttttgttatttaggttggagtgtaatggtgtaatttcggtttattgtaatttttgtttttcggatttaagtgatttttttgttttagtttttcgagtaattgggattataggcgttcgttattatattcggttgatttttgtatttttagtagagacggggttttattatattggttaggttggtttcgaatttttgattttgtgatttatttatttcggatttttaaagtgttgggattataggtgtgagttattgtgttcggttttggtatttttttttattagtttgttttatatgtttgaatgtagaatttataaagtgtatatattaagatggtgaaagaaatataaatgtttaatgttttattttatttttatttattttgtggaattagaggttaagttgttttttttttgttttttattttggtttttggataatgaggagatatttatttaaattttttttgtgggtgtttatagttggtatttagtaagaatttagtaaataagtattttttgttgtttttttagtttttcgttttaggagagagtaaggtgattagtgtaaagtttttgtttttagggtaaatagaatggggtggtttttatgtaaagatattaataattttatgatgttattttagaagagtagatatataatttgtcgatagaaatttattaaagaagtatgcggtaggtacgaatttatttaagttgttatgtttttggtagaaattttaaagattttaaaagtatagtattatcgtgtttatattatcgttttgaaacgaataagaaatgtgttattgagattgatttttttattattttgttgcgttttgatttttaaaagagattaaaattttattttttttgtagaaagggaatatagatttatagattttattattaatttaaaataaattgagtaaaaaattagaggggaatgtttttttatagttagtaaggtttttatgtaaaattagtaaatatttgtgtatttgagtagtttttgttaaggtttaaggaagttagtttttggaatacgtgcgagattattgattgtgttttttttttaaaattgaataagaaatgaagaaattattttttagtttttaaaaaagtgtaaaaaaggatatatttgttaagaaagttggatggggtatttatattttataataaatagatgtagaatgtagtattgagttggaattgggttagatattggggtagtgtttggattttttgttttaagttgttattaatttaaaaattatatttagtattttttttttaagtatataaaattattggtcgggtgtggtggtttacgtttataattttagtattttgggaggttgaggcgggtagattatttgaggttaggagtttgagattagtttggttaatatggtaaaattttatttttattaaaaatataaaaattagtcgggtgtggtggtgtatgtttgtaattttagttattcgggaggttgaggaaggaggattgtttgaatttgggagatagaggttgtagtgagttaagattgtgttattgtattttagtttgggtgatagagcgagattgttttaaaaaaaataaaaaataaaaaataaaaattattttttttttttggtgtgttgttttttttttttttgtgattatgttatatttgtttttttttttattattatattttaagttttagggtatatgtgtataatgtgtaggttagttatatatgtatatatgtgttatgttggtgtgttgtatttattaatttgttatttagtattaggtatattttttaatgttattttttttttttttttatattttataatagtttttagagtgtgatgtttttttttttgtgtttatgtgtttttattgtttaatttttatttatgagtgagaatatgtagtgtttggttttttgtttttgcgatagtttattgagaataatgatttttaattttatttatgtttttataaaggatataaatttattattttttatggttgtatagtattttatgatgtatatgtgttatatttttttaatttagtttattat

SEQ ID NO: 1692 - DNA, 2333 bp, Artificial Sequence
  chemically treated genomic DNA (Homo sapiens)
tttgtaattttagtatagtgggaggttgaggcgggaggattatttgaggttaggagtttgagattattttggttaaaacggtgaaattttatttttattaaaaatataaaaattagttgggtatggtggtgggtatttgtagttttagttatttaggaggttgaggtatgagaattatttgaatttaggaggtagaggttgtagtgatttaagatggtgttattgtattttagtttgggtaatagagtgagattgcgttttaaaaataaaaattaaaattagaacgtaggatatttaatatttattgttttagttttgttggggaggggtataataagaaaaattttatttggtattttgaaataaattagtattggggtgagtttagtggggtagttgatggttgagttaggttggtgcgatggaaggagttgtgagggtttcgtagtttggagtatttttggtttttttagtagttattataagacggagtaggtagggttgtagttggatagtttagttaggaaatgttagttatgaatgagtgttttatggttgttttgggaatgtgtgttaggattggaattttgtagttgaggatttgaaatgttttgattaggtggttaaagagtatgattttaggtcgggcgtggtggtttatatttgtaattttagtattttgggaggttgaagcgggtggattatttgaggttaagagtttgagattagtttggttaatatggtgaaatttcgtttttattaaaaatataaaaattagttaggtacggtggtgtacgtttgtagttttagttatatgggaggttgatgtaggagaatggtttgaatttaggagacggaggttgtagtgagttaagattgtgttattgtattttagtttggatgataagagtaaaatttttttttaaaaaaaaaaaataaaataaaattgtgattttataataaggttatgttgttagggattacgtattgacgtttttagggagaaatgagaaggaatatagtaatcgaataagacgatgttcgtttatgatatttatgatgttttttaaggtttgagatatattgttttttgtttaattagttattgtgattatatttttatggagattattatgtttgtatttataatagatacgtgtgtatttattaaaggaatatagttgttaaacgtacgttttgggtttagggtggagtggttttttatagtatagttatcggagttgttgtaaaaagtgttagaaaataagtaaggagttgtttttatttatgaagagaggttttttttggtattaggttttgggtttaggggagtgtgaaatttaggaaggcggggtgtatacgtttatgataaaagttttaaaggcgtagatttattttttttttttttttttttaaatgtgtgttaaagatttttaagtttattaattaatgaagggattagtaagatgttaaaaattggtttaggagagaatgtagagaatagatattaatataggtaattaggaatgttttggttaagagatataaaattggttttttttaagagtagtaaggagaatggggagaagatttagttttttattaaaaaaatttgagagttaataagtgtttagtagagtgagtggtgtttggacggaggggtggataggtcggatgggatttaagcgagattgtgttatttagatttgggtagtgttttagggatgtttagtagaggggtaggaggttgtgggggatgtcgttgtttgggttttgttttttttgtgttaagtatttttagttttttgtataggttttaaatgtggtaaatgtatggtagattttggggtatgaggggatgagaggggattttttagaagagtagagtgggaatagattatgaaagtttgggattgtagattttagttttgttatgggataagaaattagttttttttagatattattcggtattcgtttttgttttagaattgagagtagtaaagggtttttgtgtttgttttgtttttggttttttttttttttttttagagatagggttacgttttgttttttaggttggattgtagtggtataattgtagttgattgtaattttaaatttatttttgggtttaagtaatttttttatttcggttatttgttaatttttatttttgttttttggtagagatagggttttgttatgttgtttaggttggttttaaatttttgtttttagtgatttttttgagttggttttttaagatgttggattataggcgtgagttattgtatttggttttttttttgttgttttgtttaatgggattt

SEQ ID NO: 1693 - DNA, 2333 bp, Artificial Sequence
  chemically treated genomic DNA (Homo sapiens)
aaattttattggataaggtagtaaggagaaggttaggtgtagtggtttacgtttgtaatttaatattttggggggttaatttaggaggattattagagataggagtttaagattagtttgggtaatatagtaagattttgtttttattaaaaaataaaaataaaaattagtaggtgatcggagtgggaagattatttgagtttagaagtgagtttgagattatagttagttataattgtgttattgtaatttagtttgggagatagagcgtgattttgtttttagaaaaagaaaaaagaagttaggagtaggataaatatagaagttttttgttgtttttagttttgaggtagaaacgagtgtcgaatggtatttgagagggattggttttttgttttatggtagagttagggtttgtaattttaagtttttatggtttgtttttattttatttttttggaaggtttttttttatttttttatgttttaaggtttgttatgtatttattatatttggggtttgtgtagggagttggggatgtttagtataaaaaggataaggtttagatagcggtattttttatagttttttgtttttttgttaagtatttttggagtattgtttaggtttgggtagtatagtttcgtttgagttttattcggtttgtttattttttcgtttaagtattatttattttattgagtatttgttggtttttaaatttttttaatgaaagattaaattttttttttattttttttattgtttttggaagaaattaattttgtgttttttgattaaaatatttttaattatttatattaatgtttgttttttgtatttttttttgagttagtttttaatattttattggtttttttattaattaatgagtttaaaaatttttggtatatatttgaaaaaaaaaaaaaagagagtgaatttacgtttttggaatttttgttatgagcgtgtgtatttcgtttttttgggttttatatttttttagatttagggtttgatattagagagagtttttttttatgaataaggatagttttttgtttgttttttgatattttttgtagtagtttcgatgattgtgttgtaaaaagttattttattttgggtttagagcgtacgtttggtaattgtgtttttttaatggatgtatacgtgtttattgtgagtataaatataatggtttttatggagatatggttataatgattaattagataaaagatagtgtattttaagttttgaaagatattatggatgttataaacgaatatcgttttattcggttgttgtatttttttttatttttttttagaaacgttaatacgtggtttttagtaatatgattttattatgaagttatagttttgttttgttttttttttttgagaaggagttttgtttttgttatttaggttggagtgtaatggtataattttggtttattgtaattttcgttttttgggtttaagttatttttttgtattagttttttatgtagttgggattataggcgtgtattatcgtgtttggttaatttttgtatttttagtagagacggggttttattatgttggttaggttggttttaaatttttgattttaggtgatttattcgttttagttttttaaagtgttggaattatagatgtgagttattacgttcggtttgaagttatattttttagttatttggttagaatattttagatttttaattgtaggattttaattttggtatatatttttaaggtagttatggggtatttatttatggttggtattttttgattgggttgtttaattatagttttgtttgtttcgttttatgatggttgttaaggggattagggatgttttaagttacggggtttttatagttttttttatcgtattagtttgatttagttattagttgttttattgggtttattttaatattgatttgttttaggatgttagatgggattttttttattgtgtttttttttaataaggttggggtaatgagtattaaatattttgcgttttggttttggtttttgtttttgagacgtagttttattttgttgtttaggttagagtgtagtggtattattttgaattattgtaatttttgttttttgggtttaagtgatttttatgttttagttttttgagtagttgggattataggtgtttattattatgtttagttaatttttgtatttttaatagagatggggttttatcgttttggttaggatggttttaaatttttgattttaagtgattttttcgttttagttttttattgtgttgggattatagg

SEQ ID NO: 1694 - DNA, 2492 bp, Artificial Sequence
  chemically treated genomic DNA (Homo sapiens)
agaggtattttggttgtgggagaaaagtaggttaattttggtacgatcgtttttttttgggatagtgagataagttttttaggattagttggggagttttagagaagttcggtattggtaatgttttgagagtttatttttggagttaagggatttaggttttttatcgtgtatgtttattttttgggtaaggtattggatggtaggattttaagtagaggtaggaaagggtaatttttagttttttgtagaaggtttgattgcgggggtagttagttgggattgtttagttttgaagtagagattgagaatttcgtttgtttgtgtgattattatttatgtttattttttttttgagttttagtttttttatcggtaaaatgggaagagaatggattagagagtattttttttttatttttaaattatagagtttttttttttttttttaagataggttttgttgtattatttaggttggagtgtagtggtgtgattatagtttattgtagttttgattttttggatttaggtgatttttttgttttagtttttttagtaattgggattataggtataggttattatgtttggttaattttgtatttttattttttggtagtaatagagtttttttgtgttgtgtaggttggttttaaatttttggttttaagcgatttttttgtttgtttttaagcgatttttttgttttgggattataggtgtgagttgttatgtttagtttatagataatatgtattgagtgtttattatatgttaagtattgggttaagtttgttgtatgtagtattttgtttatattttataataattaagggggtaggtatttgtttgttttatagatgaggaaattaaggtttttagtagtaaagtaaattttttaagtttatttagtatgggaatgatagatataggtttgtaatttaggttttgttgatatcgaaatttgggatgttagtaattttattttgttgtttgttagttttgttaggttttttaggacggtttttattttgagttatatttttaggaatattttgttattttttattttttttttgggtttatattatgaaagttttatgtagagtttgttattttagagggatatatattatttaaatttgataagataatttaattttatttcgtgtttgttatcggcgataaaattaggagatttttatgatttagtatttttagtaagattgttaggaatttattatataaggtttaattggatttttttttgtagatggttgggagttatgggttggaacgtaattcggtaatatatttggggaaataaatgtaaaatgtttgttttagagatttagataaggtagtaggtttttaagttttttaagaatcggatttgttttttttgggttttgaagggcgatttggggaggatttacgttgtcggaggaggagggaatggcgggttttttttttttttattttttgattttttttgttttagggaaggaatgtgagcgtatttgagatttggagtttagtaattgtaattttttgagaggtagtaatttagagtagatttgggggtgggaggataggatggtgggtagtggtgagattaaggttatgaggattgtgtgtattgaaagaggggtgtaggatgattaaaacgatggggaattgggtttttattagttgttcgggatttgttatagagttattttttattgttttgagaggttcgcgttttttttaaatatatttttaggattggtgtggtttttataaattgggtttttaaatagattttattttttggatgtgagtttatatttagatttagatgattttcgtatataagtttatagatattttaagattttgaggtttattgtgagggcgttttaaatttatggtttattttaaattttgatttttcgtaggcgtgggtttatagacgggtttgcggtttattttagtttttatagtatttatgcgatttttgttattggaaggaatggtaataattatatttatttttgtatttatttaatagatttgtcgaattttgaggttggagttttataagagttagttttaaatttagggtttattttttagtgtagatattttttaaatttttgtttatatatagatttggtataattttagatttagttagttgtttaagttagattttagttttttagttattagtagtatttgagagttatttttttaataagtttatattaagttttgaggatttggtatttttagttttaggtttcggtttttgtgtagggaagttgttgtaatattattgatttgggaagtttgaggtttgtttttgcgtatttgttttgtgattttaagttttttttacggggttaggaaggcggcggagatatttttatttgtttttgggtttttcgatgttttaatggattttagtattagaagttttttttttttttgagtcggagtttcgt

SEQ ID NO: 1695 - DNA, 2492 bp, Artificial Sequence
  chemically treated genomic DNA (Homo sapiens)
gcgagatttcgatttaaaaaaaaaaagggtttttggtattggagtttattgaagtatcggggagtttagggatagataaaaatgttttcgtcgtttttttggtttcgtagaaagagtttagagttatagggtaggtgcgtaagggtagattttaaattttttagattagtggtgttgtagtagtttttttgtataaggatcggagtttgggattggaggtgttagatttttaaggtttggtatgagtttgttgagggggtaatttttagatgttgttggtagttagagggttggagtttagtttgggtagttaattgaatttggggttatgttagatttgtgtgtgagtagaggtttgggggatgtttgtattagagaatgaattttgaatttggggttggtttttgtaaagttttaattttaagattcggtagatttattaggtgggtgtaaaagtgaatgtggttgttgttattttttttaatggtaaaaatcgtatggatgttgtgaaagttgagatggatcgtaagttcgtttatgagtttacgtttgcgagagattagaatttgaggtaagttatgaatttggagcgtttttatagtgaattttaaaattttggagtatttgtgagtttatgtacgggggttatttgaatttggatgtgaatttatatttaaggaatggggtttgtttgggaatttagtttatgggggttatattagttttagaggtgtgtttgggaaggacgcgggttttttagggtagtaaggagtgattttatggtagatttcgagtagttagtgaagatttagttttttatcgttttgattattttgtattttttttttaatgtatatagtttttataattttggttttattattgtttattattttgtttttttatttttaggtttattttgaattgttattttttagggaattatagttgttgaattttaagttttaggtgcgtttatattttttttttggggtaagaagagttaagggatgaggggagaaagagttcgttatttttttttttttcgatagcgtaaattttttttaaatcgttttttagggtttaggaaaagtagattcgatttttggggagtttggaggtttgttgttttatttaagtttttggaataagtattttgtatttatttttttaaatgtgttgtcgaattgcgttttagtttatggtttttagttatttgtagagagaaatttagttagattttgtataataagtttttgataattttgttgaggatgttgggttataaaagttttttggttttatcgtcggtaatagatacggagtgaaattgagttgttttattaaatttagataatatatatttttttagagtagtaggttttgtatggggtttttatggtatgagtttaggagggggatagggagtggtagagtgtttttggggatgtggtttagggtgggggtcgttttggaaagtttggtaggattgataggtagtagggtagggttattagtattttaggtttcgatgttaataagatttggattataaatttgtgtttattatttttatgttgagtgaatttggaaaatttattttattgttgagggttttggtttttttatttgtaaagtaggtagatgtttgtttttttgattattgtgaaatgtaaataagatgttatatgtaataggtttagtttagtgtttggtatgtagtgagtatttaatatatgttgtttgtggattggatatggtagtttatatttgtaattttaaggtaggaggatcgtttgagggtaggtaggaggatcgtttgaggttaggagtttgagattagtttgtataatatagggagattttgttattattaaaaaataaaaatataaaattagttaggtatggtggtttgtgtttatagttttagttattagggaggttaaggtaggaggattatttgagtttaggaggttaaggttgtagtgagttatgattatattattgtattttagtttgggtgatatagtaagatttgttttaaaaaaaaaaaaaaaaattttgtaatttgggaatgggagaaaaatattttttggtttattttttttttattttatcggtggagaaattgaagtttagagagggagtggatatggatggtggttatataggtaggcggggtttttagtttttgttttagggttgagtaattttaattgattgttttcgtaattaggttttttgtaagaggttggaagttgtttttttttgtttttgtttaaagttttgttatttagtgttttgtttaggaaatggatatatacggtaggaagtttgggttttttggttttaggaatggatttttaggatattgttagtgtcgggtttttttagggttttttagttggttttgggaagtttgttttattgttttaggaggggacgatcgtattagaattgatttattttttttttatagttaagatgttttt

SEQ ID NO: 1696 - DNA, 2301 bp, Artificial Sequence
  chemically treated genomic DNA (Homo sapiens)
gatagtttttagtagattttgatgttggtttgagagtttttggagtaggtggtttataagttgtggaatagagattaagtatggtatattaattgtgtgtttagtttcgagttaattgttatatgtttttatagtgatttaataaggtatgtgtgaagggtttatttttatatataattagtgtgagtttttattgtttttattttaggtaattgttatattatttttttgagatgggttttagtttttttagttattaatgaataaagaaaagtgttaagaagagaggtggtttgttgagaattatatggttaggggttaattttaaagtagtgagttttcgttttagtatattttgtttttattttttgatttagttttgtagttgaatggcgttttttaatttttttaattttagtttttttatttgtgaaatggaggagttggattattgggttgggagtttttgatattatgtgtgattttgtatgatttttttttttttttgtattttagtttttttatttgtaaaagaagttgttagtattttattttaatgttatttataaacgttgttttaaaataaaatttttggtgagggaaggttttaagtttagttttttggaaataggttttgagttagagttttgtttgcgggaggtttattgggggagagtttttaggaatatcgtggtaggggtgagggaagtaggattacgtggagggagaagttgaattgtgaagtttttttagtaggggttttagttgtttttatagggaattttggagttgggatgttttaaatcgagtaaggggttaggtttttgaatttatgtatttattagatattggatatgggtttttgtttttttattcgtttaaaggtatgacgtggggtgaggtagttgattttggttgagggttgttagtagttatagggttaaaatcgttttgggtggtatgatttattatataaaatttgttaaaaattcgggtcgattttagttttggaaataatagtaggtaagacgtggtttgagtttgggtttatttagttgggtttggtttcgtttcgagggtttgtcgtttgttgtgattatagtaggattagtgttttagattttgtttaaagtttggcggttatcgtttgtttcgtagtttatttttcgtagtttttcgaggttttagcgattatgttattgaaaatttcgtttttattttgttaatttcgtagtaaattataggtttggggaggcgtgggttttttttttaaataagatttaattttatttagttgtttttatttttattttatatacgggtttttttttttttattatttcgggttcgggatttatggtttttttttgtaggtagttggtaattatggtaagttttttagggaggttttaggttggagtttttttagttttagattttagtacggtcggtcgtttttttttaggatgggagaggggagaggttagagatggtaggaatgggttttaggggttaaggtcgagaggttatagtaattttagtaattatgagaattttaatattattatatttgatttttataataattattattttttttattatatagatgggtaaattggggttagggagtatgaggttattgttaaggttataattaaggaagtagttgattttggggttgaggtgtttaagtattttggtatattttttttttttttagttgttgtttttggatgtttaaattttttttagattttagtttttgtttatatttttttagtgatggggaaattatttttttttggtaggtttgttatttttttaacgattagatatagttgttaaataattgattaggttttgtgattttttagaagggttattttgatattgattgttttttgtgatttggttgttaatttttttttgtaaattgattttttatggtttgttattatagtaggttgtttggggtttttttgttgtttagtgtttcgttttgttttaggttttttttatttatttttattttgttttaattattagttttgtttttatttttattatagaatattaaagttggaaatttatgattttttatttttttgatggagagaggtttagagaggggatgtatttttttagtgtatagggtgaattgatagtgtgggttttaaatttttcgttaataaaataataaatagtattgagtatagttaatttttgttaagtgtttgataattattattttaagtatttacgaatgtaatttatttattttttatataattttatgag

SEQ ID NO: 1697 - DNA, 2301 bp, Artificial Sequence
  chemically treated genomic DNA (Homo sapiens)
tttatagggttatgtgagaagtaaatggattatattcgtgaatgtttagaatggtggttattaagtatttgataaaagttagttatgtttagtattatttattattttattggcggaagatttgggatttatattgttaatttattttgtgtattagagaagtgtattttttttttgggtttttttttattaggaaaatgaggagttatggatttttagttttgatattttgtgataggaatggagatagggttggtaattggagtaggatgggaatgaataagaaagatttggggtagagcgggatattgagtagtaaggagattttaggtagtttgttgtggtggtaaattatgaaagattagtttgtagaagagagttagtagttagattatagagggtagttagtgttaaaataatttttttgaggggttatagggtttgattaattatttggtaattatgtttaatcgttagagagataataggtttgttagagaggagtgatttttttattattaggggaatgtaagtaggggttgagatttaagagagatttgaatatttaaaagtagtagttggggaaagaaggagtatgttagagtgtttaaatattttagttttagagttaattgtttttttggttgtgattttggtagtgattttatgttttttggttttagtttgtttatttatataatgggggaaatgatggttattgtgagggttagatgtggtagtgttgaagtttttatgattgttggggttattatgatttttcggttttggtttttgaagtttatttttgttatttttggtttttttttttttttattttaggagaaagcggtcggtcgtgttggagtttggggttaaggaggttttagtttgaagtttttttaaggagtttgttatggttattagttgtttgtaaagagaggttataaatttcgagttcggggtggtgggagggagggaattcgtgtgtggggtgggaatgggggtagttaagtggaattgaattttgtttaaggaggaggtttacgtttttttaggtttgtaatttattgcgaggttgataagatgaaagcggaatttttagtggtataatcgttgggatttcggggagttgcgggagatgagttgcgaggtaggcggtggtcgttaggttttaagtaagatttggggtattgattttgttgtgattatagtaagcgatagattttcggagcggggttaggtttagttggataagtttaggtttaggttacgttttgtttgttattgtttttagggttgaggtcggttcgagtttttagtaggttttatgtgatggattatattatttaggacggttttgattttgtagttgttgatagtttttagttaaagttagttgttttattttacgttatgtttttaggcgggtgaggggatagaaatttatgtttaatatttggtagatatatggatttaaaggtttggttttttgttcgatttggagtattttagttttagagttttttgtgggagtagttgaggtttttgttgagagagttttatagtttaatttttttttttacgtggttttgttttttttatttttgttacggtgtttttgagaatttttttttagtgaatttttcgtaggtaaagttttggtttaaggtttgtttttagggagttggatttagggtttttttttattaggagttttgttttaaagtagcgtttataagtagtattggagtaggatattggtaattttttttatagatggaaagattgaggtgtaggaagggaagaaaattatgtaaggttatatatggtgttaggggtttttagtttaatagtttaatttttttattttatagatggaaagattgaggttgggagagttgggagacgttatttagttgtagagttgagttagggaatggaagtagagtatgttggggcggaagtttattgttttggagttggtttttagttatgtggtttttagtaagttatttttttttttgatatttttttttgtttattggtaattggagagattaaagtttattttaggaggatggtgtgataattgtttaaaataagagtaataagagtttatattggttgtgtgtgggaatgagttttttatatatattttgttgaattattgtgaaaatatgtagtagttggttcggggttgggtatatagttagtgtattatgtttgatttttgttttataatttgtggattatttgttttagaggtttttaggttaatattagaatttgttagaagttatt

SEQ ID NO: 1698 - DNA, 2351 bp, Artificial Sequence
  chemically treated genomic DNA (Homo sapiens)
tataaaatgttttagggagttattgaatttttttaaggggtagtagataaagtataattttggagtagggagatttgttgtgttagtttaggagacgttggttgttgtaatagggaaattttgatattttagggattcggtttaataaagcgtattttttgtttatagaaagtttatttggtggtagggttgagggtgggtgggggttttttgttttataaagttatttaggtatttaggttgatagagattttatgtttttaatatgtggtttttaaggtttttttggattttataagttagatgcgataggatagagtatgaagggttggtgcggggtatttttgggagtggtgtatattattttttttgatttattggttggaatttagttttatagttatgtaattttaaggagagtgggaaattttgtgtttaggaagaagaggaaatggatttggagagttatattagtttttgttatatttggttttgaatttagattttgttatatattatttgtgggattttagtttttttaatatgtttgagttttagtttttttattaaagggtaaatggtgataattttttaggaggtatgatgttgggagggttttttgagttttttttttaatatttttatgtagtcgtggtttttatttgtagagttttagtttttatgtataattgtttatatatttgttaatttttttggtaataattttttttttggagggtaaattttattagaataggggttatattgtttttaattagagttgtagttttaataattggtttggcgtttagtatttagtaggtatttaataaatatatgtcggggaaatgaatggacggataagttaatatgaatatatatgtgttaagatttatttttttaaaaatttttttttaataaatattcgtatttttatgttttattatggtgtggtgagggggagggaggggggaagaagacgaggaggaggaggggtattttttttttatttttattggagtttaaattataaatagttttagttggaatttgattgtagatttttttagtaaagttagtatttttaggattttttattttggatggggatcgggagtgtttttttattaattatagttttttaattaatagttttgagtttggaataaaaggtgtttatcgggagaacgttagcgggttttgaattttggtcgtttgtttttatttggaggatttggcgttttggggagtaggtatggtatggtttagtgttgagtttggtaggggatggggtttggagggcgagtagttggtaggtcggttgtttgtttttattttggatatttttatatagagttgattcgatttcgagtaggttgttggtagttttgttttttttaggttgatgttgatgttattggtttggggtggggttggatagtgaagttgttacgttttttaggtggttttaatgtgtatagtttgaaaaatattgttttagggatggtaggtttggtagaaggtattgagatgggtttaaaggtttaattgagtgatttagagatggatatttatttaaggtatgtttaatgtttaggtagattaaaggtttatttttttttttttttttcgttggcggatgtagtaggaatggaatttgttttttttttttttattatgttttttggagatgattagaggagagttagattatagaagtaggattttagttaggggttgggtgggaggtttggaaggtaggaggaagtatatatagtttggtattggaagtagtggttttagggtttttgttgagttttaggtgtaatattaagttgatgtaaaagtcgttgtggttttttttattgtttttaatgataaaaatcgtaatttgataaaaggttaatatttagaatttataatgaatttaaataaatttataagaaaaaaataaataattttattaaaaagtgggtaaaggatatgaatagatattttttaaaagaagatatttatgtagttaaaaaatatatgaaaaaatgtttattattattggttattagagaaatgtaaattaaaattataatgagatattattttataatagttagaatggtaattattaaaaagttaggaaataataggtgttggagaggatgtggagaaataggaatatttttatattgttggtgggatcgtaaattagtttaattattgtggaagttagtgtggcgattttttagggatttagaattggaaatattatttgatttagttattttattattgggtatatatttaaaggattatgaattatgttgttataaagatatatgtatacgtatgtttat

SEQ ID NO: 1699 - DNA, 2351 bp, Artificial Sequence
  chemically treated genomic DNA (Homo sapiens)
ataaatatacgtgtgtatgtgtttttatagtagtatgatttatagttttttgggtatatatttagtaatgggatggttgggttaaatggtatttttagttttagatttttgaggaatcgttatattgatttttataatggttgaattagtttacggttttattaatagtgtaaaagtgtttttatttttttatattttttttagtatttgttgttttttgattttttaatgattgttattttaattgttgtgagatggtattttattgtggttttgatttgtatttttttgatggttagtgatggtgagtatttttttatgtgttttttggttgtataaatgtttttttttgagaagtgtttgtttatgttttttgtttattttttgatggggttgtttgttttttttttgtaaatttgtttgagtttattgtagattttggatattagttttttgttagattgcggtttttattattgaaagtaataggaaaaattataacgatttttgtattaatttgatattatatttggggtttagtaggagttttagggttattgtttttagtgttaagttgtgtgtgtttttttttgttttttaagttttttatttagtttttggttgaagttttgtttttgtggtttggtttttttttgattatttttaggaggtatgatgggagaaggaaaggtaggttttatttttgttgtattcgttaacggggagaagaggagggagtgggtttttgatttgtttgggtattaggtatgttttgggtaagtgtttatttttgggttatttagttaggtttttggatttattttagtgttttttgttaagtttgttatttttggagtagtgttttttaaattgtgtatattagagttatttggggaacgtgataattttattgtttagttttattttagattaatgatattagtattagtttgaggaggatagagttgttagtaatttgttcgaagtcgagttagttttgtgtggagatgtttaaggtggagataggtagtcggtttgttagttgttcgttttttaaattttattttttgttaggtttagtattgagttatgttatgtttgttttttaaggcgttaggttttttaaataaaaataggcggttagagtttagggttcgttggcgttttttcggtaagtattttttgttttaggtttagagttgttaattaaagagttgtgattaatgaggaagtattttcggtttttatttaggatgagaggttttggggatgttgattttgttggaggaatttgtagttagattttaattggagttatttatagtttgagttttagtaggggtgggagaaaggtgttttttttttttttcgtttttttttttttttttttttttttattatattatgatggaatatagaggtgcgaatatttattgaggaagaatttttaaaggagtaaattttagtatatatgtgtttatattaatttattcgtttatttattttttcgatatgtatttattgaatgtttattaagtgttgggcgttaggttagttgttagggttgtagttttgattgagagtagtgtggtttttattttggtggagtttgttttttaggagaggagttattattaaggaagttgataagtatgtggataattgtatatagaggttggagttttgtaggtaagaattacgattgtatgggagtgttggagaaaaaatttaagaaatttttttaatattatattttttaggagattattattatttgttttttaatgaggaaattgaggtttagatatgttaaggaagttaaggttttataaatagtgtgtggtaaggtttagatttaaaattaagtgtggtagagattgatgtggttttttaaatttatttttttttttttttaggtataaaattttttattttttttgagattatatagttatgaggttgagttttagttagtgaattaagaggaataatgtgtattatttttaagggtgtttcgtattagttttttatgttttgttttgtcgtatttagtttatgaaatttagagggattttggaagttatatgttgaaggtatagagtttttgttagtttggatgtttgaatggttttgtggaatagaaaatttttatttatttttaattttgttattaagtagattttttgtaagtaagaaatacgttttgttgaatcgagtttttgggatgttagagtttttttgttatagtagttagcgttttttaaattaatatagtagatttttttgttttaaggttatgttttatttattgttttttaggaagatttaatgattttttaaaatattttata

SEQ ID NO: 1700 - DNA, 2440 bp, Artificial Sequence
  chemically treated genomic DNA (Homo sapiens)
attgtataaatgttattgtgtttattgtatgttagatattttttgagtattggaaatacgttagtgaaggaggcggataggagtatgcgtttagttaggatgatagataatagaggaattattaattttaatggtgataaatgtattttatatattggatttttatgtaatatttaattagaagataaagtttttttattgaaaaataattagtaggtttttaggttagtatattttgtgggttatgaagttagtagttaagagtggtatttggaattttgtttttgtggtttatttagggtgggagagtgtttgtgaggtttagttattttgttagaatggaagttttattattcgttgatgagtgttagatagtgcgttagtttattttaaagttgttaaaatatgtatttatttgggtttgttttgataaatagataagaatttgtgttttttgcgagtttattagaatttagttattataattatttgttatatgttttttaattttatgggtaattttagggaggtggttgatttagatgaaagaaggttttttagtaattgtttagggtatttggaagaatatttaagttttttattatgatttatgggtttgtgttgatttcggttttttttttttgtttatttttattttgttttatggttttttatgttgtagatgttaattttaggttttatttgaattatttttagttgtaaattaggaaggtattaattggtgtatgttttgtaagtgttgttagaattagagttattgggttggttgataggagtttagagggtagtttttttttttttttgagtttgtttttttagttattttttttaaaagttgttgggttgatgtttgtattttggttggttttgatgttagttttgacggggttattttggaatttgtttgtataggttgtcgagggcgtgagaatttaagtagataatttttagttttattttttttgttgtgttaggttgttagtgttagttgaggaggtttttttttgtttttgtttgttttttttgattgttatgtaatgttcggtagtaggaggtaaatttttttttaatttttaggttcgttatagcgtatgaattttatcgtggggagttatagtgattgagtttagtagttaggttttatgttgagtgttataaattaggtttattattagttttttttggtagatgttatagttaagaatttgtttattgtttgcgagatttagtcgtttttgtatattgttaaattagggttgatagatttatcggggatttaggggatttttatgatattttggttgggtgttgttaggaattttattttgagagagtaggaggtgatatagtttttggtaaggtattttagatttgagattttatagtttgatgtacggggagtagaattagggtatgattatttgtaggttatttggattttttggtatggtggttttttgtgtgtttggttgtatacgtaagaatttttaggggatttgttaaaaaatatatattttttaggtttatttttagagattttgatttggtaagtgttttttgggatatggaaattagtattttttattagattttaggtgattttgatgtaggtggtttttggattattttttgagaaatgttgttttgggattagttgtatttttgaagtgatgtttgtaaaatgaatgtttataaattgtgggttttttttttttatttttttttattatttggttgaagatgtgtttgtttggggaagaagatgtgggttttaagaattaatggtaattaaattgaagaataagataaatttttgattatgatatatttaaagggtaataataatgttaatagtaaggggaaaagtttcgtagtaggatgttttgttgatatttaacgtgttatagggggagttttatttttgttttttattggttttgtttgtatgattaaggttgttatatgttttggttattttgggttagtttaagtttatgtaggttgttttagtgtaatttttaatagtttttttttcgattttcgaaagttttagtttggatgatagttgttattttgttaataatttataggattgttttttttaagatttttattttttttttaaagggatttgttttatagttgtttttgaaggattttgttagattgattttagtagtggattttatattaaagtttattttgattttgggttgggatgaatggtaaaaggaattttttgattaggtaatttttttattttttttaggaaatttcggtggggaaaaggaaggttttatgatttgaatagaagaaatagaatttggtggttagggaaagttttttttgggggtttattttttttgtgatttgaatagaagaaatagaatttggtggttagggaaaattttttttgggg

SEQ ID NO: 1701 - DNA, 2440 bp, Artificial Sequence
  chemically treated genomic DNA (Homo sapiens)
ttttagggaaggttttttttggttattaaattttgttttttttgtttaggttataggaagggtggatttttagggaaggttttttttggttattaaattttgttttttttgtttaggttataggattttttttttttttatcgggattttttggaaagagtagggggattatttggttaaagagttttttttattatttattttagtttagagttagggtgaattttagtgtgaaatttattattgggattagtttgataaaattttttagagataattatagggtagatttttttggaagaaaagtggaggttttaagggaagtaattttatgggttattgatagagtaataattgttatttagattgggattttcgagagtcgaagggggaattattagaagttgtattgggataatttgtataaatttggattgatttaggataattaggatatatgataattttggttatatagatagagttaatgagaaataaggatagagttttttttgtagtacgttaagtattagtaaaatattttattacgggatttttttttttgttattagtattattattgttttttaaatatgttatagttaaagatttgttttattttttagtttgattgttattgatttttgaagtttatatttttttttttaggtaaatatatttttagttaaatgatagaaggaaatggaaaaaaaagatttataatttataggtatttattttataggtattattttagggatatagttggttttaaagtagtattttttaaagggtggtttaggaattatttgtattagaattatttgggatttagtaaaaaatgttaatttttatgttttaaggaatatttattaaattagaatttttggggatggatttgggagatgtatattttttaataagttttttagaggtttttacgtgtatagttaggtatataagaggttattatattaggaaatttaggtagtttgtaggtgattatgttttgattttgtttttcgtatattaggttgtgagattttaggtttgagatgttttgttaagggttgtgttattttttgtttttttagaataagatttttggtaatatttagttagagtgttatgaagattttttaaattttcggtggatttgttagttttggtttaatagtatgtagaggcggttgggtttcgtaagtagtgggtaggtttttggttatggtatttgttaggagaagttggtaataggtttgatttatgatatttagtatgggatttggttgttgagtttaattattgtggttttttacggtggggtttatgcgttgtaacgggtttggaaattggagaggaatttattttttgttgtcgaatattatataataattaagggaaataagtagaggtaggagggggtttttttagttggtattggtagtttggtatagtaaaggaggtaggattgggagttgtttgtttgggtttttacgttttcgatagtttgtgtaagtaggttttagggtggtttcgttagagttggtattagagttagttaagatataagtattagtttagtaatttttagaagggatggttggggagataggtttagaggaggaaaagggttgttttttaaatttttgttagttagtttagtagttttaattttaatagtatttatagaatatgtattaattaatatttttttgatttgtaattgggaataatttaaataggatttgagattgatatttgtaatatgagaggttatggaataaaatgaagatgggtagggagaagagatcgagattagtataggtttataggttatggtggggagtttggatatttttttaagtgttttggatagttgttgaaggatttttttttatttagattagttatttttttagaattgtttatagggttaaggaatatgtgatagatgattatgataattgagttttgatggattcgtaaggaatataagtttttatttatttattaaagtagatttaggtaggtgtatattttggtaattttgagatgaattgacgtattgtttaatatttattagcgggtgatgaaatttttattttgataaggtggttgggttttatagatatttttttattttaaatgaattataaagataagattttaagtattatttttagttgttgattttatgatttataaaatgtgttggtttagaaatttattaattattttttagtaaaagaattttattttttgattaaatattatatagaggtttaatgtatgaaatgtatttattattattgaaattaatgatttttttgttgtttgttattttgattagacgtatatttttgttcgttttttttattagcgtatttttagtatttaaagagtatttggtatgtagtggatatagtagtatttgtgtaat

SEQ ID NO: 1702 - DNA, 2476 bp, Artificial Sequence
  chemically treated genomic DNA (Homo sapiens)
ttaatttaaatttttattaagatggaaaatattattgttattttaatgcgtttttttatgtttttttttagtgaaattttaattttattgattttagaggtaattattgttttgatgttttttaatatcgatttgtttttttttttttaaaattgtatataaatggaattatagaatatgtattttttttttgtaaaattttttttatttaatatagtatttttgagatttttttaagttttagtatatattaatagattattttttttattgttgagtagtgttttattgtatggatatattatagtttgtttatttgtttttttgttgatgtatttttaggttattttttatttttggttattatagataaagagattatgagtattttgtgatattttgttatatttatttattttgttttttggttattatgaataaagaggttatgagtattatattatatattagtatatttttttattttatgtaaatatttaggagtggaatgtgggttatagggtaggtataaatttatttttataaaaagttgttggatttttttttaatataggtgtagaaagagtttgttttttttagtaatattaattagatagtatgtgaatttggtataaagtaagtgtttaataaatatttgttaaattaatatatagagaaaataaatagaaatatagtgattgttttaatttttttttattgtttattagtgaagtgtgattgtttacgaattatttaagttttatgagtttttaatatttttttatgtgggaataataaaatgtgttttagatgtttgaaaaggttagtgttgaagggttaggggtatggggggagattttaggaggtgagggatattatttatttaatataagcgtgtttttttttttttttttgatttttttagtttgtaagatttcggtttgtagttgttagggaatatgttaaagtttaggtttaggaggggttagggtaggtgaaaggggaagaggtatttggattaattattggttgtttttaaatgtttaaagttggtatttatatatttgattttttttatagttttttttttttagatttaacgtttaggtttttttgattttaaaattgggttatttgaatgttaaattttcgataattttttaatagaggtgtttattaatttgtgttaaattagagtttagcgtttttggaaatatatgtgatatttatatgaatattaaatgtttttattaggtatagtatttatatgatgaatattaaatgtagagtttaacgtagggatatagatttcgtttcgaggatttgttaatatatttttgcgtttttttagcggtatcggttagttttgtttgttgtttatttttaggtgatgagatgtggtaattgtggtattggttgaaataaataaatggtattttaattattaagtttagagatggagtagtaaaggaggttatagttgattatttaggagttagtaaaaggatgtttatttagtatgtaagacgatttttaaatattttataaaaggcgataattttttttgattaaagaatatattatttataagtgattttaatgttttttttttttttttttttattgttatttttttgttttttatttttattgtatgttgtagtatttgtttagtgatgaagtttttcgtaataaataatttataaagtaatttataagtatattatttttagtaataagataagatttggaagaaagtgttttattgatatatatatatatatatatatacgttttttggtttataagtagtaagttattagaatattaataattaaggtttatgggtttggggtgaagggtgttataagttatagtgttggagtttttatatataagttatgtaaagtgtttgaagtgtatttgtataataaataagagaaaatttattaaaaatagtttttttttttaatttttgtatatagttgttatggttttgtttatatggcgtgatattaagtgaagataatttttttttaatggttaattttttttgagtatatttattgagttaggtttagtgttaagagtttttaataaattgttttattttattttttttatttttatgagatatgttttattagtatttttgttattggataaagtaatagaggttgttttttagtttttaatatttagtttttgaatttttaatttagttaaagttatttatttaagtatttatttaatgttaatattttataggtatttgataagtatttgttattttttattttgggagttaggatgtatagatagatgatgtatttatagtagtattgtttaatagaaatataatgtaaattataaaggtaagttgtatataaaattttaattttttttttttaaaaaaaattagttttttggttaaattaaatttaattaaaaatttggttttggtttgttgtatagg

SEQ ID NO: 1703 - DNA, 2476 bp, Artificial Sequence
  chemically treated genomic DNA (Homo sapiens)
tttgtgtaatagattaaaattaaatttttggttaaatttaatttaattaaaaaattaattttttttaaaaaaggaaagttgaaattttatatgtagtttgtttttgtgatttatattgtatttttattaggtagtattgttatagatgtattatttgtttatgtattttagtttttagaataaagaatgatagatgtttattaaatgtttgtaggatattagtattgaatgaatatttgagtgagtgattttaattggattgggaatttaaagattgaatgttgaagattgggaggtagtttttgttattttgtttagtaataggaatattaataaaatatattttatagagatagggaagataaaataagataatttattgagaatttttaatattgggtttggtttaatggatgtatttaagagaagttagttattaagggaaaattgtttttatttagtattacgttatgtggataaagttatggtagttgtgtataaggattaagagaaaaggttgtttttagtgagtttttttttatttattatgtaaatatattttagatattttatatggtttatgtataagggttttagtattatggtttataatattttttattttaagtttatggattttagttattggtgttttgatagtttgttatttataagttaaggggcgtgtgtgtgtgtgtgtgtgtgtattagtaaaatatttttttttaggttttattttattgttaagaataatgtatttgtaaattgttttataaattatttattacgaggggttttattattgaataagtgttataatatatagtgaaaatggggggtaggaggatggtagtgaaggagggagagaagaaggtattggaattatttataaataatatattttttggttaaagaaagttatcgttttttatgaagtgtttggaagtcgttttgtatattaagtgggtatttttttgttgatttttgagtgattagttatagttttttttgttgttttatttttgaatttggtgattaggatgttatttatttattttagttaatgttataattgttatattttattatttggaaataaatagtaaatagggttgatcggtatcgttgaggaaacgtaaagatgtgttggtaagttttcgaagcgaaatttgtgtttttgcgttgggttttgtatttggtatttattatgtaagtgttgtgtttaatgaaggtatttggtatttatgtgggtgttatatgtatttttagggacgttgggttttaatttagtataggttaatggatatttttattaaagggttatcgaaagtttgatatttaaataatttagttttaaaattagagaaatttagacgttaaatttgaaggagagaaattgtgagagaagttaagtatataaatgttaattttagatatttgagagtaattaatggttgatttaagtgttttttttttttttatttattttgattttttttgggtttaggttttggtatattttttgatagttgtaggtcgaaattttgtagattggggaggttagggagagaaggaagggtacgtttgtattaaatgaatggtgttttttattttttaaaatttttttttatgtttttggttttttagtattaatttttttaggtatttaaggtatattttattatttttatataaaaggatattgaaggtttatggaatttaaatgattcgtaaatagttatattttattagtaaatagtaggaaaggattagaatagttattatatttttatttattttttttgtgtattaatttaataaatatttattaagtatttattttgtgttaaatttatatattatttggttgatgttattaaagaaaatagattttttttatatttatgttgaagaaaggtttagtagttttttataaaaataagtttatatttattttatgatttatattttatttttaggtatttatataagataaaagaatatattaatatgtaatataatgtttatggtttttttatttatggtagttaaaaaataagataaatgaatgtaatagaatgttatagaatgtttataatttttttatttataatagttaaaaatagaaaatagtttagggatgtattaatagaggaataaataaataaattgtggtatatttatataatggaatattatttagtaataaaaggaatgatttattgatatatgttgagatttggaagaattttaaaaatattatgttgagtgaaagaagttttataaaaaaggaatgtatgttttataattttatttatatataattttagaaaaggaaaaataaatcgatgttgaaaaatattaaaatagtagttgtttttggggttagtggagttggagttttattaagaaagggtataagaaaacgtattggagtgataataatgttttttattttgataggggtttgggttag

SEQ ID NO: 1704 - DNA, 2497 bp, Artificial Sequence
  chemically treated genomic DNA (Homo sapiens)
tttggtagaagtgtaggtattttgtaattttagtagtttttattttattcgttgtttaggtttgttagttaattggtatgttttagtagggcgaattggttttgtatgtttgaagtttttttgtaataattggtaaataatttttgttttgagttttcgttaaattttttgttaatatttttgtttttttagtttttttttaggatttttagattttttattatttaggaatttaaaagaaaatatttggtaaagttagattttgtaagagttgattttaaatgtataaatgattttagtttttatttgttagtgttcgggttttattagttgttggaattttgtgaaatattcgtattatttattatatttaaaggaagtaatttaattttttaattgggtttttttagttttttttattagatttgaggtaaggggattatattttttatttatttttttttggaatggtagtaggaaaaatattttaatatatttttttaaagaaattttttttttaatttagtattttaatttttttatattttttatgtggtttttgaattttatatattgagggttcgtattaaatgtttatttattgaaattattgttgataattaatttttatatattatatatatatatatatattatatatatatatatatttaaatgtgtttggttataagaattttttatgtagtagattattgaattatagattttttagtattggtatttggaaaaggtttaaatttgaaggtagagaaaattaatagtttaaggtttttaatttaaagatagattttattaattttaggttggttgttttgtatagttttgtaatgttttttttatatgtgagtttggttcgtttgttttttttgtttttatatttttagttttttggttggtttttttagggataatttttagtgtttgtttgatttgtgttataaagtagatatgaatagttaggttagagagttatgtattaattttttgggtggttaattttttttttttatattttagtgttattttaagggaaaagaaatgtaggatatggaataaatagagggaaatttgtttgatttgttgttaatgtgttagtgttttgttttgtgggtttaatttgtagaaggtaggtttttgttttgttattttttggtatttaatagggtttgtttttagtgatttagtcgggtttttttagatagaaaatagttatttagtgttttttatattattaagaaaatgagattattttttgaggagattagtagttttcggttgttgtcgaaagggcgttttgtttgtttgtttggttgaaaggtattacgtagtttaggtttgtttaaaattagtttttttataaattatttgtataatgaagtgtttgtttttgttttttgatatatttgtgtttttgtttatttttaatgatgatatggttttttttgtttttatttggttttttattttttatatttttaagtattaatttttgtggtaaaagtataaaatttaagaaattgtagggaagaaagagttttttttttattagtatataaatgtagtggggaaattgagttagttttgggggtatttttggaggaaattgttttttttttaattttgttagattataatattttgaaattgtattttttgaaagagtaagagggtgatggtaatattttgtaatttgataggggtttgtgttatatacgtgtatgtgtttgtaaaatttaataaatgtatatgtattttatatgtaagtttttatataaagaaaaaagtaaattaataatgaattttaataatatttatatagaattatttaagaagaagtatattagtttttttaatttattttgaaatgtatttaaaattgtgataaattaattgatggatagatggatagacgtgataaaataagtagaaaaaaaatgttaaaggtaaaatatagatggtaggtataagtttgttttttgtaaaattattttaattttgttgtaagtttgaatatttttataataaattattagaataaatgtttttttggtgatttatattgaatttttggaaatattagagagttatagtttttaaaattttgtattttatttaaattttatttttaaaaatttatatttatatagagttaaattgtaataatttatgataataaggaaaatagtatttttgatttagtaaaaagtataaaatatagaatattttaagagagagggaaattttattagttagatatataagaattttttttaatttaaatggtatgtaattagaagtttttaatgtagttttttaatttaatatataaaatataaatgaagaatagtaaagggtatataatgattaaaatttatataggatgaatttaaatgggtttggggtgagaaagtttaattttagtgaatttatagttattgttgaaataaataaataaataaacgaatatttagaaaag

SEQ ID NO: 1705 - DNA, 2497 bp, Artificial Sequence
  chemically treated genomic DNA (Homo sapiens)
tttttttgggtattcgtttgtttgtttgtttgttttaatagtaattgtgggtttattaaggttggatttttttattttaggtttatttgaatttattttatgtgggttttggttattgtatgttttttattgttttttatttgtgttttatatattggattagagagttgtattaagaatttttagttatatgttatttaaattgaagaaggtttttatgtgtttaattaataaaattttttttttttttagaatattttgtattttgtattttttattgggttaaggatattgttttttttgttgttataaattattgtaatttaattttatataaatatagatttttaaaaataaaatttgggtggaatataggattttagaagttgtggttttttgatgtttttaaggatttagtgtgggttattaagagagtatttattttaataatttattgtaaaaatatttaaatttgtagtaaagttgaagtaattttgtagggaatagatttgtatttattatttatattttgtttttaatattttttttttatttgttttattacgtttgtttatttatttattaattaatttattatagttttggatgtattttaaagtaaattgagaaaattagtatatttttttttaaatagttttgtataaatattattagagtttattattagtttatttttttttttatgtaaaaatttatatgtaaggtatatatatatttattgagttttgtaaatatatatacgtgtgtaatatagatttttattaagttatagaatattgttattatttttttatttttttaaaaagtataattttaggatattataatttgataaagttagaaaggaggtaattttttttagaaatatttttaaggttaatttagtttttttattatatttatgtgttggtagaaaaggaatttttttttttttgtagttttttagattttgtatttttgttatagaagttagtgtttgggagtgtggagagtaaagagttaaatggaaatagaaaaagttatgttattattaaaaataaatagagatataaatatgttagagggtagaggtagatattttattgtgtaagtgatttatgaggaagttaattttaaataagtttgggttgcgtggtgttttttagttaaataaataggtaaagcgttttttcgatagtagtcgagagttgttgatttttttaaggaataattttatttttttggtggtgtaaaaggtattaagtggttgttttttgtttaaggaaattcggttgagttattgaaggtaggttttgttaaatgttagagagtaataagataaagatttgttttttataagttaaatttataaaataaaatattgatatattaataataaattaagtaggtttttttttgtttattttatgttttatatttttttttttttaaaatggtattaggatatgagagagagggattggttatttaggaaattagtatatggttttttggtttggttatttatgtttgttttgtaatatagattaggtaggtattgagagttatttttgggggagttagttaaggaattgagaatgtagaaataggagaggtaagcgggttaggtttatatgtggaggagatattgtaaagttgtataaggtagttagtttaggattagtagaatttatttttagattggaggttttaggttattagttttttttgtttttaggtttgagttttttttaaatgttaatgttgaaaaatttgtagtttaatagtttgttgtatgggaaatttttatagttaagtatatttaggtgtgtgtgtgtgtgtggtgtgtgtgtgtgtgtgtggtgtgtagggattgattgttagtagtaattttagtgaatgaatatttaatacggatttttaatatataaggtttaaaagttatatgaaaggtataaaaagattgaggtgttagattaaagagagaatttttttgggaaaatgtgttggagtattttttttattgttattttaagaaggggtgggtaggggatgtggtttttttgttttaagtttagtgagagaggttggaaaaatttaattagggagttagattgttttttttggatgtaatgaatagtgcggatgttttatagggttttaataattagtgaggttcgagtattgataaatgagaattgaaattatttgtgtatttggagttagtttttgtagggtttggttttgttaagtatttttttttaggtttttgaatagtgggaggtttggaggttttgggaagaggttgaggaggtaagggtattggtagaggatttgacgggagtttagagtagaagttatttattaattgttataagaggattttaaatatgtaaagttagttcgttttattagggtatattagttaattagtagatttgaatagcggatggagtaggggttgttggggttatagagtatttgtatttttgttaag

SEQ ID NO: 1706 - DNA, 2396 bp, Artificial Sequence
  chemically treated genomic DNA (Homo sapiens)
tttttttttttggttttattttggttttttttttattatttaaattttttattttgaataaagtagtaaaatgtatttttttttttatgcggtttagtataaggataggtttggatttttataatgaaagtttatgtttttaataagtgtttatagttagtgttttttgtatttatttaattgttgttttttgaaagttattattttttattttttgtgattaatgtgtattgggagttaaatttatacgtgtgtgtaggattttatttttaaagatatgttttattatcgtttattgatagggtttttaattttaagttaggatttacgtatgttagaggttgtggcgagttacgagtattgcgtttatttatgtatgggtataaatttttatggttttttttttttgtatagtttgagatatagggtggatacgtagtaatttaggtttttatagcgggttttagatttatttttgttaggatatagatattgtagagagatttttttattgtttattttttttattagtttgagttttttatttttagattttttttgtagttttttaatattttgaataatattatgtggtagatatggtttattttattttatagatgtggaaattgaggttaaatgtttatttaaaattatatagagattaaatgttttaattataataggatttaagtttttttggtttttaagttttatgttttttttataattttttagttaatatatttagtttaaataaagaatagattaattgattaatttaaatttttaaatttatttttgtattagtgttttggaggattaaggttatatttatagagtatagagtaaaaaaggagaattagtaaatatttagagtatttggtaagtattttagatatttaagttagaagatttaggagtgaaagagaatttttattattataattgttattataattgttaaaataaataaaattaattaaggatatgtagttgtatttgtatttaagtaagattgtagtagtttttaattaattaatatgtttattagtatgaagtaattgtgttttgtttgtgatcggtattttatttttatttattaaatatttattgggtattagtgatgtgttaagttttgtgttggaattcgagatgatatagatgattgacgtggttttcgtttttgggaagtatgtagtttaggaaagttatagaatgtagtttttaagaagaagttattggagtaagtagatgaaggttgggaaattatgtaagtttagggtagattagttaaattgtaatgggaatgtagttagttatttattttgaggttttaaagcggaataaaagggattgtaatagtttagattttttttttttttttttagggataggagtagttattatttaaatttttttgtgatgattagttgttttagttagttaaggttgttataataaattattattgattggatgatttaaataaaaatatttatattttatagttttggaaattgggaagtttaagattaaggtattggtagatttggtgtttgataagggtagttttttggtttgtagatggttgttttttagttgtgtttttatatggttagagtatttttaagtttttttataggtattaattatattttttaaaggttttattttttaatagaatgatattgggggttagattttaatatatgatatttgggaggacgtaaatttttagtttatagtatgagtagtttttatgtataggaggttaattatgatattttatgtgtttgttatttgagttttatattttttttttatgttagagtgggttattttatgttattttatttatttttgatgtttttttttagttgaatagaattttttttttatttaaggaatacgtattgttttgttaaataagggaggtttttttatttagggtaaagtataatagtattttagttaggatttgggggatttaggtatggattatttggaggttagatgggttgatagttaattggtattagatattgttattttttattaatagtttaggtatttgggagtttgtttattttagggtaagtttattgatttattttttaatttatagaaatttgaatttaaaagattggtagtaatatgtgatgtttatatttaggaattttagttttggtgtattgggggtttttgtttgttttttggttttagaaggtattttaagggtttatgtaaattaagttttttatagttattttagagatgttagggtgttttagatgggtatattagtgatattatgttatttgatgtttggatttttttagataattgttttgttagcgaataatttattggatttagttattgagatattgggg

SEQ ID NO: 1707 - DNA, 2396 bp, Artificial Sequence
  chemically treated genomic DNA (Homo sapiens)
ttttagtgttttaatggttgaatttagtgaattattcgttagtaaagtagttgtttgggagggtttaagtattagatggtatggtgttattggtgtgtttatttggggtattttggtatttttggggtggttgtaaggaatttaatttgtatgagtttttgagatgttttttaggattaaaaggtaagtaggggtttttagtgtattaaaattaaaatttttgaatatgggtattatatgttattgttaattttttagatttaggtttttgtagattaaaaaataaattaatggatttgttttgaggtgggtaagtttttagatgtttgggttgttaatgggaagtgatagtgtttggtattagttggttgttagtttatttagtttttaaatgatttatgtttgagttttttaaattttagttaggatgttgttatattttgttttaagtgagaaagttttttttgtttgatagggtaatgcgtattttttgggtgggaaggggattttgtttaattaagggagagtattagggatgaataaggtagtataaagtgatttattttggtatggaggagagatgtgaggtttaaatggtaggtatatgaagtattatgattagttttttgtgtatgaagattgtttatgttatgggttgaaagtttgcgtttttttaaatattatatgttgaagtttagtttttagtgttattttattaagaggtggggtttttgggaggtgtgattagtgtttataagaagatttgagagtgttttagttatatgaagatataattagaggataattatttgtaaattaggagattgtttttattaaatattagatttattagtgttttgattttgaattttttagtttttagaattgtgagatataaatgtttttgtttaaattatttagttaatgatgatttgttatagtagttttagttgattaagatagttagttattatagaaagatttgaatggtggttatttttgtttttgaggagggaaaggggaaatttaagttgttgtagttttttttatttcgttttagggttttagagtgagtagttagttgtatttttattgtagtttggttggtttgttttaggtttgtatgattttttaatttttatttgtttgttttagtggtttttttttgggagttgtattttatgatttttttggattgtatgttttttaagggcggggattacgttagttatttgtgttatttcgagttttagtatagggtttggtatattattggtatttaataaatatttgatgaataaaaatgaggtgtcgattataggtaagatataattgttttatgttaatagatatgttgattggttaagaattgttatagttttgtttgggtgtagatatagttatatgtttttggttaattttatttgttttggtaattatgataataattatgataataagaatttttttttatttttaaattttttggtttgaatgtttaagatatttgttaaatgttttgggtatttgttagttttttttttttgttttgtattttgtggatatggttttgattttttagagtattggtgtagaagtgagtttgggagtttaaattagttagttaatttgttttttatttggattagatatattaattgggggattgtgagaagaatatgaaatttggggattaaagagatttgagttttattatgattaaggtatttagtttttgtgtaattttgagtaaatatttaattttagtttttatatttgtaaaatggaataaattatatttgttatatagtattgtttagaatattaaggaattataggaaagatttggagatagagagtttaggttgatgagggagatagataataaaaaaatttttttataatatttgtattttggtaggggtgagtttgaggttcgttgtaggagtttgaattattgcgtatttattttgtgttttagattgtgtaggggagagaggttatggaggtttatgtttatgtatgagtaaacgtaatgttcgtggttcgttatagtttttggtatgcgtgggttttggtttggggttgagagttttgttaatggacgatgatgaaatatgtttttggaagtagggttttgtatatacgtgtgaatttagtttttagtgtatattagttataggaaatagaaaatgatagtttttaggaggtaatagttaaatggatgtagagggtattggttgtggatatttgttagaaatatgaatttttattgtagggatttaaatttgtttttatattaaatcgtatgagaaggggggtatattttgttattttgtttagggtggaggatttaaatggtaagagaggggttaaggtgaggttaggaagggagg

SEQ ID NO: 1708 - DNA, 2391 bp, Artificial Sequence
  chemically treated genomic DNA (Homo sapiens)
taaaaaggtaatatataaaataattaagtatagtatgttagaggaaggtatttgttatagaaatagattatagtaagggagttagggagtattggggtggggagggtttattatttggataaggtagttaggaaaggtgtttgttaaagtgatattttaatagtgatttataggaagaaaggaagtaaattatgtagattatttgaaggaagagagttttaggaaaagggaatagtaagtttaaaggttttgaggtcggagtgtgtttggcgtgtttaaagaagagtaaggagattaatatggttagagtagtatgagaaggttagaaagagttaggtaatgtagagataggtaatgtagttagagagaggatattgtgagattatgtggggttttataaagttattgaaaagattttagtttttattttgagcgagatagggaagaattatagttttgagtagaatgttgttatttgattgatatttttataaagtattttgtgatttagttgagaatagattgtagagtagatggaggataaaggagaaagttaggaggttagagaggatagtgatgtgataatataggggagagacgtgggtggtatgagttttggtgatgaaggtggtgaaaagtgattggattttggatatagtttgaaagtgaagtttataggatttataggtatggttgtaaataatgtgaagtgttatagagaaaaagtatagggatattgtgtattattggtgagtagaggttgtttttttaagaaagcgattttggggttaaaatttgagatttaagtaggagttaatttgataaagattttatagattttttgtttagttatttgtagttttttgataatgagaggaggggagggaacggaatgggagaggaagaggttgtttttttttgggaaaggggaaaattttgttataaaaagttggaaatagtttaaagagttatgttttgttagatatgtatttgtaatttaaatagttttgtttttatgggtttgtttgttatagattagttagtgggtagattgtttcggttggaaatggagatttagataatgttagagtggataatggtgttcgaacgttgttaggcgttaattaggattcggtaatgattttgttgtgtagattgaagtgcgagtatttggagttattatttaaggtttgtttttgtaattagatgattgtataattttaatatgattaattttgtcggatgtgaattgtgtagttgtaattataaaataaggtggtatttttgtttttttgttgaatataaatattatatatgcgtaagttataattttataacggtcgtttttggtaagaaagagttttgttagttagaagatgtagttgaggggaaaaaatatatatatatgtaatataagtgtttaaagaggcggttataatgttaggtttcgttttgggaaatattgttttgcgggttttgtatttttttttttttttttttgtatatattaattttgaggttaggaagttgggaaatttggagtttatattgagttttttcgggataatatagttttgtattcgtatatgtattacgttgagagttatagggaattagtttgatatttattagtaattgtatattatatttcgtttattaagttttattgtttagtggggacgtgagttacgatttaggttttttagattcgagatttttgtagaaattttagttcgttttttaaggttcggtttgagggattatagggatatagtttttaaatgttttttttattttataggtttagggtgcgtcggaggggatgagacggatgaggggattaatgttgagaatgttaagattttttttttgattttggtttaatttgtagggggtatagaattttgagaaaggaaaaaaaatttagaggttaagagttgttttgttatgggtcgtagtttaattttgggaaaggagagagagagaaagagacggagatggggtgggaagaagggagtaaggagatatatttaagaatagcgtagtgtgatgggatgtttagagatgaaatttagtggttaaataagtgaatgtttaagattaggtgagagcgtgtgtgtgtgtgtgtgtgtgtgtgtgtgtgtgttagagaaaaagaaagagaggaagtgggagaaggagggggagagagagagagagagagtatttattaatagtatttgattaagattgtaattttatggttgtaattaatgataaagttaagtgtcgaaggtttagttttcgaggagatagattttgagatatagatttgaatataagtttatcggggagtgtttttgggtttatatttatagggaaaggtagtaggaatgggtagagggagagata

SEQ ID NO: 1709 - DNA, 2391 bp, Artificial Sequence
  chemically treated genomic DNA (Homo sapiens)
tgtttttttttttgtttatttttgttgtttttttttgtagatgtggatttaagagtatttttcgataaatttgtatttaaatttgtattttagggtttgttttttcgagaattaagttttcgatatttgattttgttattagttgtagttatgaaattatagttttggttagatgttattggtaaatatttttttttttttttttttttttttttttttttattttttttttttttttttttttgatatatatatatatatatatatatatatatatacgtttttatttaattttaggtatttatttatttggttattaggttttatttttggatattttattatattgcgttatttttaaatgtatttttttgtttttttttttttattttattttcgtttttttttttttttttttttttttaagattaagttacgatttataataaaataatttttaatttttaggttttttttttttttttagagttttgtgttttttgtaaattgggttagagttagaagagaaattttgatatttttagtattggtttttttattcgttttatttttttcgacgtattttgagtttgtgaggtggaaagggtatttgagggttgtgtttttgtagttttttaagtcgggttttggggggcgggttaagatttttgtaaggatttcgaatttgaagagtttaagtcgtagtttacgtttttattgaataatgaggtttgatgaacggggtgtgatgtgtaattgttgatgaatattaagttgattttttatgatttttaacgtggtgtatgtgcgagtgtaaagttgtgttgtttcgggagggtttaatatgagttttaagttttttaattttttggttttaaaattgatgtgtataaaggaaaaaaggagaagatgtaaaattcgtaaagtaatattttttaaggcgaagtttgatattatgatcgtttttttaagtatttgtattgtatatatatatattttttttttttaattgtattttttgattgataaagtttttttttgttaaaagcgatcgttataaaattatgatttgcgtatatataatgtttgtgtttaataagaaaatagaaatgttattttattttgtggttatagttgtataatttatattcggtaagattgattatattaaggttatgtaattatttaattgtagagataagttttgagtaataattttaaatgttcgtattttaatttgtatagtagagttattgtcgagttttgattagcgtttgatagcgttcgggtattattatttattttggtattgtttaaatttttatttttagtcgaagtaatttatttattaattgatttatgataaataggtttataagagtaaagttgtttgggttgtagatatatatttaataaaatatgattttttgggttgtttttagttttttgtagtaaagttttttttttttttaggagaaggtagttttttttttttttatttcgtttttttttttttttttattgttaggaggttgtagatgattagatagggaatttgtaaaatttttattaaattaatttttatttggattttagattttggttttaaggtcgtttttttagaaaagtagtttttatttattagtgatatatagtatttttgtgttttttttttgtaatattttatattgtttgtaattatgtttgtaagttttatgggttttatttttaaattatatttagaatttaattattttttattatttttattattagggtttatgttatttacgttttttttttgtattattatattattgttttttttggttttttagtttttttttttgttttttatttattttataatttatttttaattgagttataaagtattttgtaaaaatgttaattagataatagtattttatttaaaattgtaatttttttttgtttcgtttagagtaaaagttaaagtttttttaatggttttataaggttttatatgattttatagtattttttttttggttgtattgtttatttttgtattgtttagttttttttaatttttttatgttattttagttatgttagtttttttgtttttttttgaatacgttagatatatttcggttttagggtttttggatttgttgttttttttttttggagttttttttttttagataatttatatggtttgttttttttttttttatgggttattgttgaaatgttattttagtagatattttttttggttattttatttaaatggtaaattttttttattttagtattttttggtttttttattgtgatttgtttttatagtagatatttttttttaatatattgtatttagttattttgtgtattgtttttttg

SEQ ID NO: 1710 - DNA, 2470 bp, Artificial Sequence
  chemically treated genomic DNA (Homo sapiens)
aaattcggtgagttttttgattttattatttttatttttattatgttgttatttttatttttagaaattattataatttgtatattttatttagttagttgtgtattttataggttttgttgttgttgttttgtattgttttatattttttttttgtttttttttttttagaatgaatattttatgaggttaggaattgtttgttttttttatttttgtagttttagtattagtatagtatttgataataaaatttagtagataaaagtaaagagtttgggttaggttttttgggtttgaattttagagttggtgttatttaattgtagagagataatttggataatatagtgttttagtttttttttttgtaaatggggttaataatagtagcgattttatggttgggcgtagtggtttatatttgtaattttagtattttgggaggtcgagataggtggattatttgagttttagattagttggttaatatggtgaaattttatttttattaaaaatataaaaattagttaggtgtggtggtaagcgtatgtaattttagttattcgggaggttgaggtaggagaagtagtagaatttgtaaggcggaggttgtagtgagttaaaataacgttattgtatttcggtttgggtaataaaagtgaaattttgttttaaaaaaaaaaaagtagtaattttattaggaggattaaatggtattatgggtaaagtatttaagaatagtgttggaatataggaagtgttatataagggtttgttttatacgtagatataggtagatgtagttagagataaaatggtaggtgtttaagaaatatttgttaaattaatatgttaagtttaggaacgggataaagttttaattggggtagagttttagatagggataatgatatttttaagggtaagttttttgatttgaatagagaaaaatttggaaagtttggaagttagaggtagttgggaagggtagttgtaagtaaaggtttggtggggtggggtaggggttataagagattttttatggaatttttatttggaatagttagatcgagtattaatatatattgaatagttaaattatatattattgatttgttaaacgtatttgtatataaataagtatgattatttatggaggttcgagtagtggtatttttttttagtgttatgattatagatggatggttttagttagatacgaattagggacgttgttatttttgtcgtaaagttagcggttgatttaaaattatatttattggagtatgtaagtgtgatagtttagtggtgagtttgggataattagtttaaaagataagataaacgatttttaaaattggtattgtgacgaagattttattttattttttcgttatagttagtttagttttgatgttaaaaatatagtcgaagataattaattaggaaatgttaataggtaggattatgttttaattgtattttttagaggattttagaattttatatttaagttgattgtgtttttttttttttggtgattaggtaggagaggcggatttttagttagaagtagaggttgggtggggtgggtagataggtttagataaggtttttaaggttaggtaagtaggtggttttagttagtttttttcgagtttgaatcgagatggatttgttgggtgaagtacgttgattcgggtaaattatatttgttatgttaatttattttacgtgggagattagttatgagtttagaggttggtatcggttgtttttgatggattaagggatttagttgtttagatataatgttagagatttgttattgcgggggaaatacggtttgttaatgttttattttaattgttttaaattatatttgaagatgtatagtttaggaggttagttagtaaatattaaacgttattttgaggatttgtttggtttagagaggaatttgtagttttaggattggggttttatcgttttgttgatatagaagagagagttattgttttttggttttattatttgtttttttgtttttaaggaaggggtagagaatgttttgagatttttgacgtattttatttataggtttgagggttttttttttgagagttaagtttaatggatttagatagaaagaggggggtgggtttttggagtttgtttgaggtaattaaagaagaatttaaaaggaaggtagtatagtagaggaagttatggtagaagatgttttcgttttaatttttaaaatcgtatatgataaaggggattttgtagatatgattaaagatattgagatggggggagtgagtgagagtgattgtaatgttattgtaaggtttttagaagagggttagggagagagatgaaaatgttattagttagttggtattgaagatggtattgaaggtgtaggtgggttttagaagttggaaaaggtaagaaaataaagggt

SEQ ID NO: 1711 - DNA, 2470 bp, Artificial Sequence
  chemically treated genomic DNA (Homo sapiens)
attttttgtttttttgttttttttagtttttggagtttatttgtatttttagtgttatttttaatgttagttgattaatagtatttttatttttttttttggtttttttttaaggattttgtaatgatattgtaattatttttatttattttttttattttaatatttttaattatatttatagagttttttttgttatgtacggttttggggattaggacgaggatattttttgttatggttttttttgttgtgttgttttttttttagatttttttttgattgttttaaataaattttaaaggtttatttttttttttttgtttaggtttattagatttaatttttagagaaggaatttttaaatttatggataggatgcgttagaggttttagggtattttttattttttttttgggagtagggaggtaggtggtgaaattaaaaggtagtggtttttttttttgtattagtaaagcggtgaggttttagttttaggattgtagatttttttttaggttaagtagatttttaaggtaacgtttgatatttgttggttggttttttgggttgtgtatttttaagtgtaatttaggataattaaaataaagtattagtaagtcgtgtttttttcgtaatgataagtttttagtattgtgtttgagtagttgggttttttgatttattagaggtagtcgatgttagtttttgagtttatggttgattttttacgtggaatgaattaatatggtagatataatttattcgggttaacgtgttttatttagtagatttatttcggtttaggttcggggaaggttgattggagttatttgtttgtttggttttagagattttgtttgggtttgtttgtttattttatttagtttttgtttttagttaagaattcgttttttttgtttaattattagggggaggggaatataattaatttgggtgtaaaattttaaagttttttggaaaatgtaattggaatataattttgtttgttaatattttttagttaattattttcggttgtatttttggtattagggttgagttggttgtggcgggggggtagggtgggattttcgttataatattagttttaggagtcgtttattttgttttttagattaattattttaaatttattattaggttgttatatttatatgttttaataaatgtagttttaaattagtcgttgattttgcggtaggggtagtagcgtttttggttcgtgtttaattagggttatttatttgtaattatggtattgaggggaggtgttattgttcgggtttttatgaatgattatgtttatttatatgtaaatacgtttgataaattaataatgtatgatttagttgtttagtgtgtgttagtattcggtttggttattttaggtgggggttttatggagggttttttgtggtttttgttttattttattaggtttttgtttatagttgttttttttagttgtttttggtttttaagttttttaagtttttttttgtttagattaaggaatttatttttgggagtgttattgtttttatttgaggttttgttttagttaggattttgtttcgtttttagatttagtatattaatttggtaaatattttttgaatatttattattttatttttagttatatttatttatatttacgtataaaataaatttttatatagtattttttatgttttagtattgtttttgagtgttttatttatagtattatttaatttttttaatgagattgttatttttttttttttgagatagaattttatttttgttgtttaagtcggagtgtaatggcgttattttggtttattgtaattttcgttttgtaggttttattgttttttttgttttagtttttcgagtaattgggattatatgcgtttgttattatatttggttaatttttgtatttttagtagagatggggttttattatgttggttagttggtttggaatttaagtgatttatttgtttcggttttttaaagtgttgggattataggtgtgagttattgcgtttagttatgggatcgttattattattggttttatttatagaggggaaaattgagatattgtgttgtttaaattgtttttttatagttagatagtattagttttgggatttagatttaggaagtttggtttagattttttgtttttatttgttgggttttattgttaagtgttgtgttggtgttggagttatagaagtaaagaaggtaggtagtttttgattttatagagtgtttattttgggggaaaaagagtaagaagaaaatataaagtaatataaaataataataataaaatttataaagtatataattagttaaataaaatatataagttgtaataatttttaggaatgaaaatgatagtatgatgggaatgagaatggtggagttagaaaatttatcgggttt

SEQ ID NO: 1712 - DNA, 2493 bp, Artificial Sequence
  chemically treated genomic DNA (Homo sapiens)
agtttcgttttgttttttaggttggagtgcggtggtgtgattttggtttaatgtaattttcgtatttcgggtttaagtaatttttttgttttagttttttgagtagttgggattataggtacgtattattaggtttggtttttttttttttttttttttttttttttagtagagacggggtgttattatgttggtcgggttggtttcgaatttttgatttcgtgattcgttcgtttcggttttttaaagtgttgtgattataagtgtaagtttgatgtttttaagaaatagtaaagagatttgtttggtaaggttcgaagtgaggatggttgttcggaagagggttagtttggtaggttatagtaaggtttttagagtttattttaagataaaaagttattggagggttttaagtagaggattaatatgatttgaattttttaaaggattgtaaagagaaatataagtttttatttataaaataaagatgtattttttataatttagttataagttaaagaaaaaaagtatagaataaaagttgtgtagtatgatagtatttttgtaagaaaaaatacgtatatatgggaataaggttaaaaggtttaatattaaattgtgatttattatggtttgtgggattatggggttttttttgttttgttttgtttgtaatgtttttttttgttttttaagttttttgttttaaatatgaattattttggtaatttttaatgttatttttaaaaagaaaaaagtattttattatgagattttttttgtttgaaattttattttaatatgaaaaaaaaaaaaataaatttaaaattaaaaattaaaataatatggggaatatttttttttaaaaattattatattttttatgtaatgtttgtttgttatgaattattgtataaattaagtttcgtttaatgtattaaggttataaaattaatttggttaatatgttgattattatatagtggttttgttttttatagtaattttgatattatttttttaaggtagtaatagaagggttttttttatttattttttatgtgtttttgatattattttgcgtttttggatttttttattgtatgttttttagaaataaattaagttcgaataagttgttttagttaatgaagtgcgtttttggtttttttttcgtggtttagaattattcggtaaaatattaattgttttaggatgtatttttttttagttttgaaatattgtaatattaagttattataaataaagagtattgagataataatatataagaacgtgtataaatggaaattattgtaatttttttttaaattaaggacgtgtggacgttttatgaataaatatttaggatatttggataaatatatattatgtgtttatatagataaaaatagaaaggagtatttttttttattttatttttttattttaagttatataagtttttcgtagggtataagtttagggtaattattgtttagaaatgtaaattatgtaatttaaaatgatttaagtttttaaatattttttatttaagttttatattttatttattttttaattatttttaataggtttttttgaatgaaaattttaaattgggaaggtttaataagttttaaattttatttatacgttatttagggaattcgaggatttggggtttacgtgtagtgttttcgcgtgggtagataagggttttaagatttagggtgttattgtatttcgagtggttcgagttttggttttgtcgtttttattggtcgagttgacgttttttatatcgggggtatgggttgttatattttagtagagtgtaagggttttcgggcgtggacgtaggcggttttcgggtgtatacgcggaacgtatattcgggtatgtatttttatacggttaggcgggtttgcgcgaacgttttcgttttttttttattatttttttttgcgttttttacgatggtggtacgcggggttattttgatttttaggatttttggacgttcgtttttggagttcggggggtgatgatagatggcggagggcggggtttcggggggaaggggcggagttttttagtatgggggtgttggcggttgatagaaagattaggggtagtcggcgggagggggttgattgagattgcgggtcggtcgcgggttaggcgtggcgggaaggagttcgcgtagatatagggtttgataggtagagagagatatagatatcggggattgatagtcgcgggggtacgcggggtcggttggtcgtggcgggcgtttatttggtagcggcggcggtggcggcgttcgcgatcgggtcgtttttttcgcgttgcgggttttttttttcgcggtcgggcgggcggtcggcgtaggtttcgtagaggcggcggcggcggcgacgtcggagtcgcggattgttgagcggcggggacgtagttgtattaatcgatttcgggtcgttcggttgggtt

SEQ ID NO: 1713 - DNA, 2493 bp, Artificial Sequence
  chemically treated genomic DNA (Homo sapiens)
agtttagtcgagcggttcggagtcggttggtgtagttgcgttttcgtcgtttagtagttcgcggtttcggcgtcgtcgtcgtcgtcgtttttgcggggtttgcgtcggtcgttcgttcggtcgcggggagggaggttcgtagcgcgggaagagcggttcggtcgcgggcgtcgttatcgtcgtcgttgttaggtgagcgttcgttacggttagtcggtttcgcgtgttttcgcggttgttagttttcggtgtttgtatttttttttgtttgttagattttgtgtttgcgcgagttttttttcgttacgtttggttcgcggtcggttcgtagttttagttagttttttttcgtcggttgtttttggtttttttgttagtcgttagtatttttatgttgagaggtttcgtttttttttttcggagtttcgtttttcgttatttgttattatttttcgggttttaggagcgggcgtttaggggttttaggggttagggtagtttcgcgtgttattatcgtagaaggcgtaaaagggggtggtagaggggaagcgggggcgttcgcgtaggttcgtttgatcgtgtgagagtgtatgttcgagtgtgcgtttcgcgtgtgtattcgagagtcgtttgcgtttacgttcgagggtttttgtattttgttgggatgtggtagtttatgttttcggtgtaaagagcgttagttcgattagtgaaggcggtagagttaggattcgaattattcggggtatagtagtattttgaattttgggatttttgtttgtttacgcgaaaatattatacgtgggttttaggttttcggattttttgagtggcgtgtgagtggagtttggagtttgttaagtttttttagtttgggatttttatttagggaagtttgttggaagtgattgaggagtggatgggatgtaggatttaggtggggagtgtttgagggtttgagttattttgagttgtatggtttatatttttgagtagtgattgttttgggtttgtgttttgcgagaaatttatgtgatttggggtgggggagtgaggtaggaaggaatgtttttttttgtttttatttatgtgaatatatagtatatatttatttagatattttaaatgtttatttatgaggcgtttatacgtttttaatttaaaaaaggattatagtagtttttatttatatacgtttttgtgtgttgttattttaatgttttttatttgtggtaatttagtattgtaatattttaaaattaagagaaaatgtattttaaaataattggtattttgtcggataattttgaattacggagaaggagttaaaagcgtattttattagttggaataatttattcgagtttaatttgtttttaagagatatatagtggaaaaatttagaagcgtaaaatagtattaaagatatatagaaaatgaatgaaaagggtttttttgttgttgttttggaaagatggtattaaagttgttgtagaggatagagttattatgtaatgattaatatattaattaagttggttttgtgattttgatatattgagcggggtttgatttgtgtagtggtttatgataggtaaatattgtatgggaagtgtggtaatttttggaaaaaaatgttttttatgttgttttggtttttggttttgagtttgttttttttttttttatattgaagtaagattttagataagggaagttttatggtggagtgtttttttttttttaaagataatattaaaaattattaaagtaatttatgtttaaggtagaaaatttgaaaaataaagaaaagtattgtaaataaaataaaataaaaaaaattttataattttataaattatagtaaattataatttggtattaagttttttagttttgtttttatgtatacgtgtttttttttataaaaatgttattatattatataatttttattttatgttttttttttttgatttataattagattatgagagatatatttttgttttatgagtaggaatttgtgtttttttttgtaattttttaaaaaatttagattatgttagttttttgtttagagttttttaatagttttttgttttaaagtaaattttgaaggttttgttgtggtttgttaggttaattttttttcgaataattatttttatttcgagttttgttagatagatttttttgttgttttttaaaaatattaagtttatatttgtaattatagtattttgggaggtcgaggcgggcggattacgaggttaggagttcgagattagttcggttagtatggtgatatttcgtttttattaaaaaaaaaaaaaaaaaaaaaaaaaaaagttaggtttggtggtgcgtgtttgtaattttagttatttaggaggttgaggtaggagaattgtttgaattcgggatgcggaggttgtattgagttaagattatattatcgtattttagtttgggagatagagcgagatt

SEQ ID NO: 1714 - DNA, 2385 bp, Artificial Sequence
  chemically treated genomic DNA (Homo sapiens)
ataggtttttattattatgttcggttaatttttgaatttttttagtagagacggggttttgttatgttggttaggttggttttaaatttttggttttaagtgatttatttgtttcggttttttaaagtgttgggattataggtttgagttattgcgtttagtttttttttttttttttttttttttttttttttttttttttttttttttttttaagatagggttttgttgtgttgtttagattggggggtagtgttgtgattttagtttattgtaatttttattttttgggtttaagcgatttttttattttagttttaagaataattgggattataggcgtgtgttattatatttagtttatttttgtattgttttataagagttgggttttattatgttgtagaggttggttttgaatttttggatttaagcgatcggtttgttttagttttttaaagtgttgggattataggtatgagttattgtgtttggttttattgtataatttttttaatttttttgtatgtttgaaattttttattataaagtgttggggggggggataaaatttttatttgaaaatattagttagatattttttataaaatttttttttattgttagattaaggttgttacgagattatgttaagttaattgtttttgtgttttttattaatatgtttaggaagaaagagtagggagataatttcgaaagaggttttgagggtgttagggagttttagggattagttaaggcgtttgggttttgtgtttgaggaaattgaggtttaggttgttttgcgttgttgtttagaatttagggaagtttaggatgtttttttttaagttatgttggggtgtttaggtttagtggagaagcggggtatggttatatgaatgatatgtagttggtagtatatagtaggtatataagtgtttgttgaatgaatatttatatgaaattggaaaggagttttttaaagatggagttagtaggagatagtgaagttgtttgtgcgggtcgggggagtttgtttttgtttttgttttagtttatttttggtttggtttgagtattttgagaagtgggtttaggagaggtttttggatttttgggtttttggatagttagggtgagggcgttttgttatatttttaggagagagtatatttaaaataatttttttttttaaaaatttagtgttaacggattttagatgttcgtttgttatataatggggtttgttttaatagcgttaatttttagatgtgtagtttggaattaagaagtttattggttttttgaggatattgtgagttaagttgagagttgttcgggggagagatatggacgtgtagaattagggatgggagaggagttagggtgtttttttgttgtttattgggttgtttatttgttttgtagttgtttttagattgaaagataggaagggtgttttcgttttttttttttttagttttgattttgagtaggggtttttaggggataattatagataggtagtttggggagggtttgttttggaatttggtttaagtaggtttagttggatgagtttggagaagtttttggtttttttgtttttgaatggaaaatagaataacgttattttatttagagaggttattgtgtaaaatgaaatgaagtaagtagtatagtacggggtttagaaagttttgattttttttgagtggagagaataggggtttaagttatcgagtatttttttttattttttttagtaatacggatgtttttgggtagtacgggttgtattttttttggaatattggaaaagagttaaggtggggagtttattattttttttagtggtttgttttatggttttgtagttttaacggatagaatattttttcgtttattgagttaaaggcggtttttgtgtgatttttaattggtttgagttttgttttttggagttttgttgagtaggttatatttttttttatttgatattttcgagtatgggaagatagagatcgagttttttaattttttttttagtaggtagttgtagttatgatattagatggacgaagattaagatgttttaaggagagatgtttaaaattttaaataagaaaagttttaacgtttgggggaatgattttgtggttttttttgtgtagatgttaataaaatttgtatgtttttattttaatttaaagagaaaagggttaggtttacgtttgtaatttttataatgggaggtcgaggaggattatttgagtttaggagtttgagattagtttgagtaatatagagagatttgtttttattaaaaataaaaaaattaattaggggtggtggtatgtgtttgtggttttagttaattgg

SEQ ID NO: 1715 - DNA, 2385 bp, Artificial Sequence
  chemically treated genomic DNA (Homo sapiens)
ttaattagttgggattatagatatatgttattatttttggttaatttttttatttttagtagagataggtttttttatgttgtttaggttgattttaaatttttgggtttaagtgatttttttcggttttttattgtggggattataggcgtgagtttggtttttttttttttgaattggagtgaaggtatatagattttattaatatttatatagggagaattatagaattatttttttagacgttgagattttttttgtttgggattttgaatatttttttttagagtattttaattttcgtttatttgatgttataattgtagttgtttattaggaaaagggttgggagattcggtttttgtttttttatattcgagggtattaggtgaaagagggtgtggtttgtttagtagagttttagagagtagaatttagattagttgggggttatatagaggtcgtttttggtttagtgaacggaagaatgttttattcgttggagttgtagggttatggaataagttattgggggaggtggtgagttttttattttggtttttttttagtgttttagggaaaatgtagttcgtgttgtttaggggtattcgtgttgttgagaggagtaggggaggatgttcggtgatttgggtttttgttttttttatttagggaaagttaaggttttttgagtttcgtgttgtgttgtttattttattttattttgtataatgatttttttgggtagaatggcgttattttattttttatttaaagatagggaggttaaggatttttttaggtttatttagttaggtttgtttgaattagattttaaagtagattttttttaagttgtttgtttatgattgttttttgggagtttttgtttagagttaggattgaaaaaaaaggaagcgggaatattttttttgttttttagtttggggatagttgtagggtaggtgagtagtttagtgggtagtaagaaggtattttggttttttttttatttttggttttgtacgtttatgtttttttttcgggtagtttttagtttggtttatagtgtttttagggggttaatgggttttttgattttaggttgtatatttggaagttgacgttattaaaataaattttattatataataaacggatatttggaattcgttagtattgagtttttagaaaaagaaattgttttggatgtgtttttttttaagaatgtggtaaagcgtttttattttggttgtttaggaatttagggatttaggggttttttttgggtttattttttaaggtatttaggttaggttagaggtgggttggggtagagatagagatagattttttcggttcgtataggtaattttattgttttttgttggttttatttttggaaggtttttttttaattttatgtaaatatttatttagtaaatatttgtgtgtttattatgtgttgttaattgtatattatttatatggttatgtttcgtttttttattgagtttaagtattttaatatggtttaagaaaaaatattttggatttttttggattttaaatagtaacgtaaaatagtttgagttttagtttttttaaatatagagtttaaacgttttagttagtttttagaattttttagtatttttaaggtttttttcggaattgtttttttattttttttttttgggtatattggtgggggatataaggataattgatttggtatagtttcgtggtaattttgatttagtaatgaagaaagattttatgagaaatgtttagttaatatttttaaatggaaattttatttttttttttaatattttatgatgaaaaattttaaatatatagaaaagttgaaagaattatataatgaggttaggtatagtggtttatgtttgtaattttagtattttgggaggttgaggtaggtcgatcgtttgagtttaggagtttaagattagtttttgtaatatggtgagatttaatttttataaaataatataaaaatgagttgggtgtggtggtatacgtttatagttttagttatttttgaggttgaggtgggaggatcgtttgagtttaggagatggaggttgtagtgagttgagattataatattattttttagtttgggtaatatagtaagattttgttttaaaaaaaaaaaaagagaaaagaaaaagaaaaagaaagaaaagaaaagaaagggttgggcgtagtggtttaagtttgtaattttaatattttgggaggtcgaggtaggtggattatttgaggttaggagtttgagattagtttggttagtatggtaaaatttcgtttttattaaaaaaatttaaaaattagtcgggtatggtggtgggaatttgt

SEQ ID NO: 1716 - DNA, 2440 bp, Artificial Sequence
  chemically treated genomic DNA (Homo sapiens)
ttcgcggtcggggtttgttcggattttcgtttttgcgcgcggttcgtagcggcgtatttttaaggacggtcgttcggttcgagcgaaagcgggagcgggagtagtagtttggcgtggtagaggtcgtttttttttttaggtcgtaggtcgtcgtttgtttttcgttaggtcgttcgttcgtcggtttcgttcggattttagttcggtcgggtttggacgtcgtcgtagttttttatttcggttttatttataggggtattttaattcggtcggcggggcggggtcggggattcgcggataaggtcggttcgtcgaggttagggaggaaaataaaaagttaagagaagaatttatttaaaatggtttttgtagtagttaaaatataaatagttattatttggtgaagtttagtttagatattttgtaaggatattttaatttatttcgggttcgttttttttgtcgcgttattgggtttcgtcggtttaaaatatagatttattggttatttcggttgtcgtttagatagaagtttattttaagtttgtttgtaggggcgagtgatgggttcgttttattgtgttcgtatttgtatggatgtgatcgcggttttgattggtcggcgttgagatcgtttcgttttttgtttcgtgtttttcgttttggagacgtcgttgcgttcggtttcgttttttcgggattagcggtagggttacgggggcggggcggggtcggggtttcgcgggtcgagggggcggggcggggttttgtacgttgtagatcgtaggtagggggcggggatttggcgcgttcgggcgtcggcgggggtttagcgtttaggtggaggttttttaggtagttggttagtgatttggaagattcggggttggcgttttcgggggtgggggaggatgtggttggggtttcgcgatataggggtttcgtaggggtcgaggttacgcgggtagatgtaaggagaagcgagggattcgtaggttaggaaaagaagattttgagtggttaagcgaacggagtagtttttattcgcgttttttgtcgtttagttcggttttttggtatttttggtttttaacgggtttttttttaaggtttagcgtattcgggagttttttagtttcggggattttgtagcgttttggatagattttcgtgaaattaggtgtcgagttatggtgtatttattttcgggtttgtcgtttttattatttttgtagtatttttaaggatagggtttagtgtttggtagagatttaattaattgttatattttcgaatttattcgttagtaggtaatttttgagtgtttattaaattttagatattgatataaaacgggatattgcggttaataagataaagtttttgtttttatggaataggcgaaagattaaatataaggggtaggtagtgataaatgttgtaaagaaaatagatggaagaagaagggaaattagattagggtttaggaattaggaaatttttaaattatgaaaggaggtatggagagtttgttttgtttggttgaatattttgtatggcgttttattattgtttttttttattttaattttggtagttattagtttttttcgcgttttgtttgtttatcgtgttttttaagtatttattaaaaaattgattggattttgattgtagaggtttattttattttaaagtagaaatgatttgagtttgatgattttaagagtagtttgtgggatatatttaggataagtatattttgattgtgttaggggttatgataatgatttagtagaggtttattaattttagagagagaatatttttagtttttttgaaattttagttttttgatggtttttagtttgtggttttaatttttttttgagtaatattttttattttttggtagatataagagatttttttagtttgaaaatagaggtagtagttttttgttgtttattttttttatttgtgtgtatttttgttatttgatttaaggttggttaagatgttttatggttttttttttttgttttttttttttttttaaatagatatttattaggtattaattatgttttaggtattgttttagatataaggaatgtagtattaaataagataaataatatttttgtttttaaggagtttataatttagttgagggtgagatagagagttacgtatagattttgaggatttttaattttgttaagttgttggtgagtgagtatattgagggttattcgtttgttgttgttttttggggatagtatgtttgattttttgaattagttgttttaggagttgaagttgaagttgaggtaggattaggtagttggtagttataatttttttagtttaaatattagaattataggttttaaagtttttaatagtgtttatgggagttttggtttttatgttttga

SEQ ID NO: 1717 - DNA, 2440 bp, Artificial Sequence
  chemically treated genomic DNA (Homo sapiens)
ttaagatatgagagttaagatttttatgggtattgttgagagttttggaatttgtgattttggtgtttgagttggagaggttgtggttattagttgtttggttttattttagttttagttttagtttttgaagtagttggtttagaaggttaagtatgttgtttttaagaggtagtagtaggcgagtagtttttagtatatttatttattagtagtttggtaaaattggagatttttaggatttatgcgtaattttttattttatttttaattggattgtaagttttttgagggtaaagatattatttgttttgtttaatgttgtattttttgtgtttagaataatatttggaatatagttggtgtttaataaatatttgtttaagggaggaagaaagataagaaagaaagattataagatattttggttagttttgagttaaatgatagaaatgtatatagatgagagagataggtagtagggggttgttgtttttgtttttaagttggagaaattttttgtgtttgttaagaagtgaagagtgttatttagaagagagttagggttataggttgaaagttattagaaaattgggattttaaagaagttaaaaatattttttttttggagttagtaagtttttgttaaattattattatggtttttgatatagttaaaatgtgtttattttaaatgtattttataaattgtttttagaattattagatttagattatttttgttttgaggtagaatgagtttttatagttagaatttaattagttttttagtgggtgtttagaaaatacgatgggtaagtagggcgcgaggagggttggtgattgttaaggttagggtgggagggggtagtaatgagacgttatatagagtatttagttaggtagggtaaattttttatatttttttttataatttaggaattttttaatttttaaattttggtttaattttttttttttttttatttattttttttatagtatttattattatttattttttgtatttagtttttcgtttattttatgaaagtaagggttttgttttgttgatcgtaatatttcgttttatattaatgtttggaatttagtgggtatttaaagattatttgttaacgaatgaattcgagagtgtaataattagttgaatttttgttaaatattgggttttgtttttgaggatgttataaggatggtaggggcgataggttcgaaaataaatgtattatagttcgatatttgattttacggagatttatttaaggcgttgtagggttttcggggttggaaaattttcgggtgcgttgggttttgggaagaagttcgttgggagttaggagtattagggagtcgggttgagcggtagaagacgcgggtggaggttgtttcgttcgtttggttatttaggattttttttttttgatttgcgggtttttcgtttttttttgtatttgttcgcgtggtttcggtttttgcggaatttttgtgtcgcgggattttagttatatttttttttattttcggagacgttagtttcgggttttttagattattagttagttatttgagagatttttatttgggcgttgaattttcgtcggcgttcgagcgcgttaggttttcgttttttgtttgcgatttgtagcgtgtaggatttcgtttcgttttttcggttcgcgggatttcggtttcgtttcgttttcgtggttttgtcgttagtttcgggggggcggggtcgagcgtagcggcgtttttaaggcggggggtacgaggtagggggcggggcggttttagcgtcggttaattaaggtcgcgattatatttatgtaaatacgagtataatggagcgagtttattattcgtttttgtaagtaagtttgaaatgggtttttgtttgagcggtagtcgggatgattaatgggtttgtgttttggatcggcgaagtttaatggcgcgatagggaaggcgggttcgagatgggttagggtgtttttgtagggtgtttgagttaaattttattaaataatagttgtttgtattttggttgttgtaggagttattttaggtaagttttttttttaattttttatttttttttttggtttcggcggatcggttttgttcgcgggttttcggtttcgtttcgtcggtcgggttagggtgtttttatgaatggagtcgggatgaggggttgcggcggcgtttaggttcggtcgggttggggttcgagcggggtcggcgggcgggcggtttggcggagggtaggcggcggtttgcggtttggggagaggggcggtttttgttacgttaggttattgttttcgttttcgttttcgttcgggtcgggcggtcgtttttgggagtgcgtcgttgcgggtcgcgcgtaggggcgggggttcgggtagatttcggtcgcggg

SEQ ID NO: 1718 - DNA, 2422 bp, Artificial Sequence
  chemically treated genomic DNA (Homo sapiens)
agatggaagttggttggtatgttttgaaatggtgaggttttaggagatatgggtgggatttttttaagaattgttataaatttttgttttgaaattagattatttggatttaaattttcgatgtttttttttatttgttatgtgattttgggtaagttatttaagttttttagttttagttgttgaatagaaaatatgatagtttagattttattaggtggttgtgaagattaaaagagataaggtatgtaagatatttatagggtatttggtataaggtaaatatttaatagattttagttgttatttgtaattagtttatttattgtattgaaattgattgggggaatatttagatttagacgatgttatggggaaaaatagataagaaataataatttaaggttttatttaagagttatgtgatgtagagtgtgattagtggatagtattgtatatttggataaatatgaatatataaatttttgagttgtttttcggatattagtttgtttataggaggattttttgcgtagttgatgaagtttatgtagttggaattaaaagtttttgtatttatgggttgaattggtagtagtaaattgattagggaattagagtatgatatttaagatagtgggaattagttgagatgtaggttataattatgataatagtaggtaatatttattgagaattttttgtgttaagttatgtgtaaaatatattattagattatgatatttttttattataatagtttaaggtggtgtttttgttatgatagtttgtttattttttttttagagtgtatgttaaaataattttttattgtaattagtggattttttagtagttttttttttttttttatttttttttggagttcggttttttataataagtttttaggtgtatttggagttgttatttgtaaatgtggtaggatttttttttattagatttttgtttttgtttttttttttgaagagtaaatatgttgtattagaaggaattagtggtttattgttattggtaaagtcgaggtagtgggaggattattttttttttgggtttagtaatttttttagtggttagtagatagtagtataatggttagttagtgtgaaattgtgtaaattgttttataaataattcgtaatgtataggtaatagggagaggttatagtttatggataaatgattttttgttatttcggggtattaaattagggataattcggattttattatggggatttattaattattatgggtttttcgtacgtaagtttgttgggatttaggtttgtttggtgttttttgtggtattatgatgggggtaaaatatttttaagtagggttatgagaaagagaatgtaagtatttttaataaattagttaggggtgaattttgtaggagttaagtattttttttgtggaatttgttttttgaagaaatttttttgaagcgtagagaaaaatataataattttaataattaatatgtattgggtatttattttgtgttaggtattgtgttaagtttttttttttttttttttttttttgagatggagtttcgttttgtcgtttaggttggagtgtagtggtacgattttggtttattgtaagttttattagtcgggtagttgggattataggcgtttgttattatattcggttaattattgtatttttagtagagatggggttttgttatgttggttaggttggatttgaatttttaattttaggtgatttgtttattttggttttttaaagtgttgggattataggcgtgagttatcgtatttttgtgttaaattttgtgtaatttttataaatattttattgagtggatattattattattagttttatttttatagaggatgaagtgatagtttatagaggtttagttatttattttaggtaatatagttaatatgtggtgaatgtattagttagtttttgttaggttgtggtaataaatagtttattagttttagtggtttaaaattataagagtgttttgtttttattttatgttatttatggattagttgtttttttttatttgattttattataggatttaggttgaaatagtagtttttatttgggatatattatttttatggtagaagaagataagagtaagaaaattggtggaattggttatggttgtgaaagtttttgtttagaatgggtatatattatttttgtttatattttattgattaaaggtggttatatggttaagtttttttttaatggggtgaggaagtttattttttatattgggaggtattgtaatgaatgataattggggagagatatttaagttttttagaggaaaggtagagattagagaatagtaatataatttatgtagttgagtgagattagatttttgtgg

SEQ ID NO: 1719 - DNA, 2422 bp, Artificial Sequence
  chemically treated genomic DNA (Homo sapiens)
ttataaagatttgattttatttagttgtatagattatattattattttttgatttttgttttttttttaagagatttagatatttttttttaattgttatttattgtagtattttttagtgtgaggagtaaatttttttattttattgaaagaaggtttggttatatgattatttttgattaatgaaatgtgagtagaggtgatatatgtttattttgagtagaagtttttatagttatggttagttttattagtttttttgtttttgtttttttttgttatgagaatagtatgttttagatagaggttattattttagtttggattttgtaataaagttaggtaaaggagagtagttgatttatgagtggtataaaataggagtaaaatatttttgtgattttaaattattgagattggtggattatttgttattataatttaataaaagttgattaatgtatttattatatattggttatattgtttaaaataaataattaaatttttgtgagttattattttattttttatgaaaataggattaataataatagtatttatttaatggaatgtttgtgggagttatataagatttagtataggggtgcggtggtttacgtttgtaattttagtattttgggaggttaaggtgggtagattatttgaggttaggagtttaagtttagtttggttaatatggtaaaattttatttttattaaaaatataataattagtcgggtgtggtggtaggcgtttgtagttttagttattcggttggtggagtttatagtaagttaagatcgtattattgtattttagtttgggcgatagagcgagattttattttaaaaaaaaaaaaaaaaaaaaaaagatttagtatagtgtttggtatagagtaaatgtttaatatatgttaattgttaaggttattatgtttttttttgcgttttaaagagatttttttagaaagtaagttttatagagaaaatatttggtttttatagggtttatttttggttggtttgttaaaggtatttatatttttttttttatggttttgtttggaagtgttttgtttttattatgatgttataagaagtattaagtaggtttgagttttagtaggtttgcgtgcgggaaatttatagtagttaatgaatttttatggtgaggttcggattatttttggtttaatatttcgaaatggtagggagttatttatttatgagttatggtttttttttgttgtttgtgtattacgagttatttatgaggtaatttgtatagttttatattggttggttattatgttgttgtttgttaattattaggagggttgttgaatttagagaaaaaatggtttttttattgtttcggttttgttagtgataatgagttattgattttttttagtgtagtatgtttgttttttagggaagagaatagggataaaagtttgatgaagagaaattttgttatatttataggtagtaattttaaatgtatttgggggtttgttatgaaaggtcggattttagaaaaaaataaaaaaaaaagagagattattgggaaatttattggttgtagtgagaggttattttaatatgtattttgaaaggagagtaggtaggttgttatgatagggatattattttggattattgtgatgagaaaatgttataatttggtgatgtgttttgtatatggtttgatatagaaaatttttagtaaatgttatttgttgttattatgattatgatttgtattttagttggtttttattattttgggtgttatgttttaattttttggttagtttgttattattagtttagtttatgggtatagaagtttttgattttagttatatgggttttattaattgcgtagaggatttttttataaataagttaatattcgaaagataatttaaaagtttatatatttatatttgtttaaatatataatgttgtttattggttatattttatattatatagtttttggataaaattttgggttgttgttttttgtttatttttttttataatatcgtttaggtttgaatgtttttttagttagttttagtataataaatagattagttataaataatagttaaagtttgttgagtgtttgttttgtgttaggtattttgtaagtgttttgtatgttttattttttttaatttttatagttatttggtaaagtttggattattatattttttatttaatagttaagattaaagggtttaagtgatttgtttaaggttatataataaataggaaggaatatcggaggtttgaatttaggtagtttgattttagagtaggagtttgtagtagtttttgaaggggttttatttatgttttttggagttttattattttagggtatgttaattaatttttattt

SEQ ID NO: 1720 - DNA, 2186 bp, Artificial Sequence
  chemically treated genomic DNA (Homo sapiens)
gtgtgaaaatgtttttttaattatatcgaacgggaggattttcgattatttgtattttatttgaaaatttagtattcggttgggatgtttgggtgggtggaggattttgtcgtgttgggatgaaatagtagggatacgtttaaaatataagaattatgcgcggtggtttacgtttgtaattttagtattttgggaggttgaggtaggcggattataaggttaggagttcgagattagttttgttaaaacggtgaaatttcgtttttataaaaaaaattaaaataaaataaaaaataaataaaaaaaattattaaaaaaataattagtcgggcgtggtggcgggcgtttgtagttttagttattcgggaggttgaggtaggagaatcgttcgaattcgggaggcgaaggttgtagtgagtcgaaatcgagttattgtattttagtttgggcgacggagcgagatttcgttttaaaataaaataaaataattttacgttaagatcgttttgaaatataggtagaaaaattaggtaaaaaatgttaaacggttaattattttggtttagttatatatttattcgaaagttcgttttttttatttttagttttagcgttaagaatgtaaaatagggcgtttagaagtttaagcgataaagatttttttatcgagagttaagggataaaatttattatagataagtttagtttttttatttttttcggacgttttttttcgattgttaaagaagtagtcgtttttcgggtagttgttaggaaattagttcggtttcgcggcgttgtttttattttgtagggtgtaagaggcgtattttttgcgtttttttcgcggttaaatcggggtgcgggaattttttttagagaagttgcgagttggggaaatttcgttatcgatttatcgtggcgtcgggaaaggggatgcggggttcggaagggttagatttcgtaattttgggatcgatatttttttttttttttattttttttagttttggattgggttaatgaaagttcgaaaaagaaaaaaaaaaaaaattaaattttaatgtagtcggagtgtaaaggtcgttcggttttgtttttcggcgggggaatgcgttgtgttggaggcgcgaataggagtcgtagacggtgagttttatcgttgtaaatgttagggtagtgaagtcgaatagaaaattttatcgttttaaaaaggtagttgttcgtttttttttttttttttcgttagggcgaggggttttttaagttcgggattcgcgagttgcgcggaggatttcgttaaattcgagtatcgtgcggcgttttttaagagttcgaataacgggaatttagtaaaaaataagtcggttttagaaggtagtttttttttttttttcgcgtacgggttataatcgtttttagtttttaaattgttttagtagaggtcgcgcggagagagtagagtcgagggatttagcgtaaggcgggagttaagcgcggttgttttaagaacgcggagagcgcgcgttcgtcgttagttggttcgggttgcgcgttttcgtcgttatcgcgcgttttttgttcgttcgttttttcgttcgtcggttttaaagtttttgttaggatttatgtttatatgttattttttgtatggaggtatggttagtttttagtttcgcgtttttcgtttttttttagtttgcgtcggagttataatttttaggagtatggattgaaggcgttttcgttttagcgtttttttgagattttttgtgttttttttcgtttttttcggtcgtttttattttggggggtttttcgttttttttgtttttttttttttttttttttttcgtaaatatgtttttttttttttcggggttttggaaggagttgtttgtttgaagttcggagacgtcgcgtcgcgtttagtttcgtcgtcgttcgtcggttttcgggttgtgttgcgttgtcgatttaagttggggattttcggttgttcgtcgtcgtcgttcgcggtttttgtttgttttaggttcggggtatcgtcgtcggtcgtcgatttcgcgttttgttcgatcggtttttttttttttaaacggaaagtagttttttttcgtcgagaggatcgtttttagcgtggttttgcgttttcggttattttttgagatttttcggggggcgtt

SEQ ID NO: 1721 - DNA, 2186 bp, Artificial Sequence
  chemically treated genomic DNA (Homo sapiens)
agcgtttttcggaaaattttaaaaagtgatcgggaacgtagagttacgttggggacgattttttcggcggagaaaggttgtttttcgtttaaaaaggagagagtcgatcgggtagggcgcggagtcggcggtcggcggcgatgtttcgggtttggggtaggtagggatcgcgggcggcggcggcgagtagtcgaggatttttaatttgagtcggtagcgtagtatagttcgagagtcggcgggcggcggcggggttgagcgcggcgcggcgttttcgggttttaggtaggtagttttttttagggtttcgggaaggaaggaggtatgtttgcgagaggggaaggggaggggagaggtagggggagcggagagttttttaaaatagaaacggtcggaggaaacggaggaaaatataaaggattttagaggggcgttggggcgagggcgtttttagtttatgtttttgaaagttgtggtttcggcgtaggttgggaaggaacgaagagcgcggggttggaaattggttatgtttttatataggaagtaatatgtgagtatggattttggtagagattttaaagtcggcgagcgaaggagcgagcgaatagggggcgcgcggtggcggcgggggcgcgtagttcgggttagttggcggcgggcgcgcgtttttcgcgtttttaaagtagtcgcgtttggttttcgttttgcgttgggtttttcggttttgtttttttcgcgcggtttttattgggatagtttggggattgggggcgattgtagttcgtgcgcggagagaggagggaggttgttttttggggtcggtttgttttttgttggattttcgttgttcgagtttttaaaagacgtcgtacggtgttcgggtttggcgagatttttcgcgtagttcgcggatttcggatttgaggggtttttcgttttggcgaggggaaagggggagggcggatagttgtttttttaaagcgatggggttttttgttcggttttattgttttggtatttgtagcggtgaggtttatcgtttgcggtttttgttcgcgtttttaatatagcgtattttttcgtcgggaaataaagtcgagcggtttttgtatttcggttatattgagatttaattttttttttttttttttttcgggtttttattggtttagtttaaggttggggaaagtgggggaggggaggaatgtcgattttaggattgcgaaatttagttttttcgagtttcgtattttttttttcggcgttacgatggatcggtggcggagtttttttaattcgtagtttttttggagaaggttttcgtatttcggtttggtcgcggggagggcgtaggaagtgcgttttttatattttgtagggtgaaagtagcgtcgcggggtcggattgattttttggtagttattcggggagcggttgtttttttagtaatcggggagaggcgttcgggggaaatgggaggattaggtttatttgtaatgagttttgttttttggttttcggtaagaagatttttatcgtttagatttttaagcgttttattttatatttttaacgttggggttaaaagtgggggaggcgggttttcgagtaaatgtgtaattgagttaaggtaattagtcgtttgatattttttgtttaatttttttgtttgtgttttaaagcgattttgacgtgggattgttttgttttgttttgagacggagtttcgtttcgtcgtttaggttggagtatagtggttcgatttcggtttattataattttcgtttttcgggttcgggcgatttttttgttttagtttttcgagtagttgggattataggcgttcgttattacgttcggttgattatttttttggtggttttttttgtttgttttttgttttattttggttttttttgtagaggcggggttttatcgttttggtaaggttggtttcgaatttttgattttgtgattcgtttgttttagttttttaaagtgttgagattataggcgtgagttatcgcgtatggtttttgtgttttaaacgtgtttttgttgttttattttaatacggtagggttttttatttatttaaatattttaatcggatgttaggtttttaaataaagtatagatggtcggagattttttcgttcgatgtgattaaggaagtatttttatat

SEQ ID NO: 1722 - DNA, 2420 bp, Artificial Sequence
  chemically treated genomic DNA (Homo sapiens)
agggaggtttaggaatgggatttgttttttttttattttttatgttgggttttggagaatattttaggggtggggaaatttttacggtaaaaaaagtttaaaaaaaattttattgtattattatattgtgtttttaggttttcgagtttttgaatatggtttttttatatttataaggattttgtttataatgttttattttatttttttttgttcgttaggtaattttagttagagaggggatgtttataatttttttttttggggttgtgggtttggcggatacgtggtatttgtttatttttttggatatgttgtttttattgttgttggatattattaaatatggtaacgtttatgttggttttttatttttttttaagtagacggggatagattttgtgtgtgtatgtatgtgtatttgtgtgttcgagtatgtatgtgtgtgtttattgtaggtaggtgttatgggttatgcgttttagtttggatttattggtttagatatttatgaggttagagggtttgtaaagtttttttggtcgtgttttttttttataatttttagtaaattttttggttttttgggtttaaggttttagtttgttttttaggtttttttaggtcggtggggatcgtaggtttcgttacggagtttggagtttagtgtttgtttgggatatatgaggggtttcgagggtttatatgttttttagtttgggaagttatttagtcgggtttcggtggggtttagtagaattttgggtatttttacggttttttgatattttagtttttgtcgtttttatttatacggagatagtttttttttttttatattttttattttttatgatattttttggtatgattttgattattttagttggataattaagttttttaagttttttatgtcgttttattttttttagtattgttgatttaattttagggggattttttttttgacgtttttatgtttcgttttttttttttgtagattttttggtagtttttttgtgtagaatagttattcggttttattttttttgtaaggtcggagttgttgttttatttttttgatttatatataataataaaaaaaattatttttgttatgtgtttttttatttttattaagtggttgaaatttaatttgattgttcgagtatttttggttggatttgggttggagtcgatgggattttatgagggttgtaaaagttaagtttttaatatgttttaaataaattggcgtgtaaaggagaaacgttagaagaaggaatatggttgtagacgggaggtttgggaatgttagtcgtagtattggggtataggtggttttaataatgtatataagtttggttgtaagttgtttttataagagtagaagaggttgtagaattatttttaggaggttgagattaaatttttcggtttttgagtgtatatagttttgtatggtttttaaaatatagattttaggattatttataataatataaatttgtggttaattttgttgaatttttatttagatttaagttgtgttgttagtagaaatgtaattgcgttagagaaaaattgtttatattttttgagatattgtgataatgaaaaatagtattataaatttttattaagtaagaagaatattaattgtattttatgttgtttttttgggttagtacgttgatatagatatgttttattttagtaaaatacggttaatttttgtagtacggtatttatttttttttttaattatatataattgtatagtttaatttattttaacgtttgacgtcgaaaagtgtatatttatgaattaagggttagtttgggagggaggagaattataaacgggtataattgtagttttttgggggttgtttatgagtgattttaaagaatgatgatgtttattttgaatttttattagtgaaagatagtagggttgtttttagttaagatattgttttaagaacgtagataataggataatttgtttagttgtttattatattagtggtttttttttggataagtaggtaagaaagattaaagatgtgggttttatatattttgtgatgtgatgaaatttaggtatatagatagtattagtaaatgtgtaattgaatattaaaatgagtaatgtggttttaggtagtatagttgtagatttttgtggataagggagagtgtttggaattttgttggatgatagtttttttagggggaaaagtaggatttatttgattattagtgtaatttattttagggttttttttggaatagtgtatttagttttgtaatcgtattttagaaaaattatttttaagttttgattataattaattaattaattatgatgaatgttgatggtgatttagtaaaagtggaatgatgatttaggg

SEQ ID NO: 1723 - DNA, 2420 bp, Artificial Sequence
  chemically treated genomic DNA (Homo sapiens)
ttttaagttattattttatttttattaaattattattaatatttattataattgattaattaattatgattaaagtttaaaggtgatttttttgaaatacgattgtaaaattagatgtattgttttagagagagttttaaagtgaattgtattaatggttaaatggattttgtttttttttttgagaaaattattatttaatagagttttaagtatttttttttgtttatagagatttgtagttgtgttgtttggggttatattatttattttaatatttaattgtatatttgttgatgttgtttgtgtgtttggattttattatattataaaatatgtggaatttatatttttaattttttttgtttgtttatttaaaggaaaattattagtgtggtaagtaattagataaattgttttgttatttgcgtttttagaatagtattttaattggaggtagttttattgttttttattggtaagaatttagaataaatattattattttttgaaattatttataagtagtttttaggagattgtaattatattcgtttataattttttttttttttaaattaatttttgatttataaatgtgtatttttcggcgttaggcgttagaataaattagattatataattatgtataattaaaggggaaaatgggtatcgtgttgtaaagattagtcgtgttttgttgaagtaaagtatgtttgtgttagcgtgttggtttagggaggtagtatgaaatataattaatgttttttttatttaatgggggtttatggtattgttttttattattatagtattttaagaaatataaatagtttttttttaacgtaattgtatttttattgataatatagtttgggtttaaatgaaaatttagtagaattaattataggtttatattgttatggatgattttggaatttgtattttaaaagttatgtaaaattgtgtgtatttaggagtcgagaagtttgattttaattttttgagagtggttttgtagttttttttgtttttgtagaagtaatttatagttaaatttgtgtgtattattaaagttatttgtgttttagtattacggttagtatttttaagtttttcgtttgtagttatgtttttttttttaacgttttttttttatacgttaatttgtttgagatatgttaaaagtttgatttttataatttttataaaattttatcgattttaatttaaatttagttagaagtgttcggataattagattgagttttaattatttgatggagataaagaaatatatagtaagaatgattttttttattgttatatatgagttaagggaataaaatagtaatttcggttttgtaagggagatagaatcggatggttgttttgtataaaagggttgttaaagaatttgtagagggaagaaacgaggtatggaggcgttaagagaaaggtttttttgaggttaaattaataatgttggggagaatggggcggtatgaggagtttgaaaagtttgattgtttagttaggatggttaggattatattaagagatgttatgggggatgagggatgtgggaggagaaaagttgttttcgtgtgggtggaggcggtaggggttggagtattaggaggtcgtgggggtgtttaggattttgttgagttttatcgaggttcggttgagtgattttttaggttgggggatatgtgagttttcggggttttttatgtattttaggtagatattgagttttaagtttcgtaacggggtttgcggtttttatcggtttggaaggatttggaaaataggttgaggttttgaatttagaggattagggagtttgttgggaattatggggaagaaatacggttagaggagttttgtagattttttgattttatgggtgtttgagttagtaagtttagattaaaacgtatgatttatagtatttgtttataatgaatatatatatatatgttcggatatataggtatatatgtatgtatatataagatttgttttcgtttatttaaggaaggataaggggttaatatagacgttattatgtttggtaatgtttagtaataatggaaataatatatttaaaaagataagtaaatgttacgtgttcgttaggtttatagttttagaagaagggattgtaagtattttttttttgattggggttatttgacgagtagagaaggatggagtgaaatattgtgggtaggatttttatgggtatgggagagttatgtttaggaattcgaggatttaagggtatagtgtggtaatgtagtggggttttttttagattttttttgtcgtggaaatttttttatttttgaaatattttttagaatttaatataaaaagtaggagggaggtagattttatttttgggttttttt

SEQ ID NO: 1724 - DNA, 2437 bp, Artificial Sequence
  chemically treated genomic DNA (Homo sapiens)
tttgagaatttaatgatgtgggtgatttgataggaggcggagtttaggcggtaatgttcgtttgtttgttgtttattttttgttgtgtagttcggtttttaataggttacgaatgggtatttgtttttagtttaggagttggggatttcgatataaagttttagattgtgtttgatatagattaagttttagagaaattttgttgttgttatgattattattgatattattgatattattgatattattattaggtcgggtacggtggtttatatttgtaattttagtattttgggaggttgaggtaggaggattttttgagtttaggagttagaggtcggtttgggtaatatagcgagatttcgtttttagaaaaataaaaaaataaaaaattagttgggtgtggtggtatgtatttgtagttttagttatataggaggttgaggtaggaggattatttgaatttaagaggtcgaggttgtagtgagttatgattgtgttattgtattttattttgggtgatatagtgagattttgttttttaaataaataataattaatttaaaaataaaagtattagtagtagtagtagtagtagtagtagtagtagtagtagtagaagtatggattaatttaagggggaaaaaaggagggagtgggattgaggtaaagtaagttgttatttggagaaaaaggtaaagaagatgattagatagatgcgtgtgtagatgtttatattatttttagagatttaagagattggcggtagtggtggagggagtggggatttgagggaggggaaaggatatcgattttttattttttgtttttttttacgttgtttgggttgtttttttttttttgtgtatttgtgtggatatttaaaattaaatattatagaaagaaattttgtaagaggtttttttttttagcgaaagttttaaatcgttttttttagtttcgtttttttttatttttatatttcggtttgtgggtggtttagtttggttttttatttttgttggtgttttgcgtttttggttttggagtaggttcgagttggaatgttttgtaagaaagggggttttttagagttttttagagtggttttggttttgggtagttaggggtgtggggttttggggaggggggtttcggttgattgatgagaattttaaatgttttttagtttcggttgttaattatttttagattggtcgggttagggttagggtcgtcgtcgtttggttttataaatagttcgtcgttttagatggcggttggttttagtttggcgagtaggtttatgggggattggggggtggtagtaggtggaggatttttattttattagtcgttttagttgttatatttttatatcgttttgagttggggattttgggttagaaggggtggtagaaattgaatttattgtttagaggagggaaattgaggttcggaaggggtaacgtgggtggtggttaaggtggggggaagatagagatgtaaggggggtgttttttgagggttgatgttgggtttattttatttttgtgaatttagtatattatgaggatgtcgtaaagattcgaggagggagggaaggggggtattattgttagttgggtttaaattttggttttagtttttattttttgagtgaataaattatttttatttttagttttagtttttttatttgtaaaatggggatggttggagtataggattgttggaagatttaatgattcggtttttgtagatagtttgtattttatatacggcgtaggcgttgaatatagtttttttttttttttttttcggaaattttttttatttttgttttttttgtcgtcggagagtatagtggttttttttaggaagttattttgatttttatttagatttttttttttgtgttaggtattgtgttttttttatagttttttttatagggttttttttcgatataattggtatttgacgtttttgtttttttgaaaataaggaaatagagggttagggaagtaattggtatttagtgttgttagggtttcgttttttgtagatgaggagataaagggttagggaggtagtgggatggatatgttgaggtcgttaggaaaagatagtttgatgtgtatttggagttgtttttgaaggttttatagaatttggtatagcgttaggtaattcggttgttttttttgttatatttattaattttagagtttatattttggtatagaaggaagagatttaggttggtgttgggtcgtaatattttagggaaaggggtaaggagttttgatttgtttttatatttgtttgtttttaaattgggttggattttggttgggtggtcgttgggtggtagttttgttttaggatattcggtagtaggataaggtgggggagttagttgttttgtgagttt

SEQ ID NO: 1725 - DNA, 2437 bp, Artificial Sequence
  chemically treated genomic DNA (Homo sapiens)
gaatttatagagtaattggtttttttattttgttttgttgtcgggtgttttgggataaggttattatttagcggttatttagttaggatttagtttagtttggagataggtaggtatgggagtaggttaaggttttttatttttttttttgggatattacgatttagtattagtttggattttttttttttgtgttaaggtgtgggttttggggttggtgggtgtggtaggagaggtagtcgggttatttgacgttgtgttaggttttgtgagatttttagagatagttttaggtgtatattaggttgtttttttttggcgattttaatatatttattttattgtttttttggttttttgtttttttatttgtaaggggcggggttttaatagtattaggtattagttatttttttgattttttgtttttttgtttttaaaaggataagagcgttaggtgttagttgtgtcgaggagagattttgtgagagaggttgtgggaaaagtatagtgtttggtataaagggagaggtttgagtaaaagttaaggtggttttttggaggaggttattgtgtttttcggcggtaggagaagtaggaatagaaggagttttcggaaaaggaagagggagaagttgtgtttagcgtttgcgtcgtgtgtggagtgtaaattgtttgtaggagtcgaattattgaattttttagtaattttgtattttagttatttttattttatagatgagaaaattgaggttgggggtggaaataatttatttatttagggagtaaaagttggagttagaatttaaatttagttggtaatgatgtttttttttttttttttttcgggtttttacggtatttttatggtgtgttggatttatagaggtaaagtgaatttagtattaatttttaaggagtattttttttatatttttgttttttttttattttgattattatttacgttgtttttttcgggttttagttttttttttttgagtaatgggtttagtttttgttattttttttggtttagggtttttaatttagggcggtgtggaggtgtggtagttgaggcggttagtgaggtgggggttttttatttgttgttattttttagttttttatgaatttgttcgttaggttggagttagtcgttatttggagcgacgggttgtttatggagttaggcggcggcggttttggttttgattcggttaatttggaagtgattagtagtcggggttggggagtatttggagtttttattagttagtcgggatttttttttttaaagttttatatttttggttgtttagagttagggttattttgagggattttgaggagtttttttttttgtagggtattttagttcggatttgttttaaggttaggagcgtagaatattagtagaggtgggagattagattgggttatttataggtcgggatgtgggggtgggagggggcggggttgagagggacgatttggggttttcgttaaggaaggaaattttttgtagaatttttttttgtagtgtttggttttgaatatttatataagtgtatagaaaaaaaggaataatttaaatagcgtggaaggggataaagggtggaaagtcggtgttttttttttttttttaggtttttattttttttattattgtcgttagttttttgggtttttggagatggtgtgaatatttatatacgtatttatttggttattttttttatttttttttttaagtagtagtttgttttattttagttttatttttttttttttttttttttggattaatttatatttttattattattattattattattattattattattattgttaatgtttttatttttaaattaattattatttatttaagaggtagagttttattgtgttatttagggtggaatgtagtggtataattatagtttattgtagtttcgattttttagatttaagtgatttttttgttttagttttttgtgtagttgggattataggtgtatgttattatatttagttaattttttgtttttttatttttttagagacgaggtttcgttgtgttgtttaggtcggtttttaatttttgggtttaaaggatttttttgttttagttttttaaagtgttgggattataggtgtgagttatcgtgttcgatttaatgataatgttaataatattaataatgttaataataattatagtaatagtaaagtttttttagggtttagtttgtattagatatagtttgaggttttatatcggggtttttaatttttggattggagataggtatttattcgtggtttgttaggaatcgggttgtatagtaggaggtgagtagtagataagcgagtattatcgtttgaatttcgttttttgttagattatttatattattagatttttaga

SEQ ID NO: 1726 - DNA, 2383 bp, Artificial Sequence
  chemically treated genomic DNA (Homo sapiens)
ttgtttattcgtttttgggtggtagttttatttttgttttttttggttattattgtgtttttagattttaataaagtatttcgtataagaaagtgtttagtttatagttgtagaataaatgaatgaatgaatgaatgaatgaatgaatggaaagtgtttagttttacgttcgatttttagtaagtatttgaaatttaatgtcgtgtggtggtgttagttttggttttcgatttttagttttatttaattttatttttattagttcggcgttcgtgttttttttgtttggttagttttttgttgtttgtatagttttttttttgggttaggacgatttttgagggaatcgtgggtttgtacggttggttttttttggttttgtttttagttttttttatatttttcgggggtagaggtttttgggaaataggttttgaagtttttttgggttagattcgttggggttttttttaggtattgtttgatgtgattttattagtgaataaatggggatagtgagatttagagaggggtagttatgttcgatgttaggtttcggggtttttaaaatatttagggaagtttttaggattttggtttttttgttgtttttggaatagagttgagtttaggtgtttgttttttagatgataaaattgaatttcgttataggttttggagttaggtttgaattttagtttttttattttttggttgtgtgatcgaggtttgttatttggtttttttgaggtttagtttttttgtttgtaaaatggtattttaatggtatttaatttacggaggtgtttggggggataaggttagttattttgtaggtaggtggggtttttggttttttttacggggttttgggatttttggtttcggaatttttaaggtttagtttttttagggttcgtatggttttttttttgttgggataatttatagttttagggttatagttgttgttgttttatttttttttttttttcgattttttttttttttattttggttttatttttttagaattagtttgtttttgttttttgtttttacggttttataaatgagttacgggtttgatttgatttaatttcgttgtaattgttatttttttaagtttgtttttttttattcggttatttacgagattataaaaatttaaataggacggggttttttttagttcggttttttggtttttcgggatttcgggttagggttagtagtttttggagattgaggtggggtttgtggagtttttgtggggagggatttggtgtttttagtaggattgggtatttcgagtttcgggttgtagttttgttgttggatagttttgagagaattgttcgagttttttgatttttttagtattttttttagtaggttttagaatagggaattaaaatttaggtatttttgggttagaaggtgaaaggatgagtaaggtggtttggtgttggtttcggtgaattggagagaataggttttttttaggggacggtggtttttgagttagtaggcggttcggatttttttatttagtaagagaagttagaagtttgagattgtatgtgaaaagttttgatttttaaatgttggttaacgagttaaattaaaaataaataaataaaatttgattttgtggatatttgtggtttcgtgggttatttttggtttagaaggttttaattttagttgcggtagtcgtgtttttagtttttttatttttttgtttgagtagttttttttgtttgaaattttttttttttttttttttattttagttatttttattttttgaatttcggtgtgttttttgttcgtagtttagaagagatgatatttgttttatttatgttcgtttttttaaggcgtttagttgtttttaatttatttttgtttttatgtttttttttttatggagggtttgttttgtttgagatcgttttcgtagtgggggaaattagttttttagttgttaaaagttataatatatattttgtttgttttattatttatttttaaaatggggtacgatatttttttggttatttaaaaatcgaagacgcgaggtcgacgtttttagggatgtgcgttgggcggtaggagttaggtgtggggttaaggagtgggggcggaggaggaagttaggtttttagttagggggttgagggttgtttttttaaagtttgggtatggatatgtgattagggtttattaattatatgtagttatgttagatttatgaattagaagttggaaatgttgggggttgattgtttaggatttcgttttggggtgggtggggttgtagttcggttatttttttagaagttgtagtgggttagttttgggggtagtgattagggtt

SEQ ID NO: 1727 - DNA, 2383 bp, Artificial Sequence
  chemically treated genomic DNA (Homo sapiens)
agttttggttattgtttttagaattggtttattgtagtttttggaaaaatagtcgggttgtagttttatttattttagaacggagttttaagtaattagtttttaatatttttaatttttgatttataaatttggtatggttgtatgtgattggtgggttttggttatatgtttatatttaagttttggaggagtagtttttagttttttggttggggatttggttttttttttcgtttttattttttggttttatatttggtttttatcgtttagcgtatatttttggaggcgtcggtttcgcgttttcggtttttaaatgattaaagaagtatcgtgttttattttagaaatgaatgataagataggtaggatatgtgttatgatttttaataattaaggggttaattttttttattacgaaggcggttttaaataagatagattttttatggaagagaaagtatagaaataaaagtgaattgggaataattaggcgttttgggaaggcgaatatggatgaagtagatgttattttttttgagttgcgaataggagatatatcgaggtttagagaatgagagtgattgagatgaggaggaagaaggagagagttttaggtagaggggattgtttaggtagaagggtggaaggattgagaatacggttgtcgtagttagaattggaattttttagattagaggtggtttacggggttatagatatttatagagttaggttttgtttatttgtttttaatttgattcgttggttaatatttaaaaattaggattttttatatataattttagatttttggttttttttattaaatgggaagattcgggtcgtttgttggtttagaggttatcgttttttgaggagagtttgttttttttagtttatcggagttagtattaggttattttatttatttttttattttttggtttagaggtgtttgggttttggttttttgttttaaagtttgttaaggaggatgttggggaaattagaaagttcgaataatttttttaaggttgtttagtaatagagttgtagttcgggattcgggatatttagttttgttggggatattaagtttttttttatagaagttttatagattttattttagtttttaggagttgttgattttggttcggagtttcgggggattaggaggtcgggttggggaaggtttcgttttgtttaggtttttgtggtttcgtgagtaatcgagtggaaaaaaataagtttgaaaagataataattataacgaaattaaattaaattagattcgtgatttatttatggagtcgtaaaaatagaaaataaaaataagttggttttggagaagtgaggttagggtgaggaagggagaagtcggggaagggaaaaaaataaagtaatagtagttatggttttgggattgtaaattattttagtaaggagggaattatgcgggttttggaggggttgggttttgggggtttcggagttaggagttttaggatttcgtgggagaggttagagattttatttgtttgtaggatggttgattttgtttttttaaatattttcgtgagttgggtattattagggtgttattttgtagataaggaagttgagttttagagggattaagtgataaatttcgattatatagttaggaagtaagaggattgagatttaaatttggttttaaagtttgtaacggggtttagttttgttatttagaaaataggtatttgagtttagttttgttttaaaaataataaagaagttagagttttggaagtttttttggatgttttgggagtttcgaagtttgatatcggatatggttgtttttttttaggttttattgtttttatttgtttattaatggggttatattaggtaatgtttaaggaaggttttagcgggtttgatttaggggagttttaaagtttgttttttagaagtttttgttttcgggagatgtaagaggagttggaggtagagttagagggagttagtcgtgtaggtttacgatttttttagaggtcgttttgatttagggaggagattgtgtaggtagtaggaagttggttaggtagagaaagtacgggcgtcgggttgatgagggtgggattggatggggttagaaatcgggagttaaagttaatattattatacggtattgggttttaggtgtttattaagggtcgggcgtggagttaagtattttttatttatttatttatttatttatttatttatttattttgtaattatggattgagtatttttttgtacgaggtgttttgttgggatttggggatatagtgatgattaagagagataaagatggagttgttatttaggagcgggtagataa

SEQ ID NO: 1728 - DNA, 2495 bp, Artificial Sequence
  chemically treated genomic DNA (Homo sapiens)
atatagagggtatagatttttttttattttttttttttttataaaagaaatgtaaatagaaaatataaataagagtaaaattttatgtaaatttattatttaattatggttaatttttaatattattgtttttttttaaaattgggagtttgggattatattggatttattatttggtaatagattttgattttgtaatatatttttattgtaattttatattattatttttatggttatagatttggtttatagttgtgaaagtagatttattataatgggattagttaattttttttttttggatattaggatatttttaattttttatttttatatagatatttaagtgaatgaagtaaaatgtttgtatatatttttagttatttaaaggtatgatgttagattgtttttttttatttatatttttattatattagaatgttgattatagttatttttgatggtatgatgtgagattattattttgtttttatatttattttttttaaatgttttgtaatgaataggttttatttgtataaatataatattatttaaaatgatgttatgaaaatttttatatgattatcgtttttatggtaatggtttgttacggttgtttgtaattttatataggggataggtcgtaatttatttaattattttttattattgatcggttgggttttttttaatgtttttaagatcgttatataggaaatttattttatatttggggttacgtttttagggagtagtttagtaaaggttggtgaatagattttatatttttggtttattttgttaagttgttttttcgaaaagatgttttaatttttttttttatcggtagtgcgtgggaatgtttgtttagtcgtttttttttttttgagacggtttaggtttttggatagtcgtattttttgttaggagggtaagagaaagtaggaaataatttggttagtaagtgattttagatttagagttaggagtgatttttaataagtttgatttttagaatagaatttgtagagaaaaagaaagtaagtaaggaaaaaaaaaaaaaaatttttttttattggaaaaaatatatatatatatagattaaaataatatttggtatttacgtcgtatttttaaaattttttaaacgttttataaatattagttaattaattaagtcgtttaaatttggttgtagtcggtggagagagttcgagaggagttaaaaaaaaaatgggggagttagcgttatataattttagattttattgtcgtttgtttggggtgtgattataggttttcggttgtattataagaatagttttgttttaatatgttgtacgtttgatttcgtagttttttttgcgttttttgtttttttattaattgttgatttatagttttttgtggtgttattgataaggataataataattgtaagttaggttgagtttcgggtttcgggtttgtatttttttttggatatgttagtattaattttatttaatatatgaagagagaggagatttgtttagggttatggagttaacgatattttttttttttttatttattatcgtatttattttgtatatttttatcgatgatattgtgttttaggtaggaggttggaaatagttttttgtggattttatattttattattgggaatgtgataatttagagaaaattaaatatgtgaataatatagttatgtgataataatgggaataagaattaaaatttatttagtatttatgtagtaggtatattatcgtgttagggtttttatgattgtgttggggtggatgtcggaattttattttatggatgatggaatgggggtttagggaaggtgggtatagaggtggttaagaggggagttatgttgttatttaggtttgttggttttagtaattgtgttttttcgaggtagtttttttagttggtttagtttcgaggttgaaatatagatttattcggaaagtttttagtttagtgttgttggtgttgtttttgatgttttcgtttggatgggtttttcgggttttttatatatttggttattagttttattttttttaggtcgtttgatgttggttgggtttttgtttattgtgggttttgtttgtttattgtgggttttgttttttttttttgtgttatgaagattttgttatgtttaattttaaatggaaatgaaatgagaagttggattttttgataataaaagtagttgaggttttaagtggttgattaggaaaaggaagtcgaaatggtaatatttatatttaaagtaggtggagtggttttaggtattttgagattttatttatttgttatgagaatcgggttttaagggtgattttttgttagagttaagattgggtgaggttgggaatgggagaaagaggtaggataatgggtagatagttttgggttttttgtagtgagggtagataggggtttgtgagtttttttttttggtt

SEQ ID NO: 1729 - DNA, 2495 bp, Artificial Sequence
  chemically treated genomic DNA (Homo sapiens)
agttagggaaagaggtttatagatttttatttgtttttattgtaggaagtttagggttatttgtttattgttttgttttttttttttatttttagttttatttagttttgattttggtaagggattatttttggggttcggtttttatggtaggtgagtggagttttagagtgtttaagattattttatttgttttgggtgtaaatattattatttcgattttttttttttgattaattatttaagattttaattgtttttattattaggaagtttagttttttattttatttttatttgaagttgaatatggtaagatttttatggtataggagaaaaaaatagaatttatagtggatagatagaatttatagtggatagaggtttagttagtattagacggtttgagaggggtgaggttggtggttaaatgtgtgggaggttcgggaggtttatttaggcggggatattagaggtagtattagtagtattgagttaggaatttttcggataggtttgtattttagtttcgagattggattaattggaaaggttgtttcggggaagtatagttgttagggttagtaggtttgggtgatagtatggttttttttttagttatttttgtatttattttttttggatttttattttattatttatgaagtggggtttcggtatttattttagtatagttatgaggattttgatacggtggtatgtttgttgtataggtgttgggtaagttttaatttttatttttattattattatatagttgtattatttatatatttgattttttttggattgttatatttttaatagtaggatgtaggatttataagggattgtttttaattttttgtttaaaatatagtgttatcgataaaaatatgtagaatgaatgcggtaatgaatgaaggaaggaaggatgtcgttggttttatgattttgggtaaattttttttttttttatgtgttaggtggagttgatattggtatatttaggggagggtgtaggttcggagttcgggatttagtttggtttgtagttattattatttttattaataatattataaggggttgtgagttagtagttggtgagggagtaggaggcgtaggagaggttgcggagttaggcgtgtagtatgttggagtagggttatttttgtggtgtagtcggaggtttgtaattatattttaggtaggcgataataaaatttggagttgtgtagcgttggtttttttattttttttttagtttttttcgagttttttttatcgattgtagttagatttaggcggtttaattaattagttagtgtttataaagcgtttgaagaattttaaaagtgcgacgtaagtgttaaatattattttaatttgtgtatgtgtatgttttttttagtagagaggggtttttttttttttttttttgtttgttttttttttttttgtaggttttgttttgagaattaggtttgttaaaaattatttttggttttgggtttggggttatttgttggttaaattattttttgtttttttttgtttttttagtagaggatgcgattgtttaggggtttgaatcgttttagggagaggagggcggttgggtaggtatttttacgtattgtcggtgggaggggaaattggaatattttttcgggaaagtagtttggtaggatgaattaaaggtgtgaaatttgtttattagtttttgttgggttgttttttgaggacgtaattttagatatggagtaggttttttgtataacgattttaaagatattagaaaaagtttagtcggttaatgataggggatggttaagtgaattacggtttattttttatgtggaattataggtagtcgtaataagttattattatgaaaacggtggttatatagaaatttttatggtattattttaaataatattgtgtttatgtaaataaaatttgtttattgtaaggtatttagagaaaataagtatggaaataaagtaataattttatattatattattaaagataattgtaattaatattttgatgtagtaaaaatatgagtgaagaaaaataatttaatattatatttttaggtaattaagaatatgtgtagatattttgttttatttatttaagtgtttgtatgaaaataaaaaattgaaaatattttaatatttaaggaaaggagattggttgattttattatggtgaatttatttttatagttataggttaagtttatagttatgaaaatgatggtatagaattataatggaaatgtgttataagattagagtttgttattaagtagtagatttagtgtgattttaaatttttaattttagaaaaaaataatgatattaaagattagttatgattgagtggtagatttatatgggattttgtttttgtttatgttttttgtttgtattttttttgtaagaaaaaaaaagatggagaaaaatttatattttttgtat

SEQ ID NO: 1730 - DNA, 2491 bp, Artificial Sequence
  chemically treated genomic DNA (Homo sapiens)
aaaaaagaagatatttacggtgtttttgtattatatgtttgatagatatattatgtgtatatggtgggtatgtgttttgtatgattaagttttttttatgtgtataatggatataaaatgtgtgggaggaggatatgttatgtgggaggtgaatttgttgggggtatttgttatatgggatggttttatagtatttgtaataattatattttgggtaattatttataatataaaatgcgtattaatgtatttgttttgtgtattttttatttttttgtgtatatattgtgtagggtgggtatatatcgtgtatgatgggtataggttttgtgtttgtttagtatgttatatgtgtgggatgagtgtaggttatatgtggagtatatgttgtttatgtttgtgtgaaggttatatttcgagtgtgtgtgatggttgtattttgtgagtaatagtatttaaggtataaatagtgtttataaagaatgtgttgtgtttgaggagtgtatatggtgtgggtgatgggtatattttggggagggatgtgttgtataatagatgtgttatatgggtgatgagtatatattgtgacgtatatatagtgtgtgataatattatatggggtatgtgtgcgtatacgttatatacggagtatatattgtatgtgtgatgggtatatagtgcgttgggtataatgagtaataagtataggtagtgtatataatggatttattttttatggtgaatatatattgtgtgggagtgttaagtatatattttgtggtataaataagttttgtgtgattagtatacggtgtgtatggttgtatagcgaagttgttattgtgatgggtttgtttggtgtgtattaggtattttggtatatggaggttatgatgggaatatgggatgtgtgtttgagtgggagtaggtagaggggatttattttgtggggagggggtatggtagggagtagttggatttttatttgtttttagaatttttagatttttgagtttatcgattatattgttttaggtttttttttaagtttttttttaaatgtaattagaattgtttgaagaatgcggggaattttagagatatgcgtcgtttttaggtgggtttggagagagggtttttttttgtaattttatttttttttgatggaggggaggggagggggaagggaaggttgtgattttgttattttgggaaaggtttttaaggtagatttttgtttagttttgtgtttttttagtttggttggtgtttgttgggggtggggtagtttttttttaatttgtgttggttgttaagggaggttttattagagttttatttaagaagatgttaattgtgatatttttatatgattaacgatttaggtaatttgtatagcgtgaagcggagagtagttgtttttagtatatttttaagttgtatattttttttagtgtagggcgggggaagaaggtagttttagttttttttttagaatagggtaggggtttttgttgttgagtttttcggttgatgttgtttatttttatttgtttaagattttatttttggtttggaggttcgtggatataatttagtattttgtgtatgtaaaaatagtagttattttttgtttaaggagttagtttttttaggggtttttatttttgtagcgtttggggagttagtttatttgggggtattatttgatttagttggtttttttttattagtttagatattgtaggattgaagtttttttttttttattagtgattttaaattttagtatttaattattagttttaaggtgttggttttttattatatttttttttcgggagttttcgagggttttagttaggttggtttcggtttttttcgtaggtggtggtgtttacgacggtgagcgtggacggatacgtgttggtcgtgttcgataatatgtttgtgtataataattttaagtatggtcgtagggcgcgtcgtttggattttttcgaaggttaggattttcggtttagtttcggtcgtcgcgggtttagttagttttttaggttttattttagcgcggttttttgatttgggtttttttttgttttttagttgttattttttgtattaaggttattagtttcggggagggttggattacgggcggcgttatcgttattgttatcggcgataattttttcgacgggttgtaggtcgtgttcggaaacgtgttcgtgtggagcgaggtgggttaatttcgttagtttttttttgggtttaggggttgggtttttttttcgtcggtgcgggatttgtaggtttttttttttttttcgtagtttattacgttttacgttattcgggtgtagacgttttcgcggtatattttcggggtggtggaggtgatttttttttataagtttaagtagttttgtaagggatgtttcggtcgttttgtttatataggtaaggagtcgggcgggggagtggaggttta

SEQ ID NO: 1731 - DNA, 2491 bp, Artificial Sequence
  chemically treated genomic DNA (Homo sapiens)
tagatttttattttttcgttcgattttttatttgtgtagataaagcggtcggggtattttttgtaaaattgtttggatttgtaggagagggttatttttattatttcggggatgtgtcgcgggggcgtttgtattcggatggcgtggggcgtgatgagttgcgaggggagaggggaggtttgtaggtttcgtatcggcgaggggagggtttagtttttaggtttagagggagattggcggggttggtttatttcgttttatacgagtacgttttcgaatacgatttgtaattcgtcgaagaagttgtcgtcgatgataatgacggtggcgtcgttcgtggtttagtttttttcggggttgatggttttgatgtagggggtggtagttgggaggtaggagaggatttaggttaggggatcgcgttgaggtggggtttggggggttggttgggttcgcggcggtcggggttgggtcgggggttttgattttcggaggggtttaggcggcgcgttttgcggttatgtttggagttgttgtgtataaatatgttgtcggatacggttagtacgtgttcgtttacgtttatcgtcgtggatattattatttgcggggagagtcgaggttagtttggttggggttttcgggggttttcgggaggggaatgtggtggggaattagtattttgaggttggtggttggatgttggaatttagggttattggtgggaggaggagggttttaattttgtagtgtttgagttggtggaagggggttagttggattaggtgatatttttagatgaattgattttttaggcgttataaaaataaagatttttgaaaaaattggttttttaggtaaagaatggttattgtttttgtatatatagaatgttgggttgtatttacggatttttaagttaggaatggggttttaggtaagtggaggtgggtagtattagtcggagaatttagtagtaggagtttttgttttattttggggagaaaattggggttgtttttttttttcgttttgtattgagaggggtgtgtagtttggggatgtgttaagggtagttgtttttcgttttacgttatgtaaattgtttgggtcgttaattatgtaaaaatgttataattagtatttttttaagtgggattttaatgaagttttttttggtagttagtataagttgagaaggagttgttttatttttagtaggtattaattaggttggggaggtatagggttgggtagagatttgttttggaggttttttttagggtggtagggttatagtttttttttttttttttttttttttttattaggaaagggtggggttgtaaggggaaattttttttttagatttatttggaagcggcgtatgtttttgggatttttcgtattttttaggtagttttggttgtatttgaggaagaatttgaggaagaatttgaaatagtgtggtcggtgggtttaagggtttgggggttttggaaatagatgaagatttaattgttttttgttatgttttttttttataggatgagttttttttgtttgtttttatttaggtatatattttatatttttattatggtttttatatattagggtgtttgatatatattagatagatttattataatgataatttcgttatataattatatatatcgtgtgttgattatatagggtttatttatgttataaagtgtatatttagtatttttatatagtatatatttattatgaagagtaagtttattatatatattatttatatttattatttattatatttaacgtattgtatatttattatatatataatatatgtttcgtatgtggcgtgtacgtatatatattttatgtaatgttattatatattgtgtatacgttatagtatatgtttattatttatatagtatatttgttatataatatatttttttttagagtatatttattatttatattatgtatattttttagatatagtatattttttgtagatattgtttatgttttggatattattatttataaaatatagttattatatatattcggggtataatttttatataagtataaataatatgtattttatatatagtttgtatttattttatatatatggtatattaagtagatatagagtttgtatttattatgtacggtgtatgtttattttatatagtatatgtatagagaaataggaaatatatagaataaatatattaatacgtattttatgttgtaaatgattatttaaaatatagttattgtaaatattgtaaagttattttatatagtagatgtttttagtaaatttattttttatatggtatattttttttttatatattttatatttattatatatataggaaaagtttaattatatagagtatatatttattatatatatatggtgtatttgttagatatgtggtatagagatatcgtgaatgttttttttttt

SEQ ID NO: 1732 - DNA, 2395 bp, Artificial Sequence
  chemically treated genomic DNA (Homo sapiens)
aagtttatttttattttcgggattttgtatttgttggttttttagtttggaatgtttttttattatagtaagatttgtttttttattttttttagatttttgtttagatgtgatttttaagaagtttttttgttttttttatttaatttgggtttttatttatttcgttttttattttttttttttattttattttttattatggtatttattattgtttgtggttaaattttttatttatttgtttattttttgttttattattggaatataagttttatagagtaagtagtttgttttttttgtttatttttgtatttttagtatttagaataagtttggtatatagtagttgtttaggaaatttgtgtaaaatgatgaataattaattattattttttttttatgattattgaagagttatgtttttgttgttgtttgttttttttttttttttgggataaatttggtttttaattttaattttaggagatgaaggttgtatttttaagggaaaaaaatgtatttaaggaataatttgatgataaaatttttaattttttgtaatatggattgaagtttgtgtttttttagttttattcgaagattttaaaatttatattgttttttttaaattttaatatttagattgttttttaaatttaaagttgtggatgaatttttgtgatttttgtacgtattttgattgttacggttattcgaagttttttttttaaaattataggatggtttagttaaattatgttttttttaaattattttattgagttttttttgttatattttaaagagaagatgtatttttttattagtagttggaatttgaaagaataaataatttaaaatagatttagtttttgttggtttttatgattatgaaggtatggaatattatttattaataagtgtcgtcggttgattgtttttttttgtatataaaaaatgagtatgtatataatcgtagtaatttgtttttgttgtagagtgaatagttttagaaatggattattttgttttattttgtttttatatatgtgggatttagtatgaggttatttagaaataatagaattaggtcgaggttagttaatatagtcggtagttgttattgaatgtttattgggtggttgtaggtttttggttgattacgtttttaagagttggttaatggagttttcgttatagttttggttaagttagtatatttaatagttcgtagtgtaaatgaaaaatatataggtttgattagggagtattttttttttttgttttttttcgtaaagagaggaaagtgattgttttggaagtttttgatattaatagttatgttggtatgtggttgtaagataatttgagttaagatggtgatatgttatttaaaataataaggtcggtatagtggtttatgtttgtaattttagtgttttgggaggttaaggtgggaggttgggtttaagtttaggagattaaggttgtagtgagttatgattgtgttattgcgtttttgtttgggtgatagagtagaattttgtttttaaaagaaaaaagtaatagggtgtgttgtgttattgttatatttataaattattttttattttttagagtatggttgtttttatgattttatttgttgtaagagattttaaatgatattgattaatatttttttgatagtgtaagtttttatttttagaattgagtattatgtaattgacgatatggggagtggggtttgaattttttggattatttagggttgggatgtgagtgttattggagagttttttggtttataggaaggaagggttgtatatgggtatagggttatacggaggtattgtatgagtggtgggaggttagttggtattaagtattgttttttattattagtgggtgtgaatacgattgtaggttatttttttgtgttgtttaggttttgtttttattttttttttgttggtttgattaagttgtttattgtttgtagatggtaataaaatataattaagttgtttgttgttgaagtttttgtaggaaaaaattatttagttttattaattttgtaattatagtttttttttttttatattgaaatagttatttatatgatttttttataatgtgaagtttttaggaatatagttattatagtagagttaattgtaatatgtttgaatgtaaggatttaaattattgaggattattgttattttgatatttgtataaaattatgtattgttaaaaaaaaaaaaaagaaaaagattatgtattgttattgaggtagtttgtataggatagtaagattttttttaagtggtttttttttgatagtttttatagatggtttttttgtgagttgttattatagtttttt

SEQ ID NO: 1733 - DNA, 2395 bp, Artificial Sequence
  chemically treated genomic DNA (Homo sapiens)
aagggattgtgatggtaatttataggaaagttatttgtgaggattgttaaaggaaagttatttggagaagattttgttattttatataaattgttttaatgataatgtataattttttttttttttttttttttgatagtgtataattttgtataggtattagaatggtagtaatttttaatgatttggatttttgtatttaaatatattataattagttttgttataataattatgtttttaagaattttatattataaaaaaattatataaatagttattttaatatgggaaaaggagggttgtggttatagagttgataaaattagataatttttttttataggagttttaataataaataatttaattatattttgttattatttgtaaataataaatagtttgattagattaataaaagagaaataaaagtaaaatttgaatagtatagaaaaataatttgtagtcgtatttatatttattgatggtagagaatagtgtttgatgttagttggttttttattatttatatagtattttcgtgtggttttatatttatgtgtagttttttttttttgtgggttaaggggttttttagtggtatttatattttaattttgagtggtttagaaaatttaagttttattttttatgtcgttagttgtataatatttagttttgagaatgaaaatttatattgttaggaaaatattgattaatattatttaaggttttttgtagtagataagattataaaaataattatgttttggaaaataaggagtggtttataaatgtaataatagtatagtatattttattattttttttttttagagatagggttttgttttgttatttaggtaggagcgtaatggtataattatagtttattatagttttgattttttgggtttaagtttagttttttattttggttttttaaagtattgggattataggtatgagttattgtgtcggttttgttattttaagtggtatattattattttaatttaggttgttttatagttatatgttaatatggttattaatgttagaaatttttagagtaattatttttttttttttacggaaaaagatagaaagggaaaatgttttttagttagatttatgtattttttatttgtattgcgggttgttaaatgtgttagtttaattaagattgtaacgaggattttattaattagtttttagaaacgtggttagttaggagtttgtagttatttagtgggtatttaataatagttatcgattgtattgattggtttcgatttgattttgttgtttttgaatagttttatgttgggttttatatatgtaaagataggatgagatagaatggtttatttttgaagttgtttattttgtagtaaaggtaggttgttgcgattatatgtatgtttattttttatgtgtaagagaaggtagttagtcgacgatatttgttaatgaatgatgttttatatttttatagttatagaaattaataaaggttgaatttattttgaattatttatttttttaggttttaattgttaataaaggagtatattttttttttggggtataataggagggatttagtaaagtagtttggaaaggatatggtttagttaagttattttgtggttttgaaaaggaagtttcgagtgatcgtagtagttaaagtacgtatagaagttataagaatttatttataattttagatttgaaaaataatttaaatgttaggatttggaaaaagtagtatgaattttaggattttcgaataaaattgggaagatataaattttaatttatgttatagaaaattggagattttgttattaaattgttttttgggtatattttttttttttaaaaatgtaatttttattttttgaagttgaggttgggagttaggtttgttttaaaaaaaaaaaaaaaataaataataataaaaatatagttttttaatgattatagaagagaaataataattaattatttattattttgtataaattttttgagtagttattgtatgttaggtttattttaggtgttggagatataggagtgaataagagagataagttatttgttttgtggagtttatattttagtggtgaaatagaaaataaataaataaataaggaatttaattataggtagtgataaatgttataatgaaagataaaatagaggaaggggatagagagcgaggtgaatggaggtttaggttggatggggaaggtaagaaggttttttggaagttatatttgagtagagatttgaagaaagtgagggaataggttttgttgtagtggaagaatattttagattaagggattagtaagtgtaaaatttcggaggtgggagtgagttt

SEQ ID NO: 1734 - DNA, 2469 bp, Artificial Sequence
  chemically treated genomic DNA (Homo sapiens)
gttttttttttgagggttttaggggagatttttttttgttttttttagttttggtgtttgttggtaattttaggtttttttgggtttgtaaatgtattgtaatttttgtttttgttattatatagtttttttttttgtgtttttgttttttttttttagaagaataatagttatattggattaaagatttattttaatgagtttattttaatttgattataattgtaaagattatttttaaataaagttatatttataggtattgggagttaggatttattttaatattttttggattttatgatatttagtttagtttataattaaatttataatgtttttcgtgagaaagaagtagtagttatgaagaaagtttagatatttttaagggtggagagcgtttttgattttttttttgatagttttgagtttttttaaatattgttgtttttattgattggtttgttttaggagtagggtttttgatttttaaattttggagtgtagtttagtaaagtgagataagtatattttttgtttttgaggtttaggagtattggaagagtggatagattaattgtgaatagagaatgttttgaaaatataggaagaattatttttttgtagatgtagttttggttttttgtgggagtttttggattttcggtgaggtagatttggaaggttatagtaggggatgtaaagagtttttttttagattcgttttttggtttattattttgtttttttaaatgtattttaagggttttttattttgattattgtttagtggtattgttgtagaggaagtaggagggtgtttggtggagtttgggaggtttatgaatttttgtatttggagaaatgttaatgttgagtttatatttttttttttgtagtatagaagattattattaggtttgtgtgtagaagtttaagtagttagagggggtttttgcgaggtttgtgggatttttttggttagaagatgggttatggtggaggaaggttatgttaaatggttgtgatttattgtttatagggaagagtacgtaatatatatttaggagggtttaggtagtcggaattgtggcggttttatatttttaaagtgaattttaaatttgatttatttatgtcgtttttatagtaataggaaaattgtttcgatttatagttacggaagattttgtaaaagaaattgtaggaggaaaaaaagataatgttaggaaaaaaaaaaatttaatgaagtattatttttttatttatttagttaattgagaataatagtttgtgtatttggtaattaaatgggaagtggtatttcgtgttgtaatatgaatttgtttatattaagtgatttatttttttgtttagatatattgtattgagaattttttttaagtagaaagttattaaaaatgtgagaataagtagtttttattaatttgaagtatttggggatttagaggaatgataaatgtaaatagtttagaatttagaaattgttttgaatatttaaattttagattttgggaatgtgtgtatgtttttagttagttagatgtagataatttttttttttgtgaggtttttttttatttatattttgtttggatagggtggagtttttgtttaaattttatttttagtttgaagaaagattaaattattgtagattaaagttagtgttattcggaaaatggaaaagatataggagatagggtatgttttttttagttcgattgtgaatttagggttttttttttggtgagtgtttttgggaggttgtataaggtttatgtttagttattgggttaagttgaaggaacgttttttattttttttatgtttgtattgaagattcgtgtttggtaattattttatagattttttttattatttgattttgggtttgtagttaatgttgtgtttagtatatttttgtgtgattttgataagaaatttattggttaaagattttgtgagttatttttgttttttgttttttttattttttatttaatatgtttgtttgtattatatacgtataaatataatcgagttgtattatattaattttttttttttttaaaaatatattaaaattattttttttttttaatttgtttatttatgagtttttgtacggtaatattttgatttttattttggttgagaaattatataaattagtttattgtatgttgttttattttgtatttatggttatgatattgaaattttaggattatatatagatagtatagtttttggttatttaagtatgtaaatagtttggttttttataaagtggaaaaatattttttgtgtattattttaatatgattagtatgttgaaatttggtgtgtaattgtgttaatatttttttggttttgaggagtaaattcggagaattttatggtaatatataaaatgtaaagttggtttgtttattattgggattt

SEQ ID NO: 1735 - DNA, 2469 bp, Artificial Sequence
  chemically treated genomic DNA (Homo sapiens)
aaattttagtagtaaataaattagttttgtattttatatgttattatgaggtttttcgggtttgttttttagagttaaagaaatgttgatatagttgtatattaagttttaatatgttgattatgttaaaatagtgtataagaaatatttttttattttataaaaagttagattgtttatatgtttaagtggttagagattatgttatttgtgtgtggttttgaagttttaatattataattatgaatataaaatggagtagtatgtaataaattagtttatgtagttttttagttaaaatgggaattaagatgttatcgtgtaagagtttataaatgggtaggttagaaaaggggaataattttaatatatttttgaaaaaaaaaagaattaatgtaatataattcggttatatttatacgtatataatatagataaatatattaaatagaagatgagagagatagaggatagaaatagtttataaggtttttggttaatagattttttattaagattatatagaaatatgttgagtatagtattaattataagtttaggattaagtggtagaaaagatttatgaaatggttattaaatacggatttttagtataaatatgagagagatgagaggcgtttttttagtttggtttagtagttgaatataagttttgtgtaattttttaggagtatttattagaggaggggttttaagtttatagtcgggttaaagaagatatgttttgttttttatgttttttttatttttcgagtagtattggttttggtttataataatttagtttttttttaagttagaaatagaatttaagtaggggttttattttgtttagataagatataagtgaaaagagattttatagaaagaaaaattatttatatttgattaattgaagatatgtatatatttttagagtttagagtttaaatgtttaagatagtttttggattttgggttgtttgtatttattatttttttaagtttttaaatgttttaggttagtgaggattgtttgtttttatatttttaatagttttttatttgaagaaagtttttagtatagtgtgtttaaataaaaaaataaattatttaatgtgagtaggtttatgttgtaatacgaaatgttattttttatttgattgttaaatgtataaattgttatttttagttgattgaataagtgaaagaatggtattttattaaattttttttttttttggtattatttttttttttttttatagttttttttatagagtttttcgtggttataggtcggaatagtttttttgttgttatgagaacggtataaataagttaagtttaaaatttattttgggggtatggagtcgttatagtttcggttatttaagtttttttgggtgtgtgttgcgtatttttttttataggtagtggattatagttatttaatatggtttttttttattatggtttattttttggttagaaaaattttataagtttcgtagaggttttttttaattgtttgggtttttatatatagatttagtaatggttttttgtgttgtaaggagagaaatataagtttaatattaatatttttttaagtgtagaaatttatgggttttttaaattttattaagtatttttttattttttttataataatgttattgagtaatgattaaaatgaggagtttttggaatatatttggaagggtagaataatgggttaggaagcgggtttaggaaggggttttttatattttttgttgtagttttttagatttgttttatcgaaggtttaggggtttttataagggattagagttatatttgtaggagggtggttttttttgtatttttagggtattttttatttataattaatttgtttatttttttagtgtttttggattttagagatagaaggtatgtttgttttattttattgaattgtattttaaggtttgaagattaaaaattttatttttaagataagttagttagtgaggataatagtatttagggaagtttaaggttgttaaaggaaaggttaagagcgttttttatttttaaaaatatttaggttttttttatggttgttgttttttttttacgaagagtattgtgggtttaattgtgggttgaattggatattataagatttaaaagatattaggataagttttaatttttaatatttgtgaatgtgattttatttggaaatagtttttgtagttgtaattaggttaagatgagtttattagggtagatttttaatttaatatgattgttgtttttttaagagaagaagatagagatatagagagaagagttgtgtaatgatagaggtaaagattgtaatgtatttataaatttaagaaggtttagggttgttaataaatattaaaattagaagaggtaaggaaggattttttttagagtttttagagagaaagt

SEQ ID NO: 1736 - DNA, 2485 bp, Artificial Sequence
  chemically treated genomic DNA (Homo sapiens)
ttattaagtttttttaattggatgtttatgaaattttaggtttaagattagatttttttttttgatattagtatgaggtttttattttgttaattgtagggaagggtgcggtggattttaagatttgttgttttgtgttttgtttttgttttagtttagttgaggtagtggttagtaattaaggggaaaaataaatttttaagtgttgagatttagttatcgatatagtttttggagtaaatttgtattttgttatttattgtttggttaggtaataagtttattttgtttggatttgagtagtagtttggagaaaaaaaaaattatattgacggtaatagtttgaaatatgaaattgtttttatttttagtttggagaaattgtagggtacgttttgtttaagtaatttttttgattttagtttgaatataaatggaatattaaaagtgttgggtatatttttttttattttttatttagagattgattttattattataattgtgggtttgtttggtttttggtagttttttttttttaagatttttaatagttttgtagacgattgttgtagtttagtttttttagatggggttgtagagaagaaaggttatgtttttaaaggtttagtatcgttttgttattgtttagtttggttcggttttatttagttgtgtgttttttttttatttgtttttttgagtttttgtgtgggtttttgttattattatttttttacgattatttattttagtaaatagtaatgatataagatgtatgatgtatttttttttttttttttttttttatttttttttttttttttatttttgggattattgaaaagttttataattatttataaatatgtaaagggtgtttataagattggagtaagggtggtggtatggggtaaagttagtagtgtttttttaggtgtttcgtgatagaggagaagggtgtatttggtttgttgtagtttgagtagattttggggttgaaagttatttttttgattatgtgtttagattttataaaattatagttcgggtttattggttgggtaatattatttgaagtgagtagaataatttaaatttttttattcgtaatataaaaggaaggggttatttgttttagggatgggtacgttttggtgtaatttggtagagtattttagtaattttattagatgttaggttagggtaaaagtggaaatgcgtttgtttagtatattttgggttgattatttggagtgtatgtttttgatttatttgtatataatttatttagggggtgttgtaagagttatgcgatggttaaaggaatttaatgcgttttttattatgttttttaaataagtttttttacgttgattgttttttggaattaagaagttttatttttttagtttcgtgatagattttaaaatgagatttttataaatttgagaataagttttagttttggttttaggattatttgttttgattttaagggttagttgaggagtgtgaaggttaggatgagttatggggtgagtgaaaattgtagttgggaaagtttcgttttgaggagtttgtatttatgtttttatatattttgaagtaattagtttttatttgtatttgtggtttttttgtttttttggttttatgaggagatagtagttttgttatttattttttgagagatagtgtggtaaagttagggatagtatgggttttagaattagattttttatgtttgttatttattagttttgtgattttaggtaagttgttgatgtttttgtgtattagttttttttggtggtaaaagttatttggtaattattttaaaatttaatagtttgagataatgattacgggattgttgtgggttaggaatttgattgggatttagttgggagagtttgtttttgttttatgtgatgttggttagagtgatttaattgaggttggaagatttacgatggttttatttatatgattgaggttttagagttagacgtgggttgagggattttggtttttttttatgtagtttttttttttatatggtttttatatatgtagtggtttaggttaagtttttttatatagcggttagaatattttaagagaatgaaaatgaaagttgtaaggtttttgttaatatttgttattattttatttttatttattttgttggatagagtgaattatatggttaatgtagatttttagggaggagaaatgggttttattttttttaatgggagatgtggtatataaaaatatagatgggaggtttttataagagttaaataatataggtggagtatttaggatagtgtttggtatagagtttgtgtttataaatgttatgttttattataatatgattattttggtattattttaggaataaatatagtatatgtttattttttgagtgaaaggttttttaatattatatggaggagagataaattttttaggt

SEQ ID NO: 1737 - DNA, 2485 bp, Artificial Sequence
  chemically treated genomic DNA (Homo sapiens)
gtttggagagtttgttttttttttatgtggtattgagaagttttttatttaggaagtaaatatgtattatatttgtttttgaagtgatattagaataattatattataataaaatataatatttatgaatataaattttgtattaggtattattttaaatgttttatttgtattatttaatttttgtaaagattttttatttgtgtttttgtgtgttatattttttattgagagaggtggagtttattttttttttttggagatttgtattagttatgtgatttattttgtttagtagaatgggtaggagtggaatggtgataggtattaatagaggttttatagtttttatttttatttttttggaatgttttaatcgttatgtaaggaagtttagtttagattattatatgtgtagagattatgtaaagagagaggttgtatggaggagaattaaggttttttagtttacgtttagttttgaggttttagttatgtgagtagggttatcgtggattttttagttttaattgggttattttagttaatattatatggagtagagataagtttttttagttgagttttagttaaatttttgatttatagtaatttcgtggttattgttttaaattattaagttttgagatgattgttagataatttttattattaaggaaaattggtgtatagagatattaataatttgtttaaagttatagggttagtaagtggtagatatggggagtttggttttagagtttatgttgtttttaattttgttatattgttttttaaaaagtaagtgatagagttattgtttttttatgagattaaagaaataaaaagattataggtgtaggtgggggttggttgttttagggtgtatagagatataagtataagttttttaagacgaggtttttttagttataatttttatttattttatggtttattttagtttttatattttttaattaatttttagggttagagtagatagttttggagttaaagttagaatttgtttttagatttatgaaagttttattttgaagtttgttacggggttggaagaatgaagttttttggttttaagagataattaacgtagagagatttgtttaaaaaatataataaaagacgtattgggtttttttggttatcgtatagtttttgtaatattttttggatgagttatgtgtaaatgaattagaaatatgtattttaagtaattaatttaagatgtattgggtagacgtatttttatttttgttttaatttgatatttgatagagttgttgagatgttttgttaaattgtattagggcgtgtttatttttgagataaataattttttttttttgtgttacgaatggggaggtttgaattattttgtttattttaaatgatgttgtttagttaatgggttcgggttgtggttttgtggagtttggatatatggttaagagggtgatttttaattttagagtttatttaggttgtagtaggttaagtgtattttttttttttgttacgggatatttagaagggtattattagttttattttatgttattatttttattttagttttgtaggtattttttgtatatttgtaaataattgtggagttttttagtaattttaaaagtaaaaaaaaaaaaaagggtaggggggaagaaaagaaaaggaatatattatatattttgtattattgttatttgttggaatgaatggtcgtgggagagtaatggtaatagggatttatatagaagtttagaaagataagtggagaaggagtatatagttgggtagagtcgagttaagttgggtagtgatagggcgatgttgagtttttggagatataattttttttttttgtagttttatttgagggaattgagttgtaataatcgtttgtaaggttattaagggttttggaggggagaggttgttaagagttaggtaagtttataattatggtaatgaaattagtttttgggtaggagataagagggaatgtgtttaatatttttggtattttatttgtatttagattggagttaaagggattgtttaaataaaacgtgttttgtaatttttttaagttgggaataaaaataattttatgttttaagttattatcgttaatatgattttttttttttttaaattgttgtttagatttaaataaaatagatttgttgtttggttaggtaatgagtagtaaaatataaatttattttaaaagttatatcgatgattaaattttaatatttagaggtttatttttttttttaattgttagttattgttttaattgaattaaaataaaaataaaatataaaataataaattttaggatttatcgtatttttttttatagttaataaagtgaaaattttatgttgatattaaaagaagaaatttaattttgagtttgaggttttataggtatttaattaaaaagatttaatga

SEQ ID NO: 1738 - DNA, 2500 bp, Artificial Sequence
  chemically treated genomic DNA (Homo sapiens)
atatattatgatgttgttaattttttggtgttattagtagtaatttgattgttttattttgaatatgaaagttaagttttgaatttttagaaatggattatagggttatgagggtaagtatttatgggatttatacgaggttgtgtttagtttaatttagttttttttgggtttattgattagtaagtatttttagagtattaatttgtggaatatatagtatttttaaaagataagatataagtaaaaaaaaaaaaatgatgttagaggtttggtggtggttaaataattggggagtaatattaatagggtattattaatggttaaaaaaaaaaaaaaatgagttggatgtaggtaggtaattagtaatgtttatagttaagaaaatttttgttggggttgttaagaattgttttttagtatagggttaatggttagtggaaaagattttatagagtaaagaagggtttgagaggtattttgaagtttgagtgagatttatatggatggtaagggataagttggttttttcgtgtggtagatatatggttagaagattagagggttaagtggattagagatgggtgatgagattgagatttgatttgtaattttgttattttttaattgtgtgatatttatttttagtggttatataattattgtaggttttagtttttttatgtgtaaattgtagacgatggtattttttattggaagagtaaatgataatgtatatatagtatttaaagtaggatttgaggtatatagagttattttttatggtttttattatgattattattatcgttattgttaaaggattttgataagaaaataggattaagtgtgagtattaataatttgtttttgttatttttgttatggtgatgggaggtatttttagttgggttatttgatttatgttaatggggtagttggaatgagtaggtggtaggaaaaaaggtaggaaaatggattaaatttggtttataaagtattgagaaggtaatgggagagttaagtttaggatattgttgtttagtttggttttatatgaatttaatattttatatttgtggaattttacgaggggttaagttaggttgtacggtgaattttggtttagtcgtgagaattttgggagaaaatgaagtataatagaaatttttatagaaagttgcgggggtatcgtagttagagtagagagttcggaattcgtcggtttgaattaggatttagttaagtttattttattaaaatttatgaagttaatagttttttttatttggtttttgaaggaatatttttattgtgtaattattttcgtggaaattgtaatattgtgtttgttattatatagtattaatattaaatggttaggtgataaaagttaaggatattaagttaaaagtttatgttgtatttttattgtatattataggttataaattgagagtgtgttttttattattttaaagtttttggggttggatttttgtttagtaattttatttatataatatatttgtaattatttttttaaatttttaatttatttttttgaaataatagtattagggtttttgattgttattttgttgttgttttgtttgagggaattattagatagcgatggtaaatgtaatttatagtataagttaattatttgaatggaggttgttttgaattttttaggtaatgtgatgggtgaagttatagtaatatttttgagtaggttttttttgttattagtaattagttttatgtattagttaaatgttaaggtggggttttttggttagtatattggatttttgttgaagtttttttaggaggtgttgtgggtggggggagtattgcggagagggtaaggttttatttttttaatttgagttttagttaagattttaattgagtagggagtggtggtttatgattataatttcggtattttaggaggtttaggtgggagaattgtttgaatttaggagtttgagattagattgggtaatatagggaaattttatttttaaaaaaataaaatatataaaataaataaataaataaataaatagttaggtatggtagtatgtatttggggttttagttatttgggtggttggggtaggaggattgtttgagtttaggagtttgaggttgtagtgagttatgattatattattgtattttagtttggatttagagtaagattttgtgattttatttattttttttttgtataagtggtgatattgaggtttagtgatgaaagattttgtttaaggtaggaatatgttattattttgataggaaggggttgaattaggttataaattttttttgtaagtttttaaattgggtgatgtttgtattatttaggtggttgttggtttttttgtgagttttgttattaagtttttaaggttttagaaaaggtgtttttaaatttatataatatgtattttgagaatttatggtttggtaagtatggtgatag

SEQ ID NO: 1739 - DNA, 2500 bp, Artificial Sequence
  chemically treated genomic DNA (Homo sapiens)
ttgttattatatttattagattataagtttttaaaatgtatattatgtgaatttgaggatattttttttggagttttgaagatttgatggtaagatttatagaaaggttaatagttatttgggtgatgtaaatattatttaatttggagatttgtaagaggaatttatggtttggtttagtttttttttattaagatggtagtatgtttttattttgggtaggattttttattattgggttttagtgttattatttgtataagaagaggatggatgagattatagggttttgttttgggtttaggttggagtgtagtagtgtgattatagtttattgtagttttaaatttttgggtttaagtaatttttttgttttagttatttaagtggttgggattttaggtgtatattattatgtttggttatttatttatttatttatttattttatgtattttatttttttagagatggggtttttttgtgttgtttagtttggttttaaatttttaggtttaagtagtttttttatttgagttttttaaagtgtcgggattatagttatgagttattattttttgtttagttgagattttaattgaagtttagattggagagatgaaattttgtttttttcgtagtattttttttatttatagtattttttaagggggttttaatagaagtttagtgtattggttaggagattttattttggtatttagttgatgtatggggttggttgttgataataaggaagatttatttagaagtgttattgtagttttatttattatattgtttgaaaagtttaggataatttttatttaaatgattggtttatgttatggattatatttattatcgttgtttggtagtttttttaggtaaaatagtaataaaataataattaaaaattttaatgttgttattttagagaaataggttggaggtttaaaaaaatgattgtaggtatgttatgtaaatgaaattgttagataaagatttagttttaggaattttaaagtagtggagggtatatttttaatttgtagtttgtagtgtgtaataagaatgtagtatgagtttttagtttgatgtttttggtttttgttatttggttatttagtattaatattgtataatagtagatatagtattgtagtttttacggaagtgattatataatgggagtgtttttttagaagttaagtaaagggggttgttagttttatgagttttgatgaaatagatttagttaagttttaatttaggtcgacggatttcgggttttttgttttgattgcgatattttcgtagttttttatgggaatttttgttgtgttttatttttttttagggtttttacggttaagttaggatttatcgtgtagtttgatttggtttttcgtaaaattttataagtgtgaaatattaaatttatgtgggattagattggataatagtgttttgaatttggtttttttattgtttttttagtgttttatgaattaggtttaatttatttttttgtttttttttttattatttgtttattttagttgttttattgatatggattaggtaatttaattagaaatattttttattattatagtagggataatagaggtaagttgttaatatttatatttaattttgtttttttgttagagttttttaataatgacgatgataatagttatgatgaaaattatgaagaataattttgtgtattttagattttgttttaaatgttgtgtgtgtattgttatttatttttttaataaagggtgttatcgtttatagtttatatatgaggaagttgaagtttgtagtggttgtataattattggggatgagtgttatatagttagaaagtggtagagttgtaagttagattttaattttattatttatttttgatttatttagttttttagttttttgattatgtatttgttatacgggaaggttagtttgttttttgttatttatataaattttatttagattttaggatattttttaaatttttttttgttttgtggagttttttttattggttattggttttgtgttgaaggataatttttaataattttagtaggagtttttttaattgtaaatattgttaattgtttgtttatatttagtttatttttttttttttttggttattgatgatattttattaatattgttttttaattatttggttattattaggtttttgatattatttttttttttttgtttatgttttgttttttgaaaatattgtgtgttttataaattgatgttttagaagtatttgttaattaataaatttagaaagggttgagttaaattgggtatagtttcgtgtgggttttatgagtgtttatttttatgattttgtgatttatttttgaaaatttagaatttggtttttatgtttaagatagagtagttaaattgttgttggtgatattagagggttgatagtattatggtgtgt

SEQ ID NO: 1740 - DNA, 2419 bp, Artificial Sequence
  chemically treated genomic DNA (Homo sapiens)
aggttaaataattagtaagtggtagatttagtatgtgggtttagatagtttttttttagagattgatttttattatttttttatttagtattttttgtattgtatgagaaaaaatatatgttgtatttgtagttgaattttatataacgtatattaattatatttgggagatagatttatttatttataaatttttagtggttattaaaatatttgatagttaaaaagtttattttaaatgtttgtggaaatgaatggaattggatggttttagtagttttaatttgatttatttaagaaaatagtataatttatatgtagttgtttttttgagggtggtttttgtttttattatttgttagttatgaaatagggttgttttatttttgtatagatatttttagtagaatttgttagtaattaattttatttttttagtatgaatattagttttttttttgtatgcgggaggtagaataatgatttttttaaagatgtttatattttaagttttagaatttgtgaatatgttatgttatatggtaaggtggggttaaggttttagacgaaatgaaagttgttaataagttggttttgagatagggagattattttgaattatttgaatggttttaatgtaattacgagtatttttataagaggaaggtagaagagaaagttaaggtgatattatataagaaatattttatttattgttgcgtcgttaatgatggagaaatgggattataagttaaggaatgaggaagtttttagaagttggaaaaggtaaaaaaagaatttttgttttttataagagtttttagaaggagtatagttttgttgatattttgtttttagatttttgatttttagaattgtaagagaatgaatttgtgttgttttaagttattaagtcggtggttatttgttatagtagttatagaaaattgtttattgtaggatgaaaagttatttttttttggtattttttaaaggttaatttaagagtatggattgttttgtattttttaggagtattattgtaaagtcgatttattattttttttatttgtttcgtattatcgtgttggggtttattaacgttttgttatcgggtgttttgtgcgtaagtagaagtgtgttaagaattaatcgttttgatttttattttttgttggtgttttgttattcgtgggttgtttggtttgatatatgaattattttttagttgtttggtgttggggaggtatagttattagtttttaaatattttagatatatgttaattgtaattttaatatatattttttttttatcgttattttggaattgttttattggtaatgtatgaaatatgaataagaggaaataattgataaggtattattgttgattaaggggttaatttttgaggaagattaaaaatagatgtttttgaagaagaaagaattgaggaagtgaattttttttttttttaattttttagtttattgtttttatttaaaaattaaattaatatattttgaagaaggtttaaggagattaggaatttttaagaatttatttgtattttgtagtagatagtttgtttgttttttattgaaaatttataagaaataatattgtaatttttgttatagtaaataattggtgggtgtatttttttatgttaaatatatgttaagtataaaaaatgtgtttagaaaaataaataattttggaaggttttttttttagtgtttttttattttttttgttttagtttttttttttgtgatggtgtttaatttaagttttggattttttgttgttgattttagtagtatttttttttgatttgtaggaaattgtttaaggtttttaaaattattttttttataaatttttgtttttttttcgaataattttaattagtatttttgtaaaaagttgtttaattaatgattttatgtataagtgtgggtaagtgataatatttggatgtgttgttttttttagaggatttgttttttaaatttttttaaatagagatataattagtttggataatgagtgtttaaaattaaagtttaattttttatggtaggagtgtggttagtgtgcgtgtgtttaggggaggtgatatgggttattggaggttttttttgtgttttttaaattatatgatttgtattatttaaatgttgtttttgtttttattttgacgatgaaatgattttatgaatatattgattattataattatagttagtgatatttatagtatgttttattatttttaataagaaaagtttattttatgttatttttattaataagtttgtgaggttaagaattttattatgttcgtgttatatattagaaattaataaattttttgtaaagggttagagagtaaatattttaggttttgaggtta

SEQ ID NO: 1741 - DNA, 2419 bp, Artificial Sequence
  chemically treated genomic DNA (Homo sapiens)
tggttttaaagtttgaaatatttgttttttggttttttatagaaagtttgttgatttttggtgtatagtacggatatgatggaatttttgattttataggtttattggtgaggatgatatgaaataaattttttttgttgagaataatgaagtatattataaatgttattggttataattataatggttaatatatttatgaaattattttatcgttagagtggaagtaggggtagtatttgggtagtataaattatgtgatttgaggggtataaagaaagtttttaatgatttatattattttttttgagtatacgtatattgattatatttttgttatgaagggttaagttttagttttgagtatttattatttaggttgattatgtttttatttgaaaagatttggaaaataagttttttgggaagggtaatatatttaggtgttattatttatttatatttgtgtatgaagttattaattaggtagttttttgtaaagatgttggttgagattgttcgaggaaggaataggagtttatggaaaaggtaattttgaaagttttgggtagttttttgtaagttagggagaaatgttattgaaattaatagtaaaggatttagggtttaggttgggtattattatagaaaggaggattaagataaaggaagtaagaaggtattgggaaaagagttttttaaagttatttgtttttttaggtatattttttatgtttggtatgtgtttggtatggagggatatatttattagttatttgttataataaaggttgtagtattgttttttgtaggtttttaatggggaataaataagttgtttgttatagaatataaatgaatttttgaaaatttttgatttttttaaattttttttagagtgtgttagtttaatttttggatgaggataatgaattaaagagttaagaggagagaagatttatttttttagtttttttttttttaaggatatttgtttttaattttttttaaaggttagttttttagttaatagtggtgttttgttaattatttttttttgtttatattttatgtattgttaatggaatagttttagggtgacggtagaaaaaaaatgtgtgttgaaattgtaattggtatatgtttgaaatatttgggggttggtgattgtgtttttttagtattaggtagttggagagtaatttatatgttaagttaagtagtttacgaatgataaaatattaatagggaataaaggttagagcgattgatttttaatatatttttatttacgtatagagtattcgatgatagggcgttaatgagttttagtacggtgatgcggaataaatgaaaaaagtaatgaatcgattttgtaatagtgtttttggaagatatagaataatttatgtttttagattagtttttgagaaatattaggagaaagtggttttttattttgtagtgggtagttttttgtggttgttgtaatagatggttatcgatttagtggtttaaaataatataaatttatttttttatagttttaggaattagaggtttaaaagtagggtgttagtagggttgtgttttttttagaggtttttgtagggggtagggattttttttttgttttttttagtttttggaggtttttttattttttggtttatgattttatttttttattattaacggcgtaatagtggatgaaatattttttgtatgatattattttgatttttttttttgttttttttttgtaaggatattcgtgattatattggggttatttagataatttaggataatttttttgttttaaagttagtttattaataatttttatttcgtttaaaattttaattttattttgttatgtggtataatatatttataagttttagggtttagaatgtgggtatttttgagaaggttattattttgtttttcgtatgtagagagagagttaatatttatgttggagaagtgaggttggttgttgataagttttattgaagatatttgtgtagggatgaagtagttttgttttatggttggtagatagtgaaaatagaggttatttttaggaggatagttatatgtgggttatattgtttttttagatgagttaaattgaagttattaaaattatttaattttatttatttttataaatatttaagatgggttttttaattattagatgttttggtggttattgggaatttgtaaataaatgaatttgttttttaaatgtagttggtgtgcgttgtatgaagtttagttatagatgtaatatgtatttttttttatgtaatatagagagtgttgaataaagggatagtgagagttagtttttggagaaggattgtttaggtttatatattgaatttattatttgttagttgtttggttt

SEQ ID NO: 1742 - DNA, 2353 bp, Artificial Sequence
  chemically treated genomic DNA (Homo sapiens)
tttggaaaatattaattaaataatatattttaaataattttgaaaaagataaaggtatttttttaatttggggtattttattagttattaagaattaatgttattatttttttatttgtttagtgtttagaattttttttaagtttgttgataatggtggtaatgagggttaaaggatggagttgtttagttttggtaaatattggttaggtatagaggtttatgtttgtaattttagtattttgggaggttgaggtaggtagattatttgacgtttggagttcgagattagtttggtttggttaatatggtaaaatttcgtttttattaaaaattagttaggtatggtggtatatttgtaattttagttatttaggaggttgaggtaggagaattatttgaattttagggatagaggttgtagtgagttgagattatgttttcgtatttaagtttgggtaatagagtaagattttgttttaaaaaaaaaaaaaaaaaggtatggtggtttatgtttgtaattttagtattttgggaggttaaggcgggtggattacgaggttaggagattaagattattttggttaatatagtgaatttcgtttttattaaaagtataaaaataaaattagttaggcgtggtggtgggtttttgtagttttagttattcgggaggttgaggcgggagaatggtatgaatttgggaggcggagtttgtagtgagttaagattacgttattgtattttagtttgggcgatagagcgagatttcgttttaaaaaaaaaaagaaaagaaaagaagaaaagaaaatataaaatgtttagttatttaggatataattgtgtggtttgatcgtttagttgtattattttttttatttggaaagtgttttagtgattatagaagttgttagaatttttaaaagtaagaagaaagtgatgggaaaatgtgttaaatttataatgggagaatattgtgttattagaaaattatatgattttggtaattttaggagtatggaagaaagattttaaataagtttttgattatgtatttttttttaaatttttttgaatgttgaagaaatgttaaattttattaagttttatagttagatttaatatagatataaatttttttaatgttcgttttagttaaaagtgagcggaatattatcgttaaattagtgtatgtgggagaattatttgaggaaaattaaaataggtatagttgggaatattaagtcgtggttatattagacgtaagtaggcgtaatagtaaaattttttaggttttaatggattgggttattttgttttttagtttttatatagatgagttttgttttggggtaatatggttgtagtttgagagtttatttgaaggagtttattttttttttattagtttatgagtatagtgtaattttagttaatattgttatatagtttttagttgggttatttggttaaatgtttttagggaaagtagtaagatagaataaaaggataaatgtaatgcggttttttgttttgagtttttgtagttgtggaattatattggtagttaattattattacgttgtattcgtgattataaatttttgttatttaagatgttatttaagttttataagaaatattttgttttttgtggtataatttttttgaggtcgggtttgtgtataattataattatagagatttgttttttgtgtttcgtggatatgttagtaggtatatagtgttatttgtgtgaaattgaaaatgatattttttattggtgggtgaattgggaaatagtattttgtttatgggtaaattagaaaagatgtttttttttgggtggataaatgagtaaaaggtagtttttttgggttgattaatttttttttaaagttttttttattttggggtgtgggggtggtgtatatggtttggtaagtttaatgtagattttagttgttttttgtgggtaggaatttttggcgtaatgtataatttgtataattgtatataatagttttgattatagaatttatttttataattttgtagttggattatagagtttgttttttagtattttaaaaatatttgtttaattatattagtggatgtttatattaaatatattggtttttttttttatggtaagtaattgttattttttgttaagggtagtgttttaattttggaaataaataggatattcgtaggttgagaaatagaagaattagaggacggtgatttttaggggtttgattagtggtgggtagtggagtggtggaaattacggtggtatttttttattatcgtaatgtaatgttttttttagtttttattattattt

SEQ ID NO: 1743 - DNA, 2353 bp, Artificial Sequence
  chemically treated genomic DNA (Homo sapiens)
aggtaatgatggaggttgaggagagtattatattgcgatggtgaagaggtgttatcgtggtttttattattttattgtttattattggttaagtttttaggagttatcgttttttagtttttttgttttttaatttacgagtgttttgtttgtttttaaggttagaatattgtttttggtagagagtggtagttatttgttataagaaagaagattaatgtatttaatatggatatttattgatgtgattgaatagatatttttagagtattgaggggtaaattttgtggtttaattataaaattgtgaaaatggattttgtaattagggttgttgtgtatagttgtgtaggttgtgtattgcgttaggggtttttgtttatagggagtaattagggtttgtattggatttattaagttatgtgtattatttttatattttaaggtggaggaggttttaaaaaagaattggttagtttagaggggttgttttttgtttatttgtttatttagaaggggatattttttttaatttgtttatagatagggtgttgttttttagtttatttattagtagggaatgttatttttaattttatataaatggtattatatatttattagtatgtttacgaagtataagaaataggtttttatggttatagttgtgtataaattcgattttaaggaaattgtgttatagaagataagatgttttttgtgagatttgaataatattttaaataataggagtttatgattacgagtataacgtggtaatgattaattgttaatgtaattttatagttataggaatttagaataagaaatcgtattgtatttgtttttttattttgttttgttattttttttgaaggtatttaattaaataatttagttaggagttgtgtaatagtattagttgaaattgtattgtgtttatggattaatgaaagagaaatgagtttttttagatagatttttaaattgtaattatattgttttagaataaagtttatttgtatggaaattgagaagtaaaatagtttagtttattagagtttaaagaattttgttattgcgtttatttgcgtttaatatggttacggtttaatgtttttaattgtgtttattttgattttttttaagtaatttttttatatgtattggtttaacgataatgtttcgtttatttttgattgaaacgaatattaaagggatttatgtttatattaaatttggttgtaaaatttaatgaaatttaatatttttttagtatttaaaaaaatttagaaaaagatatatagttagaaatttgtttgaaattttttttttatatttttaaggttgttagggttatataattttttagtgatatagtgtttttttattgtggatttgatatatttttttattattttttttttgtttttggaaattttagtaatttttgtagttattggagtattttttagataagaggagtgatataattgaacggttaggttatatagttgtgttttgggtggttggatattttatgttttttttttttttttttttttttttttttttttgagacggagtttcgttttgtcgtttaggttggagtgtagtggcgtgattttggtttattgtaagtttcgttttttaggtttatgttattttttcgttttagtttttcgagtagttgggattataggagtttattattacgtttggttaattttgtttttgtatttttagtagagacggggtttattatattagttaggatggttttgattttttaatttcgtgatttattcgttttggttttttaaagtgttgggattataggtatgagttattatgtttttttttttttttttttgagatagagttttgttttgttgtttaggtttgagtgcgggggtataattttagtttattgtaatttttgtttttagggtttaagtgatttttttgttttagttttttgagtagttgggattataggtgtgttattatgtttggttaatttttagtagagacggggttttgttatgttggttaggttaggttggtttcgaattttagacgttaagtgatttgtttgttttagttttttaaagtgttgggattataggtatgagtttttgtgtttggttagtatttattagagttaagtagttttattttttggtttttattgttattattattagtagatttgggagaggttttaaatattaaatagatgaggagataataatattaatttttaatggttaatagggtgttttaaattaaaaagatgtttttattttttttaaagttgtttaaaatatattatttaattgatattttttaaa

SEQ ID NO: 1744 - DNA, 2486 bp, Artificial Sequence
  chemically treated genomic DNA (Homo sapiens)
tgtatattgtttagtaaaagaagttaatttgaaagggttatatattgtatgattttaattatgtgatattttggaaaagataaaattgtatagatagtagaaagataagtagttgtttggggttttaggggtagggaggaaggagggataattaggtggagtgtagagggtttttaaggtggtaaaattatttttttatgatattgtaatgatggatatatgatattatatatttttaaaatttataaaatgtagaatattaaaggttgattttaatgttagttatgtattttagttaataataatgtattaatattggttaattagttgttataaatgtattttattaatgtaagatgttagtaataggggaaattggttatcgggggagtatttgggaattttgtatattttgtttagttttttttaaaattattttaaatttgttaagattttattttaaggtttattgataaatgataagaaaaaaattatgtaaattggagttttaaaaattagtatttgtgattattaatttataaaataaattggaatagaatttatggtttgtttgttaaaaaatgagttttgtttgaaagataaaagggcgatattatagaaatggaaaatattgtgtttgaggttgtgtatggtgtagtggaaggttatagtttaggggttggttattttgtgtttgagttttttttagttcgtttttgagaagtattgggattttaaattagttataattaagtttcggattttatatttgtaaagtgaggatagggagatttatttgatggggttgttgtgaaggtgaagagagaggaagtttgttaaagtaattaaataatattcggtatgtggagttttgtgtttcgttttgtttcgaaattttttttggtgttgatttgaatgtttttttttgattcggttaatagttgtgttatttttggttagtgatttgtggttgggttgttagtcgatgataggtagttttttaagtaggttataataaggtggtaattgattttgtttttcgaggatgtttgttcgggttttgttagaagttaagggttttttgatgtggggtttcggttttatattgtggtattttgaataattttttatgggttggtaaaaggcgttttatattttagataggttttaggaggatgatttgttttttttaaggagaattgagaatttttagatgattggaaggttttgtatttttattttagtattttcgatagatttttttatatgtggtaaatatagttatagttggaggtttattgtcggttgttaataggtagtgaattgttgttgaattagatagtttacgtatagggtatttttattattatagaaagttttgttggttagagtatttaaagtatattcggtttttttttttagttattttgtttattttttgtttgtatttttttttggtatttgtgttgttgttattttagttttagtttttaatgtttaataatattttgatagattaatagagttgtgttttagtaggtttaatattatgttgtatttttggttttttaaatggtagagttatttttttgtttggtgtttaaggttttattagggttttgatcgtttgtgttattttatagtttttattttttaggatatgtcgaggagtgtatggagtgtatatatagattgtttgttgtttattgagtaagttttgttagtttgtgttaggtttgttttataatttattttttatttgttttggttaaatttttttttattgtgtatttgttttttatatattattagagataattttttttttaggtaaatatttgaatattttaggttttttttttacgtgatatttagtatattttgttttatatgtaatttgtttgtttgtattttttagttttgtttttttttggagtgtttgtttttttaggaataggtgttttaggtttttttttgtgtaggttagtttagtaatatataattattaagtaatatatatttggtaaattgtaagatgttttttttaagatataatttttaaattttttttttaagaagtttttttttaaatttttataggaataagttagtatatttgtattgattttatattgggagattatagaatcgtttttttaagtaattttttttttttgtattagttttttgtttttgtgtttttagattaatatttagttatattagttgagtgtttttttttgtagattaggaggattgggttgtgtattagatattgtttatgtttagttcgtattttttaggcgttattatttagtatgtattattagagttttttattgtttgaatttgaatttttttgtttgagggttttgggagatttttttaatttttaagaggattatattatttgttttttaaagtagattagaagttttaggagaatgaagatttttgagaaaagtttttgattaagaattgatgag

SEQ ID NO: 1745 - DNA, 2486 bp, Artificial Sequence
  chemically treated genomic DNA (Homo sapiens)
tttattagtttttggttaaggattttttttaggggtttttatttttttggaatttttggtttgttttgaggggtaggtggtgtggtttttttagggattggagaagttttttagaatttttaggtaaagagatttaggtttaggtaatgggaggttttgataatatatattaagtagtaacgtttaagagatacgaattaggtatggatagtgtttaatatataatttaatttttttagtttgtagaaggggatatttagttagtgtggttgaatgttagtttagaggtatagagataggagattgatgtaaggagagaggattgtttgagggagcgattttgtagttttttaatgtggagttaatgtaagtatgttggtttgtttttatggaagtttaggaaagaattttttagagaagaaatttagaaattgtattttggaaaaagtattttataatttattaagtatgtattgtttggtaattatgtattgttgggttagtttatatagaagaaggtttagagtatttgtttttaaaggaataagtattttaggaagaagtaaggttgggggatgtagatagataaattgtatatgaagtaggatatgttgggtgttacgtggaagggaaatttgaagtatttaggtgtttatttgagggagaaattgtttttggtgatatataagaagtagatatataatggagaagagtttgattagggtagatggagagtggattgtgaaatagatttagtatagattgataaagtttatttaataaatagtaagtagtttgtgtgtgtattttatgtatttttcggtatattttggaggatggagattgtaaggtgatataggcggttagggttttgatgaggttttaagtattaagtagaggagtagttttgttatttgagaggttagagatataatatgatgttagatttgttaaaatataattttattgatttattaggatgttattaggtattgggggttggaattggggtggtagtagtataaatattaaggaggaatgtaagtaagagataaatagggtggttagggggagaggtcgaatatgttttagatgttttgattaatagaattttttgtgatgatggaaatgttttatacgtggattgtttgatttagtaatagtttattgtttgttaataatcgataatggatttttagttatgattgtgtttgttatatgtgggagaatttatcggaggtgttaaaatgagagtatagaattttttaattatttgagaatttttagttttttttgaagaaagtaaattatttttttggggtttatttgaagtgtgaaacgttttttgttagtttataaagaattgtttagagtgttatagtgtgaaatcgaaattttatattagggagtttttggtttttagtagaattcgaatagatattttcggggagtaaggttaattgttattttgttgtgatttgtttggggaattgtttgttatcggttggtagtttagttatagattattagttaaaaatggtataattgttgatcgaattagagagaaatatttaggttagtattaggaaaggtttcgaagtagggcgaggtatagagttttatatgtcgggtgttgtttaattgttttgatagattttttttttttttatttttataataattttattaagtaggtttttttatttttattttgtagatgtgaagttcgaagtttagttgtaattaatttgaagttttagtattttttagaaacgggttggaggggatttaaatatagagtgattagtttttgaattgtggttttttattatattatgtataattttaaatatagtattttttatttttataatgtcgtttttttgttttttaaatagaatttattttttaataagtaaattatgaattttgttttaatttattttgtaagttaataattataaatattaatttttaaaattttaatttatataattttttttttgttatttgttaatagattttaaaataaggttttaataaatttagagtggttttgggaaaagttgaatagaatgtatagagtttttaaatgttttttcgataattagttttttttattattaatattttgtattggtgaggtatatttgtaataattgattaattaatattgatatattattattaattgaggtgtatggttaatattagggttagtttttgatgttttatattttatgagttttgaaaatatgtaatgttatgtatttattattatagtattataagagaatagttttgttattttaaaaattttttatattttatttagttattttttttttttttttatttttggagttttaagtaattatttatttttttattgtttgtatagttttattttttttaaaatgttatatagttggaattatataatatataatttttttaaattggttttttttgttgagtaatatgta

SEQ ID NO: 1746 - DNA, 2457 bp, Artificial Sequence
  chemically treated genomic DNA (Homo sapiens)
aatttttttttttttttttttattaaaatataaaaatttaagagattttttattaatgtttttttacgtggtttgttagaatgtatatttgtttgttataatttagttaatgaataatgaaatttatttaagatgttttttgtaaaaattagagttgatgatgtgttattatattagtgattttatagaataggatttatgtgattaatttatgtatgagtttgggggttttcgggaaaataagttatgttatttttgtagattaattgtggtttttttttagtagataaaattgatgtggtttagtaggtttttttttgttatagatgttagaaaatgtataggtaaagtagttgtttaattgtatttagtagtttttttttgtgatgtaatagaattttacgttattttttttgggtttgtgtttttattattggaagtatattagaattattggagagttttttaaataatatagtgaaatttaggttttattttaggataattaaattagaatttttgtatgtagtttgagaaatgatattttttaaagttttttaggagttttttttgtgtatttagggtgagttagttttttttaggtagttattttttttgtttttttagttgttttattttgtatttgatttttttgtgaattgtttaaggtttatttagaagtatattgggataaattttaaataaaattttatagtgtgtttgttagataaagtataaatgtatttttattatgtagagaagtttggttttttttgaatgtaggagtttaaataataaatttgaatagaatttttgtgaagtgttaaataatgttattattttaggttgattttttttatatttattttttgtaatagtttttttagttatatcgtttgattgttataggaaaggatgttgtagattttttttgagtggtgattaagtgaaatgtattaaagaaatgaggatagtgagtaattaagatgtttgaagtaatattggaaagggagttaggtttgagttatttttttttgtagttagtgtgtagtggaagtggttcgtgggtgttttatatttggattggagagtaaagtataattttagcgttaagggaagttttttatgtttttggaatagtgttttatatttttttgaaaaggtaataaaatatgtgtattcgttgattaggaataaatgttaaagcgtttattatgatggaagtgttcgatttttatggttttgataagtcgttataggattttatgaatttttaatggttggtttatatttaggggtttttagtttttgagggtggtaaaaggtttatagagatgttatttttttagtatattggtttttgttaagatcggtgtttatttaaagtatttttcgtttttcgaatgtatagagattttgttgataataagaaatttttttgggtttgaaattagatgaaaagattttttatttagaaagtgtttattaatttatttaaaaatatgatttggattatttattatatgttagggtttattttgggtatattgaggaataagatagggtttttgatttttgagtttgtattttagttaggggatataggtattaggtaagaaaataaataatcgaggtaatgatagtatagggtaattgttatgaaaagaataagtcgggtaatcggatattatttaagtatagtagtgatatgagtttatttgtattttgaaagattattttagttgttggatgggaaaaatggattgtagggggataaaagtaaaagtcgggaaattaattaagaggttattgagtggtttagggaagagatggtagtggtgatagagatagaagagagtagatgtgtaatatatatttgagaatgaaagagaatgtgttggtgattgggatagaatcgtagaaagaaaagaagtaagaaaaattttaaacgggtggtttaattatttggtggattgtgatagtattttttgagatagagaagattgggttgtatatataaagaatagatttgggggaaattttaagtgtatagttatttaaattatttaagtatggttattatttaagggtagatatgtttagagtttggttagaggttaagtttggagatatttattttggagatataagtttgtaagtggtattgaaagttagagttgatttggaaagataatttagttagaaaatgagttttttgaggttaggtatggtggtttatgtttgtaattttagtattttgagagttcgaggagtgtggattatttgaggttaggaagtcgagattagtttggttaatatggtgaaattttatttttattaaaaatataaaaattagttgggcgtagtggtgtacgtttgtaattttagttatttgtgaagttgaggaacgagaatagtttgaatttgggaggtggaggttgtagtgagttgagatta

SEQ ID NO: 1747 - DNA, 2457 bp, Artificial Sequence
  chemically treated genomic DNA (Homo sapiens)
tgattttagtttattgtaatttttattttttaggtttaagttattttcgttttttagttttataagtagttgggattataggcgtgtattattacgtttagttaatttttgtatttttagtggagatggggttttattatgttggttaggttggtttcgattttttgattttaggtgatttatatttttcgggtttttaaagtgttaggattataggtatgagttattatgtttagttttaaagggtttattttttaattgagttgtttttttaggttagttttagtttttagtattatttataagtttatgtttttaaagtgagtatttttaggtttgatttttagttagattttaggtatatttatttttagataatagttatatttggataatttagatgattgtatatttgaaattttttttaaatttattttttatatgtataatttagttttttttgttttaggaaatgttgttataatttattaagtggttaagttattcgtttggagttttttttgttttttttttttttgcgattttgttttaattattagtatatttttttttatttttaaatatatgttgtatatttgtttttttttatttttattattattattattttttttttggattatttaatggttttttaattgatttttcggtttttgtttttatttttttataatttattttttttatttaatagttagagtgattttttaaaatgtaaataagtttatgttattgttgtgtttaaatgatattcgattgttcggtttattttttttatagtaattattttgtattgttattatttcgattatttgtttttttatttagtgtttgtattttttaattagaatgtaagtttagaggttagggattttgttttattttttagtgtgtttagaataagttttgatatgtagtggatgatttagattatatttttaaataaattaataaatattttttgagtgggaggtttttttatttaattttaggtttaagaaagttttttgttgttagtagaatttttgtatattcgaaagacgagaggtgttttaaatagatatcggttttggtagaagttagtgtgttaggagaatagtatttttgtggattttttattatttttagaaattgaaagtttttaaatataggttagttattaaagatttatgagattttgtggcgatttattagagttatggaaatcggatatttttattatggtggacgttttgatatttgtttttaattagcgaatgtatatattttattatttttttagggaagtatggggtattattttagaagtataagaggttttttttagcgttgggattatgttttgttttttaatttaaatatggaatatttacgagttatttttattgtatattggttgtaaaaagaggtggtttagatttgattttttttttagtgttgttttaggtattttagttgtttattgtttttatttttttggtgtattttatttaattattatttaggagaggtttgtagtatttttttttgtggtaattagacggtgtggttaaaagaattattgtagggaataggtatgggaggaattaatttgaaataatgatattatttgatattttatagaaattttatttagatttattatttagatttttatatttaagaaaagttaaatttttttatatagtgaaaatatatttgtattttgtttaataaatatattatagaattttatttaaggtttattttagtgtatttttaaatggattttgggtagtttataaggaaattaaatataaaataagatagttggggagataaggagaatgattatttaaagaggattggtttattttggatatatagaagaagtttttagagggttttaaaagatgttattttttaggttgtatgtagagattttggtttaattattttgggatgaggtttgggttttattgtgttatttggaaagttttttagtgattttaatgtgtttttagtggtagaagtataagtttagagaaagtagcgtgagattttattatattatagagaggaattgttgagtgtaattgggtagttattttgtttgtatattttttgatatttatgataaaggggaatttgttgagttatattaattttgtttgttaagaggaggttatagttggtttgtagagataatataatttgttttttcggaagtttttagatttatgtatgagttgattatatggattttgttttatagaattattaatataatggtatattattaattttggtttttgtaggaagtattttaaataaattttattgtttattggttggattgtagtaaataaatgtgtattttagtaaattacgtgaaagaatattagtaaaaagttttttgagtttttgtgttttgataaaaaaaaaaaaaaaaaaatt

SEQ ID NO: 1748 - DNA, 2431 bp, Artificial Sequence
  chemically treated genomic DNA (Homo sapiens)
ggttaaatattaatttaaatattaaatattaatttatttgtttatttttatttttttttaatgtgtttattagaaaatttgaaatgatatttgtggtttgtattatttttttgttggatgtaattagtatagagtttttaaggtttaatgtagtatttattttagggatatttgtagttgaagtaatgatttttattttaaagttaaagaataaattttgtattgtaatatttatgatggaagagagaatttgggagataaattaagtaagtaataagttatatgtttttgaggttagttttatttaggatgtaaggtaaatgttgagtgagattattgtgggattaaatgagtgaatatatagtaagtatttgaaattatgtcgtcgttatcgttatttggatttttgggatttgtgttgtttgttttttgggagtttttaagtttatgaattaaaatatggttttttttttgcgtttttagttatcgtataatttttttcgagtgtttttgagttatatattattcgatagaagtggggataaggtatatagaagtgttattggttttataaagttgtttagaaaattatttaaaaaataagaaatttaggtagtatttgtgttgttttgatataggtattagtattatttttattagttagttagtttatatttgtattgtttttagaatttgaagatttgtttataagtataggggtatcgagttgagtggattaatgtgtggatgtttgaattatttatttattatttaggttattttaaaagttttagaaggaggagataaagtttttttaaaatttggaagatttaattggaaagttttgttagaattttgttattgtgagtttttagtttttaggttttttggattttaagagtaatatttgattttgattttgggaatgttgaataaaataagttaatggattttgaacgtggtatttgttttttattttttaaatttataagagtattttttttttttgttatatgaatagagtagtagttgttgatttaagagcgtcgggaaaagggtgattgttttttatttggtatagatatttttgaggataagattattgagttaataatcgattttatttttttgtaggttttttcgtagtttattcgtgagggtaggaggaagggcgggtgttttggatttatttatagtttttgtttttttaaataattgtgagtaaggaggatagaaggcggtaaacggagttagtgagatagtttaaatgtcgtttgggtgttgtattatttagatataaaatattaattttaaatgttaggttgttttgtgtttgtggatgtttcgaaattttttttttattttgtgttgatttagttcgaatattgatttagtttttaattcgtgttttttttttttttgtagtttttgaatacgttgtttatgtatttttttgtggtcgtggatgagtattttgttggttgttgtaaagagatttttcggtgagtggatatggtcgtgtagtggtgaatatgaaagagattgtgtggatagttttgaaatattttttaaaagatatgaaattttttggggtgtttaatttgtttgtaatttgtggttatattaaaatatttattttgaatagtaatgatatttttgaaaggagatagttttttgaatttattgtttattttgtacgttgttattatttgaggtaaatagatagtgtagtaatttaaagaaatggatttaggttgaggggagtaggagaagaattaagtgtcgtaagtttggatatttttaaaaattgtttttttttattttatttttagaaatgtttattaatatgatagattttaaagtattttgaataataggatgtatggaaaatgattagtagggttatcgagttatggcgatgtgtttttgatagtttttgatagtttgtatagatatttgggggtggtggttatagtttttaagttattttgtaatgttatattagatcgtttagatgttaggttaaaggttaatattagtagaaatttggtgtgttatatgaatatggtattttttattttttttgtttttatgggatagatcgaaaaggggttttttagaatttaaggaaaagtagagaagaaaaagaaattgttttgaggttgtttttgttattgtaggtggggagtaaaggagtttatgtggatttaggaatattttatttttttagtgatagtatttgtttttattaagtgttagttgatgggattgttttgttagtaatattgttttattttttttttttttattagaatcgtgtataaggtagtgttagagttgtattttatattttttatcgtgttattttatatgagtttaggtaaggttcgtttaattatttttggttttcggtagtaaatattgaaaattt

SEQ ID NO: 1749 - DNA, 2431 bp, Artificial Sequence
  chemically treated genomic DNA (Homo sapiens)
gaatttttaatgtttgttatcggggattagaggtggttgggcgggttttatttaggtttatgtaggatggtacgatgagaaatatgaagtgtagttttggtattgttttatatacggttttggtgaggaaagagagggtggggtagtgttattaataaagtaattttattagttggtatttgatgaagataaatgttgttattaaaaaggtgaggtgtttttaaatttatatgggtttttttgttttttatttgtaatggtaagaatagttttaaggtaattttttttttttttttatttttttttgggttttaaagggttttttttcgatttgttttatggaggtagagagaataaagggtgttatgtttatatggtatattagatttttgttaatattaatttttgatttggtatttggacggtttggtgtgatattataaagtgatttgaaagttgtgattattatttttaaatgtttgtgtaggttgttagaggttgttagagatatatcgttatgattcggtagttttgttggttattttttatgtattttattatttaggatgttttgaagtttgttatgttaataaatatttttaaagataagataaagaaaagtagtttttagaaatgtttaagtttgcgatatttaattttttttttattttttttaatttaaatttatttttttaaattattgtattatttgtttgttttaaatgataatagcgtgtagaatggataatagatttaaagaattatttttttttagaaatattattgttatttaaagtaaatattttaatatagttataaattataagtaaattaaatattttaaagaattttatgttttttaaaaaatattttaaaattatttatatagttttttttatgtttattattgtacggttatatttatttatcgaagaatttttttgtaatagttaatagaatatttatttacggttataaagaggtgtatgaataacgtatttaggggttgtagaagaagagagaatacggattaaaggttgagttagtattcgggttaggttagtatagggtggaaagagggtttcggggtatttatagatatagaatagtttggtatttagggttgatattttatgtttaagtgatgtaatatttaggcggtatttgagttgttttattgatttcgtttgtcgttttttgttttttttatttataattatttaaggaaatagggattgtaaatgagtttagagtattcgtttttttttttgtttttacgaatgagttgcgggagagtttgtaggggagtgaaatcgattattaatttagtagttttgtttttaggggtgtttatgttaagtgaaagataattatttttttttcggcgtttttgagttagtagttgttgttttatttatgtgataggagggagagatgtttttatgaatttgaaaaatggaaggtagatgttacgtttagaatttattggtttgttttgtttaatatttttagagttagaattaaatattatttttgggatttaaaaaatttgggagttgaaaatttatagtagtaagattttagtaagattttttagttaaattttttaagttttaaaagagttttgttttttttttttgagatttttaaagtggtttaaataatgagtaaatggtttaaatatttatatattggtttatttaattcggtatttttgtgtttatgaataaatttttaaattttggaaatagtgtagatgtagattggttgattggtgagggtggtgttggtatttatattaggatagtataggtgttgtttaggttttttgttttttgaataattttttggatagttttgtgggattagtggtatttttgtgtgttttgtttttatttttgtcggatggtgtgtgatttagaagtattcggaaagaattgtacggtgattaaaagcgtaagaggaaaattatgttttgatttatgagtttgaaaatttttaaaaggtaaataatataaattttaaaagtttagataacgatgacgacgatatgattttaagtatttgttgtgtatttatttatttaattttataataattttatttagtatttgttttatattttgaataggattagttttaggagtatatggtttattatttgtttgatttgttttttaaatttttttttttattataaatattataatgtaagatttattttttagttttaagataaaaattattattttagttgtaaatatttttgggatagatattgtattaagttttaaaggttttatattggttatatttagtagaaaagtaatgtaagttataaatgttattttaaattttttagtagatatattaaaaaagaataaagataaataggtgaattaatgtttaatatttaagttaatatttaatt

SEQ ID NO: 1750 - DNA, 2402 bp, Artificial Sequence
  chemically treated genomic DNA (Homo sapiens)
ggtaattattgttaattagaggaaatagaaagaagtttattaagtttgtttttttgaatagttatggtagttttaggttaggtatgtagtatgtttgagggtaaggttgtgttttgtgggaaatttttattattgaaagggtttttagttataaggattttttttggtttgatagttagtttggaggagtttggggttattattttatataagttttttgttataattgtattttggtttattttgatatttggtgtttattttaagttgaggttttagggaagggtagttggaggttagcggcggtttttagtgatagatgggtagagcgtttgttttggtattatttagggtgtgggtagtagtggttcgagtaggtattattgatttgtaggtagggaaagtttgttaggttagttatgcgtttggtattaggaggagaggattagagttagtagtggttataatgagggtaaaatttttatagtggaatattgttatttaaaagggatgggtggttgtagggttttttggatggaagtataaatgagaaaatatatacgtttttgtaaatggatttgtttgggaagataaggttatagtatatatagttttttagtaatttaaattttatgtgttatgatgtagatatttataggataagtaagaataataaaatttttagttttgttttttagtataagataattgaagatatttgtggtgaaaagtatttttgttattaggaagatagataatagttagtaattaatgtttttttgttgtataagttaaaaagtttattaaatttattttttttttagtgtatatataagaatatatttggatatttttgtaaatttatatttaagaatagtgttttttaaatcggttatttgaaagaaatttaaaggaaaaagtagatatttttataatatgtttttgttttgttgtagtttgtaattgtgaatttttgtaaattgttataattttggatgaatgatgggaatataataggttgtagaattggagaacgttaaatttttgtttttaatggtaaaatatgttttttttatttttattagaatgtgtgatttatgttatttgaaattaaattttaaatataatgagttattagtgtaatagtttattattaatagcggttttataaataatatatttttattatatatatgtagttcgttgtgaagttagtaaaaggtattttaggttatcgaagttttgttgcgttagcgcggttgtagattagaaggatatttttatgtgaattaagatggatgttaattttttttgtcgagagttaggttggtcgtttttttttgtatatatggtagatggattggttaattagcgtttgttgagttttgggtttgaaattatagagaagttagataattgcggttatgtagtttttgtttacgagtgtaaataagataaataattatttgttatttgggaaaaaaattaaaatgtttattttggatttttattaaagtgttaatggttttataaaatagttgtgtaaatttaggtttttttagtaagtattattttagggggtttgtaaagaaaggaatatatatgaaaaaattaatttttaaaaattttttttatattttagtattgagaagaaaatagaggaggttttatttttattttgtaaatacgtttgagaataaatgatttttaattgggagatatattcgagaataaatagtagtttaatatttatttttttttttttttttggtgttatttaaaaaattgagtattattgtagttcgattttttgttttaggagattaaagtattttttttgattgggtatttatggaaagatgttgcgtttttgggaatagagaatgtttgtgattattgagttttgttattttttgaatgtaatggttatttaaaagtttgaatatttgagagataggatttagtaaatgtaggtttttaataagagttattagagtttaattagttaattagaatttgtttaaaatttattaataattattttatgtgaaatttaaaggattatgtattttttttttttttttaaattttaaatattttttttgtagaaaataatgaaatatagaattatttaagggatatattaaggagttttagttatagtcgtttttttatgtggaatatgatagaattaaagtttgttgttaatttttaatgttttggtattaattaggtatttggtatttaattaaggtttagattagttagttatttattttttcgtttatgtattatttattaaagattgaaaattatggggacgattgtaagagttttagaattaggtattttagggtgatgggaagtttaatatttgtagattagatttatttggtgaatta

SEQ ID NO: 1751 - DNA, 2402 bp, Artificial Sequence
  chemically treated genomic DNA (Homo sapiens)
tggtttattaggtgggtttgatttgtaaatgttgaattttttattattttgaaatgtttggttttgaagtttttgtagtcgtttttatgatttttagtttttgatgagtaatatataggcgagaagatgagtaattagttgatttgaattttggttgggtattaggtatttgattggtattaaaatattagaaattaataatagattttaattttattatattttatatggagagacggttgtgattgaaattttttaatatattttttaagtaattttgtattttattgttttttgtaaggaaagtatttaaaatttaaaaagagagagaaaatatatagttttttaaattttatataaaataattattagtagattttaagtaaattttggttgattgattagattttgatagtttttattagaaatttgtatttattgggttttattttttaagtgtttagatttttagataattattgtatttagaaagtagtagaatttaataattataggtattttttatttttaagaacgtagtatttttttataaatgtttagttagagaaaatgttttaattttttaaaatagagaatcgggttataataatatttagttttttaaatgatattaaaaaaaaaaaaaaaaataggtattaaattattatttgttttcgaatatgttttttagttaaaaattatttgtttttaaacgtgtttgtaaaataaaagtgagattttttttattttttttttaatattgaaatatgaggggaatttttaaaaattaatttttttatgtatatttttttttttataggttttttaaaatgatatttgttgaaaaagtttggatttatatagttgttttataaagttattgatattttaataaaagtttaaaataaatattttaattttttttttaaataataagtgattgtttgttttgtttgtattcgtgaataaaggttgtatagtcgtagttgtttagtttttttgtaattttaggtttaagatttagtagacgttgattaattaatttatttattatatgtgtagaaagagacggttagtttgattttcggtagggaaaattggtatttattttggtttatatggagatgtttttttaatttatagtcgcgttggcgtaataaaatttcgatggtttgaaatattttttgttggttttatagcgagttgtatgtgtatgataagaatgtattatttataagatcgttgttagtaatgagttattatattaatggtttattgtgtttggaatttgattttaaatggtatggattatatattttgatgaaaatgagaaaaatatgttttgttattaggaataaagatttaacgttttttaattttataatttgttatatttttattatttatttagggttgtaataatttataaaagtttataattatagattataatagagtaaggatatattgtggaagtgtttgtttttttttttgagttttttttaaataatcgatttgagaaatattatttttaaatatgaatttgtaggagtatttaaatgtatttttgtgtatgtattgaaaaaaaaatggatttaatggattttttaatttgtataatagaaaggtattgattgttggttgttatttatttttttggtgatagaagtattttttattataagtgtttttaattattttatattggagaataaaattgaaggttttgttgtttttgtttgttttgtaaatatttatattatgatatataaggtttagattgttagaaaattatgtgtattgtggttttgtttttttaaataggtttatttatagaaacgtgtgtatttttttatttatgtttttatttaaaaagttttatagttatttattttttttgggtgataatattttattgtgagggttttgtttttattgtgattattgttggttttgattttttttttttgatgttaagcgtatggttgatttggtaggttttttttgtttgtaggttagtggtgtttattcggattattgttgtttatattttggatgatgttaaagtagacgttttgtttatttgttattaggagtcgtcgttggtttttaattatttttttttaaaattttagtttggagtaaatattagatgttaaggtaagttagggtatagttatgataaggaatttgtatgaagtgatggttttaaatttttttaaattagttattaagttaaagaaagtttttgtaattaaaaatttttttagtagtaagggttttttatagggtatagttttgtttttaggtatgttgtatgtttggtttggaattgttatggttgtttagaaagataaatttgatggatttttttttgttttttttggttgatagtggttgtt

SEQ ID NO: 1752 - DNA, 2471 bp, Artificial Sequence
  chemically treated genomic DNA (Homo sapiens)
tggattaattttattatattgtaatggtttgtattttaaatgtaaggataatattaaatttttagttggttattattttttttttttttttaggttttttgaattaaaatattaagaaagcgatttgtttaatttattttgttagaatttatagttaaatttattaaatgtgtaaatattttataagaaagtttataaggtatgttaataattatatttatgtattataagtgtattatttttttaaaaaattaaaaaaattatttttgattttataaagtgaattaaaatggtttgtatgttttttatttaaaaataaaggtgatatttttaggatattaaatgatattttagaagtttatgttgaaaatgagttaataaagttaattaatttatattaaatattaaagaaatatattttttttttttgaaagttataagatattaaatttattggtttttttatattaaaatttttagtttaattttttaaagtagtgttttttatggataaatataaatgttagtattaagagttatttttatatataaaattgaaaattttacgtatatggagattagaataaaaaatgatgtaaatatttaatatgaagtgatttttggtatttgcgtttttttaatagaaaagagggttttttttatgttaggttttgtaatagttagaatgggatttttatgaatttaggagttgatttataatgtatttattttgagaataataagtatgttaaatttggaatttattaagtattttttttttatagtagtaataataaaaaataatagtaataataataataataatagttaatatttaagtagtttttattttggattaggtattgtttgaagtattttttatttattagtttatttaatttttataattttaattttttagattaggttataaattttaatatgaataataaatttgttgtttattattttaaagttttaaaagagagtttttagaagggtaatttttagtttttttaggagaataatttgaaatgaaaatgaagattatatatattattaagttgaaaaatataatgttattttttttgagggatggtttaatatgttaatgtttaatttaagaattttaaaaacgtttttttattagtaattttaaaataaaaataagtcgttatataaagtatggttaaaatattattaaaggtatgataaggatcgaaattgtagttaatttagtatatagtatatagattattggattgttttagttttttttatgattaatattaattgatatggttgaattgattttgtagtaaggtgttttaattgttgaaatttattacgtgggtcgtgttttagagtttcggttttttcgtggatatgtttgtaattttgtaggattgattttattagtatagttagaggtttggtaagtgttcgatattaggtaaggttggattttatatttacggttttttataaaatgttagatgtgatatggggtttttttaatttttattattaattaatataattaaaattttaagatataattttttaaaagtataaaatttagaaaatttaaaatatttataaaataataaatttgatattataatttttaaagaggtttagtaatataataatataattttgtgtttatgatgaaaaattttttgaaaattttaatttatatttaatttttataaagtatgtataatttagatatatgtaagatatttaataattggatgagagttttttttaatatatttgtattattgatttttaatgataatgaattatatggtaaatgttttatgagttagtataataatgtaatgaaaacgtattttaggttttttcgttatcgcgatgaagaatatgtgattttttattgggtaaataatgattgaaatatttttaaaggtagttgggataatatttttgcggtagtttttggagtgtttagattagacgatatggatttcgttattttttaagtgacgaagttgtaatagtaaattgattgtttattaattagggtgataatagtagtttatgaggggttatggtttataaattgaattataaaatttaaaggttaaaaaaattttattattaaaaaaggttataatattgatgtttttttgtgaggattttaaaaagtataagtgtataaaaatatagtttgtttttttaatgtgttggtattaagataaggtatgttagtttcgtaggtatattatagttggatggggttgaggtttttgtaagaatttattttttaatggaattttatttttgcgttagagttttgtgttttatattgttgaatatgtttttaaataattaataatacgtgttttttattttatattgtagttgtgttttataagatttttaatttaatggttattatgaaaataagaatatgaatataagagaatataagttattataat

SEQ ID NO: 1753 - DNA, 2471 bp, Artificial Sequence
  chemically treated genomic DNA (Homo sapiens)
gttgtagtggtttatgtttttttatgtttatatttttatttttataataattattgaattgagaattttataaagtataattgtaatgtggaataaaagatacgtgttgttaattgtttagaaatatatttagtaatataaagtataggattttgacgtaggagtaaaattttattagaaaataaatttttataaaggttttagttttatttagttgtaatgtgtttgcgaagttagtatgttttattttggtattaatatattaagaagataggttgtgtttttatgtatttgtgttttttaaaatttttatagaagaatattaatgttgtagttttttttggtagtgaaatttttttggtttttgagttttataatttaatttgtaagttatgattttttataaattgttgttattattttgattaataaatagttaatttgttgttgtagtttcgttatttggggaatgacgaggtttatatcgtttggtttgaatattttagagattatcgtaggggtattattttaattgtttttggagatgttttaattattatttatttaatgaagaattatatgttttttatcgcgataacgaagaaatttgaggtacgtttttattgtattgttgtattgatttataaagtatttgttatgtgatttattgttattgaaaattagtgatataaatatgttaaaggggatttttatttagttgttgaatgttttatatatatttgaattatgtatgttttataggaattaaatatgaattgggatttttaaagaattttttattatgagtataaaattgtattattgtattattaggtttttttggaaattataatgttaaatttattattttgtaaatgttttaagttttttaaattttgtatttttgaaaaattgtattttgaaattttggttatgttgattaataataagagttgaaggaattttatattatatttagtattttgtggagaatcgtgggtatggaatttagttttgtttggtgtcgggtatttgttaagtttttgattgtgttaatggggttaattttgtagaattgtaggtatgtttacgaagaggtcgggattttggagtacggtttacgtgatgagttttaataattggagtattttgttgtagaattaatttagttatgttaattggtattgattatgggaagagttggaataatttaatgatttgtgtgttgtgtattaaattggttgtagtttcgatttttgttatatttttagtggtattttagttatgttttatgtagcgatttgtttttgttttagaattattaatagaagggcgtttttaaagtttttaaattaaatattagtatattaagttattttttaagaggaatgatattgtgttttttagtttgatagtatgtataatttttatttttattttaagttgtttttttgaaggagttgaaagttatttttttgaaaatttttttttaaagttttgaaataataggtaatagatttattgtttatattgggatttatgatttaatttaaagggttaaagttgtgaggattaaatgagttaataaatagaaagtgttttaaatagtgtttggtttagagtaaaagttatttaagtgttagttattattattattattgttgttgttgttttttgttattattattatggagagagaatatttaatgaattttaagtttaatatgtttattatttttagaatagatgtattgtgggttaatttttgaatttataaaagttttattttggttgttgtaaagtttgatataaagggaatttttttttttattgagggaacgtagatgttaaaagttattttatattaaatatttgtattattttttattttgatttttatgtgcgtgaagtttttagttttgtgtatgaaaatggtttttagtgttaatatttgtatttgtttatgaagagtattattttaaagaattaaattgaaaattttaatataagagaattagtgaatttagtgttttatagtttttaaaaagaggaaatgtgtttttttaatatttagtatggattaattggttttattagtttatttttaatatgggtttttaaaatgttatttaatgttttaaaaatgttatttttatttttaagtaaaaaatatgtaagttattttaatttattttatagaattaaaagtgatttttttgattttttaaaaagatagtatatttataatgtatgaatataattattaatatattttgtaaatttttttataaaatgtttgtatatttaatgaatttggttataaattttgataagatgaattgagtaaatcgtttttttaatattttaatttaaaaagtttaaagggaagaagagaataatggttaattggaaatttagtattatttttatatttaaagtataaattattataatgtaataaaattaattta

SEQ ID NO: 1754 - DNA, 2499 bp, Artificial Sequence
  chemically treated genomic DNA (Homo sapiens)
tatttaatttttgtttgtggtagattaggggtttattattggatagtatttatgttatttatggttaggttatatttttgaagttatttgtgtaagcgtgtttgtgtgtgtgtgtgtgtaataggaattagtaagaaaattataaattataaatttatgtagttgttggttatgtatattaattaaaatatatattgaagtatagtcgtgtcgttttatgatgaggatatattttaagaaatgtgttgttaggtaatttatgattattttgtgaatattatagagtgatttatataaatttagatggtagatgtttattatatatttaggatataaatgtgtataatatgttattatatcgaatagtgtaggtaattgtaatataatggaaattgtttgtatattaaattatatttagtatagaaaaggtttagtaaaaatatagtattataattttataggattattattatatatgtggtttgttattgattgaaatgttatatgattatattatagtaacgtgatttatagttatataatttattatagttttaatataagagtaagaagtaaaatttttatatatatatatatatatatatataaaattttagtttttttttttagattttagtatggttatttaaaaaatttttaaaaataattttgatttaattttattagtattatattagagtaaagtagtagtaatatgttaaattttaatatgtttagtttgttataataaaaattattttatttaataatttatttttttaaaaaattttgtatgtgtttataaattattttttttaagatttttttttttttatatgggttttagtttttataaattttgatatttatatttttaaaattattgtataatgtttaatttagtagagtttatatatggtaaatagtttagtaagtattaatttaaagttttagtattttagtagattttttttttatattagaaataaatagataaatagataagtgaaaaaggaaggaaggaagaaaaaaaaatatgaattatgttttttttaggttaatgtttaagtttgttttaattacgttttttgatatattttaaggtttatattagttaaggtaaatattttaagggatcgagtagatggatgttgtagtttagaaagtgtgtggtaaatttaggatttaagagtggaataaaagatttattttttttataattaagtttttgattaatgttttaggttttttagtatatatttgtaattatttatagaggtatttattgtgttgggatttgtttcggaatattaggtattaagttattcggtagtagatggaagtatatttttgttgatatatgttgtaatgaaaggattcgtgtaaatttggttagtaaggtagtagaatgttatgtatttgaagattaataatgtaaataattatgatgttaattttgttatgtttgtgttaattttatttgttgagatgtggaattaaattttgaagtttgtgggttttaaaaatttttagtatatatttgaattaaataagtttttttttattattggaatttagagttttaattaaaaaatgtttttttaggttaaatttatgggaattatgaattaaattttttaataagttaatattataatttgtaaatgaatttattttgtattgtaagatttgtatgtgtaaaggtaataatttgtaaaatggggtatttaaaaaatatgattaagttgttatattgatgttaaagatagtagataggtatgtagttgagataaagttatatggtttttttattttttggattttagttaattattttaacggaatttgttattatgagtaagaaggttggaaagagagggtaaaataatagatggttagtttattttattttgttatttacgtaagatagcgttttgaggagatatagcgtttgtgtgaagtcgttaaagatagtattgggggagggtaaatgggggggttaaagagggaattatatgattagttagttaaattatggttatatgtttgttttcgttgtttttttatattgaagtggaataattcgaagattgtatttttgtgataatattttaaaattaggaataattacgtggtatttaaagaagagtcgttgtatatttttaatagtgggatatttataaaatgttttatttatttttaatttagtagaattttttttttattatttttattatatattaagatatagttataatagaagtttttgaaaaatataataaaaatttgaaattttttttatagtttttagggttttatatatatatgggaaagaatgatgtttttagatatgagttatttatgtgtaatttttatgttttttgttatttttttgtttaaagtgaatattatttgtttaataggttttttaaagtgatttatgttttaatttttttatttttataggtttttggggaataggcgttatttggttagatg

SEQ ID NO: 1755 - DNA, 2499 bp, Artificial Sequence
  chemically treated genomic DNA (Homo sapiens)
tatttgattaaatagcgtttgttttttaaaaatttatggaaataaaaaaattaaaatatgagttattttgaaaaatttgttaggtaagtaatgtttattttggatagggagatggtaaaaggtatgaggattgtatatgaatgatttatgtttgagagtattatttttttttatgtatatataaagttttggaggttgtgaggaaggttttagatttttattatattttttaaagatttttgttatagttgtgttttaatgtatggtggggatggtgaaagaaggattttattgagttagaaatgagtggggtattttgtggatgttttattattgagaatatgtagcggtttttttttgagtattacgtggttatttttaattttaaaatgttattataaagatatagttttcgagttgttttattttagtgtggagaagtaacggaagtaggtatatggttataatttggttgattggttatatagttttttttttaatttttttatttatttttttttagtgttgtttttggcgattttatataggcgttgtgtttttttagggcgttgttttacgtgggtggtagggtagggtaggttagttatttgttattttgttttttttttttaatttttttgtttatagtagtaggtttcgttgaagtgattggttgaggtttagggggtgagggagttatgtgattttattttagttatatgtttatttgttgtttttagtattagtatagtaatttagttatattttttgaatgttttattttatagattgttgtttttatatatataaattttataatgtaaaatggatttatttataaattgtggtattagtttgttaaaggatttagtttataatttttataaatttagtttagaaaagtattttttaattaaaattttaaattttagtggtgaaaaggggtttatttgatttaagtatgtgttaaagatttttaaagtttataagttttaaggtttagttttatattttaatagatggaattaatataagtataataaagttaatattatggttgtttgtattattaatttttaaatgtatggtattttgttattttgttagttaggtttgtacgaatttttttattgtaatatatgttaatagaaatgtgtttttatttgttgtcggatagtttgatgtttgatatttcgagataagttttagtataatgagtatttttgtgagtaattataggtgtgtgttgaggagtttagggtattaattagaggtttaattatgaaaaaggtggattttttgttttatttttggattttgagtttattatatattttttaaattgtagtatttatttgttcggttttttagaatgtttgttttgattgatatggattttaaagtgtattaaaggacgtgattaaagtaggtttaaatattaatttggaagaagtatggtttatgttttttttttttttttttttttttttttatttatttatttatttgtttatttttgatgtaggaaaaaagtttgttgaaatgttaaaattttaaattagtatttgttaaattatttattatatgtgaattttattgaattaagtattatatagtaattttaagaatgtaaatattaagatttgtagaaattaagatttatgtaaagaaaaaaaagttttaggaaaaatggtttgtgaatatatataaagttttttaggaagataagttgttaaatgaggtaatttttattatgatagattgaatatgttagaatttagtatgttattattgttttgttttaatgtgatattgatagaattaaattaggattatttttaaggattttttagataattatattgaaatttaagaaaagaaattaggattttgtgtgtgtgtgtgtgtgtgtgtgtggagattttgttttttatttttatattgagattataataggttgtataattataagttacgttattatagtatagttatgtaatattttagttagtggtagattatatatatgatggtggttttataagattatagtgttgtgtttttattgaattttttttgtgttagatgtggtttgatatgtagataatttttattgtgttataattgtttatattattcggtatagtaatatgttgtgtatatttgtattttggatgtgtagtaggtatttattatttaggtttgtgtaagttattttatgatgtttataagatgattatagattgtttaatagtatattttttagaatgtatttttattataaagcgatacgattgtattttagtgtgtgttttgattaatgtatatggttaatagttgtataagtttgtggtttgtggtttttttattaatttttgttatatatatatatatataaatacgtttgtatagatggttttagagatgtggtttggttatggatggtatgaatgttgtttagtggtggatttttgatttgttataggtaagaattagata

SEQ ID NO: 1756 - DNA, 2400 bp, Artificial Sequence
  chemically treated genomic DNA (Homo sapiens)
ataaattattttttttaagatttttttttttttatatgggttttagtttttataaattttgatatttatatttttaaaattattgtataatgtttaatttagtagagtttatatatggtaaatagtttagtaagtattaatttaaagttttagtattttagtagattttttttttatattagaaataaatagataaatagataagtgaaaaaggaaggaaggaagaaaaaaaaatatgaattatgttttttttaggttaatgtttaagtttgttttaattacgttttttgatatattttaaggtttatattagttaaggtaaatattttaagggatcgagtagatggatgttgtagtttagaaagtgtgtggtaaatttaggatttaagagtggaataaaagatttattttttttataattaagtttttgattaatgttttaggttttttagtatatatttgtaattatttatagaggtatttattgtgttgggatttgtttcggaatattaggtattaagttattcggtagtagatggaagtatatttttgttgatatatgttgtaatgaaaggattcgtgtaaatttggttagtaaggtagtagaatgttatgtatttgaagattaataatgtaaataattatgatgttaattttgttatgtttgtgttaattttatttgttgagatgtggaattaaattttgaagtttgtgggttttaaaaatttttagtatatatttgaattaaataagtttttttttattattggaatttagagttttaattaaaaaatgtttttttaggttaaatttatgggaattatgaattaaattttttaataagttaatattataatttgtaaatgaatttattttgtattgtaagatttgtatgtgtaaaggtaataatttgtaaaatggggtatttaaaaaatatgattaagttgttatattgatgttaaagatagtagataggtatgtagttgagataaagttatatggtttttttattttttggattttagttaattattttaacggaatttgttattatgagtaagaaggttggaaagagagggtaaaataatagatggttagtttattttattttgttatttacgtaagatagcgttttgaggagatatagcgtttgtgtgaagtcgttaaagatagtattgggggagggtaaatgggggggttaaagagggaattatatgattagttagttaaattatggttatatgtttgttttcgttgtttttttatattgaagtggaataattcgaagattgtatttttgtgataatattttaaaattaggaataattacgtggtatttaaagaagagtcgttgtatatttttaatagtgggatatttataaaatgttttatttatttttaatttagtagaattttttttttattatttttattatatattaagatatagttataatagaagtttttgaaaaatataataaaaatttgaaattttttttatagtttttagggttttatatatatatgggaaagaatgatgtttttagatatgagttatttatgtgtaatttttatgttttttgttatttttttgtttaaagtgaatattatttgtttaataggttttttaaagtgatttatgttttaatttttttatttttataggtttttggggaataggcgttatttggttagatgagtaagttttttagtggtgatttgtgagattttgatgtatttattatttaagtagtaagtattatatttaatttgtagttttttattttttatttttttttatttttttttttaagtttttaaagtttattgtattatttttatgtttttgcgtatttagaatttagtttttatttatgagtgagaatatataatgtttggttttttattttcgagttatttcgtttagaataatggtttaattattttgaaaaatttatgtgtatttttttttataagtaaaaagtaatttaagtaatataatgatagtaattaatgttgttaaatttttgttaaaaatattattttttgatgaagattttgggtttgagagtagttttttttgttgaatataagtatagaatgtaatgttagggtggtgtgaaagaataattttttttaattttagttggtttatttaatagtattataaggatttgtagagaggaggaaaggggttattttttttattgtgtgatttaatgttatttagcgttgtttttattgagatggttagtgagaaacggttttgtattttgacgtggtgaaaagaattttagaatttgagttatgaggtttaggtttaaagttttgtgtgattgtgggtagattatgttatatttagagttttatgtttttttttcgtaaaatgaaatgatattt

SEQ ID NO: 1757 - DNA, 2400 bp, Artificial Sequence
  chemically treated genomic DNA (Homo sapiens)
gagtattattttattttacggaagagaagtatgaagttttgggtatgatatgatttgtttatagttatataaggttttggatttaggttttatggtttaagttttagagttttttttattacgttagagtgtagggtcgttttttattagttattttagtggaggtagcgttgaatagtattgaattatatagtagaaaggatggtttttttttttttttttgtaggtttttgtgatattgttaggtaggttagttggagttgagagaagttatttttttatattattttgatattgtattttgtgtttatatttaataaggagagttgtttttagatttagagtttttattagaggatggtatttttagtaaaaatttagtagtattgattattgttattgtattatttgagttattttttatttatgagaaaggatatatataaattttttagaataattgggttattattttaagcgaagtaattcgggaatggaaaattaaatattgtatgtttttatttataagtgggagttaagttttgagtacgtagaggtataagaataatatagtggattttggggatttgggggaaagggtggaaggggatgagggataaaagattataaattgggtatagtgtttattgtttgggtgatgggtgtattaaaattttataaattattattaaagaatttatttatttgattaaatagcgtttgttttttaaaaatttatggaaataaaaaaattaaaatatgagttattttgaaaaatttgttaggtaagtaatgtttattttggatagggagatggtaaaaggtatgaggattgtatatgaatgatttatgtttgagagtattatttttttttatgtatatataaagttttggaggttgtgaggaaggttttagatttttattatattttttaaagatttttgttatagttgtgttttaatgtatggtggggatggtgaaagaaggattttattgagttagaaatgagtggggtattttgtggatgttttattattgagaatatgtagcggtttttttttgagtattacgtggttatttttaattttaaaatgttattataaagatatagttttcgagttgttttattttagtgtggagaagtaacggaagtaggtatatggttataatttggttgattggttatatagttttttttttaatttttttatttatttttttttagtgttgtttttggcgattttatataggcgttgtgtttttttagggcgttgttttacgtgggtggtagggtagggtaggttagttatttgttattttgttttttttttttaatttttttgtttatagtagtaggtttcgttgaagtgattggttgaggtttagggggtgagggagttatgtgattttattttagttatatgtttatttgttgtttttagtattagtatagtaatttagttatattttttgaatgttttattttatagattgttgtttttatatatataaattttataatgtaaaatggatttatttataaattgtggtattagtttgttaaaggatttagtttataatttttataaatttagtttagaaaagtattttttaattaaaattttaaattttagtggtgaaaaggggtttatttgatttaagtatgtgttaaagatttttaaagtttataagttttaaggtttagttttatattttaatagatggaattaatataagtataataaagttaatattatggttgtttgtattattaatttttaaatgtatggtattttgttattttgttagttaggtttgtacgaatttttttattgtaatatatgttaatagaaatgtgtttttatttgttgtcggatagtttgatgtttgatatttcgagataagttttagtataatgagtatttttgtgagtaattataggtgtgtgttgaggagtttagggtattaattagaggtttaattatgaaaaaggtggattttttgttttatttttggattttgagtttattatatattttttaaattgtagtatttatttgttcggttttttagaatgtttgttttgattgatatggattttaaagtgtattaaaggacgtgattaaagtaggtttaaatattaatttggaagaagtatggtttatgttttttttttttttttttttttttttttatttatttatttatttgtttatttttgatgtaggaaaaaagtttgttgaaatgttaaaattttaaattagtatttgttaaattatttattatatgtgaattttattgaattaagtattatatagtaattttaagaatgtaaatattaagatttgtagaaattaagatttatgtaaagaaaaaaaagttttaggaaaaatggtttgt

SEQ ID NO: 1758 - DNA, 2490 bp, Artificial Sequence
  chemically treated genomic DNA (Homo sapiens)
ttagttaattatttatttttttgagttgtttttttatttataaaatgggtataataattttttaaattataaaaatgttttgaggattaaatgagattatgaatataaagtatttagtagaaggttgggtatttattaagtgtttagtggtagttattattattagtattatttaggttaataagaaataagataaattgaggaattaaaagttttaaaattttaaatttttttttttggattttatttttatattttttttattgaatttagagatagcggttttttttttttattattttggtattttttcgtttattattttttataattgttttttttatggaggtgttaaggagtaataaaatgtttaaaaggtaagagaggaggaaggggaagtttttatttaggaaatttatattttagttagttttggtattagatgtgttttttagtagtgtattaatattaggagggtttatatgggaaggtaatagtagatttttagtattttttttaaattaggattagaattggttttattttgattattattatttttttgggttattgtgttttagggtttagattatttttttttagtaaagtttgtttaatatttttaggtgttgagaggttttttttatagggttttagagtatatatgtatattttttttagaagacggtagcgagttcgtattggaatttatttttttttattagtttgattgtttgagggtttgtattattttttttttatttttatatatttaatatttagaaaaggaattttaattttattttagataggtaaattagttattgaatgtaggttgatttttagggattaatttaggtttaggtagttttggtttaaattgggttcgtagttatttttaagtggggagtcgaaattttaaagtttgatttttttttttgttgaatagaaggggagatgtgtaagaacgatataattttattttagatattaatttagaggaagaggatgggagttattatattgatttttaaaaggggataagagatttatatttatatttttaagtttattatagattattaattacgatgtaatttgttataatagggggattttttttgaagagatggtgttaaaatttgattatgaggtttttttatgtgaagagagaaaagggggtgtttggggattatttacgagaatttggggagggttttaattgtataaattagttgtgggttatagaatgtttgtttagtttattagtatttgttgtttatagtgattatttatttaatagattggtcgtgaataagatgatgggattagcgggtttatgttttagagagttttgtttattattaatatgagttacgttttgtttaggaattattttttttgttgaagaaatattgcgatgtaatatgataaatacgtttttattacgagtgtagatttgtttagaaagatttgtattaaggtggttgtattttgtatgaattatatgttggggaggggtaggtagtattaaaaattagttttatttgagtttttaagttattatggtatatgtgtttgttttattataaattttaaaggtttgtgacgtttggtttttattgtttaagttttttttttttttgtaagggtggaattatttgtttgtaatattagtaattattatgtattttggaattgagtagagagtgtgttcgagtgtgtatgtttagattggagggaattatttttatttttaaagttaaattttattttttttttaatttgaaattatgtattttagtttttggaaagttgggaatggtagttagaaggaaataagttatattaatttggttgatgtgagagaggagtttagttttggaaattttatataaatttagaaagagaatattacgtttttattttttatacgtttattttatttgtttttttgaataagtataaataagatataatagtttagtaggttgttattgaaagagtgagtaatgggtttttaggaaagaggttggtggtggttaaggagtttgtattgatagaattaaaggaggaaagtagtagttatgtgtttattttgatttgtttttaatggggttatgtttttataaagaaaagagttaatattttgattttatttttttatattttttaaaaggtataggaagtttttatttatagttattagtagttttttggataattaaagttgttagtgttatttaggaatttttttggggatttagtttttttttgttttttgtttgaaaatttttttgatttagaaagatttttgggtttgttttatataagtagaaggtttgtttttttagatttgtttttttttagtaaaattgtgaaagaattttattttttttttaaagttgtttttttggttttatattttaattttaataattatagattatagagaagttgatagaatttgtttttataaaataaatataa

SEQ ID NO: 1759 - DNA, 2490 bp, Artificial Sequence
  chemically treated genomic DNA (Homo sapiens)
ttgtgtttgttttatggaaataggttttgttagtttttttatagtttatagttgttaagattaaaatgtgagattagaagagtagttttgaaagagaagtagaatttttttatagttttgttgaggaaggataagtttgaaggaataggttttttgtttatgtaagataaatttaggaatttttttggattagaggagtttttagataaagggtagagagagattagatttttaaaagggtttttaggtaatattagtagttttggttatttaagaggttgttggtgattgtaggtagggattttttgtgttttttgaaaagtgtaggagagtaggattagggtgttggtttttttttttgtgaagatatagttttattaaaagtagattaaggtgagtatatggttgttgttttttttttttggttttattagtataagttttttagttattattagttttttttttagaagtttattatttatttttttagtagtagtttattaaattattgtgttttgtttgtgtttgtttaggagaatagatgaggtggacgtgtgggaggtggggacgtaatgttttttttttgagtttgtgtggagtttttagggttaggttttttttttatattagttaaattgatgtgatttgtttttttttggttgttatttttaattttttagaggttgaggtgtatgattttaaattgaagggggagtagaatttgattttgaaggtaggggtaattttttttaatttaaatatgtatattcgagtatattttttgtttaattttaaggtgtatagtaattgttggtattataaataggtaattttatttttgtaaaggaggaggggatttaaataatgaaagttagacgttataggtttttgaggtttatagtgaagtaggtatatatgttataatgatttgaaggtttaagtgggattagtttttagtgttatttatttttttttagtatgtgatttatgtaaaatgtagttattttaatgtagatttttttagataaatttatattcgtgatggggacgtgtttattatattatatcgtagtgtttttttaataagaggaatggtttttgaataggacgtagtttatgttaatgatgagtaaagttttttggggtatgaattcgttgattttattattttgtttacggttagtttgttggatgaatggttattgtaagtagtaggtgttaatgagttgagtaagtattttgtggtttatagttagtttgtgtagttggagttttttttagattttcgtggataatttttagatatttttttttttttttttatatggaaaagttttatgattaaattttggtattatttttttaaagggaatttttttgttgtagtaggttgtatcgtggttggtaatttgtggtaagtttgggagtatgaatgtgggttttttgtttttttttgagagttagtgtggtaatttttattttttttttttggattagtatttggaatggagttgtgtcgtttttgtatatttttttttttatttaataagagaaagaattagattttaagatttcggttttttatttgggaatggttgcgaatttagtttaaattagaattatttgggtttaggttggtttttgagaattaatttgtatttagtgattagtttatttatttgaaataaagttagggttttttttttagatattaggtatatagagatgaaagagagatgatgtaagtttttagataattaggttggtggagaggagtaaattttaatgcgagttcgttatcgttttttaaaggagatgtgtatatgtattttgaggttttgtaggaggggttttttagtatttaggggtgttggataggttttgttaaagagggatggtttgggttttgagatatagtgatttagagaagtggtggtggttaggatgggattagttttagttttggtttagggaaaatgttaagaatttgttgttgtttttttatatagatttttttgatgttgatgtattgttaagaaatatatttggtattaggattgattaggatgtaaattttttaagtagaggttttttttttttttttttttgttttttgggtattttattgttttttagtatttttatgaggaggataattgtggaaagtagtggacgaggaggtgttagggtaataagaaggaggaatcgttatttttaggtttaatggaaaggatataaaagtgaggtttagaagaaaaagtttgaagttttggggtttttggttttttagtttattttgttttttattagtttagatggtattagtaatagtagttattattaagtatttaatggatgtttagttttttgttgaatgttttatatttatgattttatttaatttttaaaatatttttataatttaggagattattatgtttattttataaatgaggaaatagtttagggaagtaagtaattggttga

SEQ ID NO: 1760 - DNA, 2475 bp, Artificial Sequence
  chemically treated genomic DNA (Homo sapiens)
gttatcgcgttcggtttatggataaggttttgatgttggagaaaggagagtgaataaaataattatgatttttgtttttatggggtttatagatagggagtaattagataattgtataaataaataattatagattttggtaaatgttaagatatttatagagggttagaagaaaatatgttaggtagttttaatttttaggttaagagagataggtattttttgttgagttggaagaggaaattaaggtttaggatagggtaggtgtgtttgttgtcgtttggtgagttagggttgtattaggattagaagttttatttttgattattgaataaaaggtttagttttaggttgatatttattatgatatatttttttatttttttttttgttattttttgattttattttttttggaaaataagttttgattcgtagttttgatatttgacgtttataaatttttaaattttatttttattatttttttatttttattttatatagagtgtagtttagttaggttggtaagggttgttggttagggttagatgattagaaagtgtagaggaggagagaatttggggtttttaggttgggagtagttagggaagggttaagtcggaaaagtagtatttgttaggttggtaagagataaggtttaagtgtaggtattgcgaggaagcgagagtgaggtagaaggatgttttaatgttaggaagtgacgtgtagggatagagggatgggggatgaaggatgaagaatggaggggaggatgaagttgggttatatggttaggaggaagagtagtagggaaggaatgtatagagagttttttgtttttaggttttttttaatttttgtttttttttttttttatttttattttttataattttagtagagggttgaggggaatatagtaaaattttggagattgttttttagggagtagagtattttattaatatttcggttagatttatggtttagggaggggtggggtaatttataggagagtgaaggcgttttagtttttaaggatttttgagaggttatgtagtttatgttttcgttttttaatatttaatagaggggaattatattttttttatttttttttagatatgaagagatttttcgttttttttagattttttgttttttataatttttggttgtggggaattttttttaaggtatagattggattttttttgttgtagtttttgatttggttttttttattttgttttttgtggttagagaaagtttttttttgggtgattatagcggttttttaggattttttttttaatatttttttatcgttagttggttttttttagaaggtaagtttaattttttttattgtagtttttagtatttttttcgttgtcgtattttacgtttttaaggtagaaatgtatttttttttttattaaataattaatagagataagggagaagaagggagagatttaagaagatggggatgaattaaggagatggagttggaggtggatgtttgatatagaagaaggaagatcggggattttttaaggtagggtagggacggggttagcgggttttatcggtgtcggggttttttagaaaggcgttttcgtttttgcggttttttagcggggtcgcgggcgtcggttcgttttcgggtagtcgcgggaagttggtgatgtttatgtagtttattggcgagtaggcgtttagggcgtttttttggttggtttcgtttttcgtcgttattttcgttcgcgttttttagtagcgtagcgtttgtcggaagtggttgcggcgggggagtgggagggcggagggcggggtttgattttcgcgatagtcgggagggggcgttttttttagttttcggtcgtgtttcggtttgattcgttttcgtttgtttagcgttattagtttgtagttggtatataggtgcgtgtagatggatagttaggaaggtagcgtagggtcgaggggagagcgcggggtaagcgagattttagtggttttgtattttacgtagtttagggattaaatttttttttttttttagtttgaatatagttagtgttttttttaaattttaggtttttttttcgggttttagatttttttattgatcgtaaatttttttcgattttagattttgtttttgattttaaatttttcggattttagatttttttttgaatttcgagatttttttttttcgattttagatttttttttcgattttagatttttttttcgattttagattttgtttttatttttaaatttttttgaaaattttagtttatgttttatttttaggtttttttgattgtagacgtttttttggataatagattttttttttgattttagattttttttcgtatttcgatatttttgattttttttttaatcgtatttttaaattttagtgtgtgttaggatttttgaaagcggattttt

SEQ ID NO: 1761 - DNA, 2475 bp, Artificial Sequence
  chemically treated genomic DNA (Homo sapiens)
ggggattcgtttttaaagattttaatatatattaaagtttgagaatgcggttgaaagaggagttagaagtgtcggggtgcgggaagggatttgaggttagaggagggatttgttgtttaaagaggcgtttgtagttaaagaggtttggagatgaagtatgggttggggtttttaaaagggtttgggggtgaagatagagtttgaagtcgaaaaagaggtttaaggtcggaggaggagtttaaaatcggaggaggaggatttcggaatttaaggaggggtttggggttcgaggagtttggggttagagataggatttggggtcgagagggatttgcggttagtgaaagggtttggggttcgaaaaggaagtttgggatttgaggaggatattagttgtatttaggttggaaggaggaaggggtttggtttttgagttgcgtaaagtgtagagttattgaagtttcgtttgtttcgcgtttttttttcgattttgcgttgtttttttggttgtttatttatacgtatttgtgtgttagttgtaggttgatagcgttgagtagacgggggcgagttagatcgggatacggtcgagggttgggagaggcgttttttttcggttgtcgcgaagattaggtttcgtttttcgtttttttattttttcgtcgtagttattttcggtaggcgttgcgttgttggggggcgcgggcgaggatggcggcggagaacgaggttagttaggagagcgttttgggcgtttattcgttagtggattatatgagtattattagtttttcgcggttgttcgaggacgagtcggcgttcgcggtttcgttgaggggtcgtaaggacgaggacgtttttttgggagatttcgatatcggtgaggttcgttgatttcgtttttgttttgttttgggaagttttcggtttttttttttttgtgttaagtatttatttttagttttatttttttaatttatttttatttttttggattttttttttttttttttttgtttttgttaattatttggtgaggaagggggtgtatttttgttttggaggcgtaggatgcgataacggagaggatgttagggattgtagtagaagggattgggtttattttttgggaagaattaattaacgatgaaggaatgttgaaggggagattttaaggaatcgttgtgattatttagaagagggttttttttagttatagaggataggataggagaaattaagttagagattgtagtaagagggatttaatttgtgttttaagagaagttttttatagttagggattgtgagaagtagagggtttgggagaagcggagaatttttttatgtttagggaggggtaaagagaatatgatttttttttgttgggtgttgggagacggaggtatggattgtatgattttttaaaagtttttggggattagaacgtttttatttttttgtggattattttatttttttttgagttatggatttggtcggggtattagtaaggtattttgttttttaggaagtagtttttagaattttattgtgttttttttagttttttgttggaattgtgagaagtgggggtaagagaaggaggagatagggattggaagagatttgggggtaaagagttttttgtgtattttttttttgttgtttttttttttagttatgtggtttagttttatttttttttttattttttattttttattttttatttttttgtttttgtacgttattttttggtattagagtatttttttattttattttcgttttttcgtagtgtttgtatttgagttttgttttttattagtttggtagatgttgttttttcggtttggtttttttttagttgtttttagtttgaaagttttaaattttttttttttttatattttttggttatttggttttgattagtagtttttgttaatttgattggattgtattttgtatggggtgggggtgaggagataatgaagatggagtttagaggtttatgggcgttaaatgttagggttgcggattaaaatttattttttaaagggagtggaattaggaggtagtagggagaggagtgggaagatgtgttatgatggatattagtttgaagttaggttttttatttagtagttaggagtgagatttttggttttaatatagttttgatttattaagcgataataggtatatttattttgttttgggttttagtttttttttttagtttaatagagaatgtttgttttttttgatttagagattggaattgtttgatatgtttttttttggttttttgtaaatgttttagtatttattaaaatttatgattatttatttgtgtaattatttgattattttttgtttgtaagttttatgagggtagggattatgattgttttgtttatttttttttttttagtattaagattttatttataggtcgggcgcggtggt

SEQ ID NO: 1762 - DNA, 2498 bp, Artificial Sequence
  chemically treated genomic DNA (Homo sapiens)
ttttttatagttgggcgtttaggtgattgatagttttttaaatattatgttagtattgaagatatttatttttttattttgtaggttagaagattgaggtttagtgatgtcggagggttttatagttagtgagtgaggaagttaaaatgtgaatttgatggttttttttgatttattttatgtttgtgtgtgatagttatggttgtggcgggggtgagagtgggtatagagatgttagtttgggtttgttattgttagaagtgaagatgatattttagtgttgtagattttgtaggaggggattggagttaagttataaatttttttttgttaggagatgggtttttggagtgggtgtggtgtttgattattcggggagatggttgaagttggggatttgggaaggtttttagaagggaggtggtttggggaattaggggtttagtttttttaggatggattggtttgatggtggttttttaagttcgttttgtttttagttattgggtattttgtttattttggaggaggaatgtatgttttttaaggttttagacgttagttttcgggttaagttttacgataattacgcggggaagttatttaatttttagtagtttcggtttgataagaagcgtaagtattaggtttatttcgaggtggtttattacgtaggcgtggtaggtgtttgttggaattttagttttcggttaggtttttttcgttttgttttaggttttttattcgggtttagtatttgatttgtttttttaggtgttttatagtattgtgggttggttggagaaaaataaggattttttgaatgagatcgtggtttttattttttagaagttatagaataggtttttggcgattttttatgagaattatgcgggtttttgttttagtgagtatggagggataagatttttattttgataggggtttatagagcgatattttttggagtgattaggttttttgtttttattagttgagttttttaagtttggggtgaaagagaagcgtaagaaggtagtatcgttttagacggtgttttagttgtataaggtaaggttttatttgggagatagatttttttttttggtagtttttagtttcgttttttattttttgttttgttttttgtgttttgggcgggcggttgttaagatttgtagtgatgtttaatttttttttacgtgaatattatagtaagtttgtgttgtttttcgtttttacgttgtttgggtagggtttgtggggaaggggtgggagttttggggttttgggagggacggggatttggtagggaagtgaagattttggtggtggtgatgggagatagcgaagggttttttattattagaatgagagtgaaagagtaaaagtgtagggtatttagggttttgttttcgtttcggttttgattattgcggtatttaattttggttttttgttttttttgtgttttttttttatttttttttattgttaggagaattttaataagttgatgattaatttgcgggttatatagttttatttcgttcgttgtattgtttttaacgagaataaaattttaggtagttatttagggttggtttggttggggtcgggaggtattatgggaaggtgatagggtagaggtcgggaggttgagtatatttttttttttatttcgtagggtttttattgttgttttttttttggggtttgcgggtgtgtttgttgatttttgattttttttttttttacgtttaggggttatggatgtttttttggtgttatattagttgcgttgtaatggggttttggaggggattcggatttgtcgttaagggttttttaataggttgttttatatcgattttcggtagcggtgggtgattttttttttttgtttgttgttttaggtggaggtttgaggggttgggtaggatatatatattagagtttaatagacggttttttgtttggagggggaagtagggattgtgaggggtttggttaggtattttagtaagatatgggggtggtttagatttggtcggggatttggggagaagtgaataggtttggggtaaatagtggaggtggagtttataggtttcgttgataagttggatatggaattttggatgtagaaaagacgaatgatttttagttttgggagtgagtaatttgggagttattagtggtagatttattgagttataaaaatagggttttttgatttggaggagaggtgaagggatattggtttgagttttgttttgcgtgtattaggtttgaaatgtttttagtagatattttagaaaagttatgggggagattgggattattaatttggagtttagggtagcgggtagaaaggatgtagatttgggagttgaacgagaattatgtggacgaggttttatgagatatttggtatatagtaagtatttgggtagtgttgttagttttttttcgtttttttaatgggtaataagtat

SEQ ID NO: 1763 - DNA, 2498 bp, Artificial Sequence
  chemically treated genomic DNA (Homo sapiens)
atgtttgttgtttattgagggaacggggaggagttggtagtattgtttaggtgtttgttatgtgttaggtgttttatgaagtttcgtttatatgattttcgtttaatttttaaatttgtattttttttgttcgttgttttgagttttagattgataattttaattttttttatgatttttttaggatgtttgttggaggtattttaaatttgatatacgtaaaatagagtttaaattagtatttttttattttttttttaaattaaaaaattttgtttttgtagtttagtaaatttattattggtagtttttaggttgtttatttttaaaattagaaattattcgttttttttgtatttagaattttatgtttagtttattagcgaggtttgtaggttttatttttattatttgttttaagtttatttatttttttttaagttttcggttaggtttgagttatttttatgttttgttgggatatttggttaggttttttatagtttttgtttttttttttagataggggatcgtttgttgggttttgatatgtgtgttttgtttagttttttaggtttttatttggagtagtaggtagggggaaggggttatttatcgttgtcggaagtcggtgtagagtaatttgttggggaatttttggcggtagattcggattttttttaggattttattgtagcgtagttggtgtagtattaagaaggtatttatgatttttggacgtgagaggggaaaaggttagaggttaataggtatattcgtaggttttagagaaaaagtagtagtggagattttgcgaggtgagggggaagatgtatttagtttttcggtttttgttttgttatttttttatgatgtttttcggttttagttaggttagttttgggtgattatttggggttttgttttcgttggggataatgtagcggacgaagtggggttgtgtggttcgtaggttggttattagtttgttgaggtttttttggtagtggggaagagtgagggaaaggtataaagggggtagagaattagaattggatgtcgtagtggttaggatcgagacgggagtagggttttaagtgttttgtatttttgtttttttatttttattttggtgatgggagatttttcgttgttttttattattattattaaagtttttatttttttgttaaattttcgttttttttagagttttagggtttttattttttttttataaattttgtttaggtagcgtagggacgggaagtagtatagatttgttgtgatgtttacgtggagaggagttaaatattattgtaagttttaatagtcgttcgtttaaggtataggggatagggtagggggtgaaggacggggttggaggttgttaagagggagggtttgttttttagatggggttttattttgtgtagttgggatatcgtttggaacgatgttgtttttttacgttttttttttattttagatttggggggtttagttaatagagataaggggtttggttattttagggaatgtcgttttgtgggtttttgttagagtggagattttgtttttttatatttattggagtaggagttcgtataatttttatagagagtcgttaggagtttattttgtgatttttggaagatggggattacggttttatttaggggatttttgtttttttttagttagtttataatgttgtaaggtatttggagagataagttaggtgttgagttcgggtgggagatttggagtagggcgggaggagtttggtcgagggttggggttttagtaagtatttattacgtttgcgtagtggattatttcgaagtgggtttggtatttgcgttttttgttaggtcgaggttgttggaaattgggtgattttttcgcgtggttgtcgtagagtttggttcggaagttggcgtttgaggttttggggaatatgtattttttttttaggatggataggatgtttagtggttgggaatagaacgagtttgaaaagttattattaagttagtttattttggaaggattgaatttttggttttttaggttattttttttttgggagtttttttagatttttagttttagttattttttcggatggttagatattatatttattttaagaatttattttttaatagagaaaagtttgtggtttggttttagtttttttttgtaaaatttgtagtattgaggtgttatttttatttttaataatggtaaatttaagttggtatttttgtatttatttttattttcgttatagttatggttgttatatataaatatggggtaagttaaaaaaagttattaagtttatattttggtttttttatttattagttgtggggtttttcgatattattaagttttagttttttaatttgtagagtgggaagatgaatgtttttagtgttgatataatatttaaaaagttgttaattatttaaacgtttagttgtagggga

SEQ ID NO: 1764 - DNA, 2282 bp, Artificial Sequence
  chemically treated genomic DNA (Homo sapiens)
tcggttaaatttttggagatataggattttgtcgtgttgtttgggttggtttcgaatttttggatttaagcgatttgtttgtttcggttttttaaagtgttgggattatagggttttaagttaggttttaagaatataagggggaaaaaggttgtttatttatggttgtgtgatggttaggaaaatattttttatttataattgtttttttcgtttatagttttttatatatatagattttttagtttttattttattttatttttttcgttatttgaggaagtgatatttaaattaaatttaaataaagttatattgtgaaaagttttatttttattttttttttttttagtttaatttttattttatttttattaattattttattagttttttgagtattttttaaattttttatgaaaaagttgtttttaaataaagttaatgttttataggtgttagtaaggttcggggtgggggagggtggaagaagtagtggattaggttttatttaatttggtttattttaaagtagtgtttttcgtttatttaaaaataataataattatatgttgggtatttgttataagttagatgtttaatattaattatttttagtttttagtatgtattagaaatgtattaatgttttatataattgttttttttgatttttataataattttaaaaggtaggttattaatttttatttttattttataagtgaggaaattgaggtatagaaaggttatttgtttaagtaagagagaggagtagggttttgaatttaggtttgattttagagttttttttaatcgtgacgttttatattagtaaattagatatagtttttgtattcgttggaatttagtttaatgtgggagacgggcgagaaaaaggtagataataaagaaatacgaaattatagattaagaaagtaatgtaaacgaaacgaattcgcggttgtgatagaataataatggggatttattttagaaaggggaaggaaagagtgttaaggaaaggtttgagaaaatgatatttatgaaatgttcgggaattatttgggggttgtaatgatgatttttttttttacgtttaatatacgggataaattcgaggtttatagaggttaaaataaatacgatagggttttttagacgtgtagacgtggcgtaaagaagggaggatttagaaattgggtttagggttcgtatacgttattagtgtttatagtagtttagtttcgttcggtttttgataagggatattaagttagttgttttttacggtttcgttgtagttgagagcgttcgggtagtttatagggaggtttttcggttagttaaaagggttttggttcgtttagcggcggtttggaaaggtttttttttcggtttttcgttagttttcgtttggttcgtttcgtttcgttttttttggtttagtttcgtatttgtatcgttcggattaggtttcggtcggttagttggttttgtcgtagttgtagtagaatgttattaggtcgcggtcggtcgttttattcgttttaagtcgttattgtggttgtcgatcgtttttttcggtcggttttagatttagtcgttatcggcgtcgtcgttatgttttttcgtcggataaataggaagtaagcggtttcggggtcgcggagatttttacggggcggcggaggggtcgtcgtagcgtttttagtgggtcgtcggcggaggcgtaagtcgcgtggtagggatcgtgtgcggcgtggaggttattgggaattgtagttttgcgcggtagcggggtaggtgggaaaagagatgtggttttttttgtattgtcggtttttttggttttcgggtttagtatttcggcgaaattttttaaggtttatatttttttatttttttcgtcgatttgggtaggatgtaggtagttggttaagaaatgattttgggttttaggttaggagttaggttttcgagttcgttttttgtttgtttttttttatacgtgatttatcgcggatatcgattaagttatcgcgttttgttattgcgtttgtgttttcgttaggttattttatttatagattttgggagtttgattaatcgtagtttttggggttttttttgcgttcgatattaaattatgtttaggggaaagggagggtgtttgggatatagtggtgagtagaacggtttgggattttttattacgaaatgtaggttataggggaagatagtagatttatatataaagaaacgtagttttaaattggata

SEQ ID NO: 1765 - DNA, 2282 bp, Artificial Sequence
  chemically treated genomic DNA (Homo sapiens)
tatttagtttgagattgcgtttttttgtgtatggatttgttgtttttttttgtaatttgtatttcgtgataaaggattttaggtcgttttgtttattattgtattttagatatttttttttttttttagatatggtttggtgtcgggcgtagagaaagttttaggaattacgattgattaggtttttagaatttatagatggagtgatttgacgaggatataggcgtagtggtagagcgcgatgatttggtcgatgttcgcggtgagttacgtgtagagagaagtaggtaggaagcggattcgagggtttgatttttgatttgaagtttaggattattttttggttagttgtttgtattttgtttaaatcggcgagagaaatgggagaatgtggattttgggagatttcgtcgaaatgttgggttcgggggttagagaaatcggtagtgtaggaaaggttatatttttttttttatttatttcgttgtcgcgtaggattataatttttagtagtttttacgtcgtatacggtttttgttacgcggtttgcgttttcgtcgacggtttattgggggcgttgcggcgattttttcgtcgtttcgtagaaattttcgcggtttcgaggtcgtttgttttttgtttgttcgacgaggagatatggcggcggcgtcggtagcggttgggtttggagtcggtcgagggagacggtcggtagttatagtggcggtttggggcggatggggcggtcggtcgcggtttggtaatattttgttgtagttgcggtagggttagttgatcggtcggggtttggttcgggcggtgtaggtacgaggttggattaggaggggcggggcggggcggattaggcgggagttggcggggggtcggggaagaggtttttttaggtcgtcgttggacgggttaaagtttttttggttggtcggaaggtttttttgtgagttgttcggacgtttttagttgtagcggggtcgtgggaagtagttggtttgatgttttttgttaggggtcgagcggggttgggttgttgtggatattgatggcgtgtacgaattttgggtttagtttttggatttttttttttttgcgttacgtttatacgtttgggggattttgtcgtgtttgttttagtttttgtgggtttcgagtttatttcgtgtattgggcgtgggggagggggttattattgtagtttttaaatggttttcgagtattttataaatgttatttttttaggtttttttttgatatttttttttttttttttttaaagtaggtttttattgttattttgttatagtcgcgaattcgtttcgtttatattatttttttagtttataatttcgtatttttttgttgtttgtttttttttcgttcgttttttatattaggttgagttttagcgggtgtagagattatatttggtttgttagtgtagagcgttacggttaagagggattttggagttaggtttgggtttaaagttttgttttttttttttgtttgggtaggtgatttttttgtgttttagtttttttatttgtaagatgaagatgagaattagtaatttattttttaagattgttgtggagattaaagggggtaattgtgtaaagtattagtgtatttttggtgtatattaagggttgaaggtagttaatattaagtatttgatttataataggtgtttaatatatgattattgttatttttgagtgagcgaaggatattgttttagggtaaattaggttgaataggatttagtttattattttttttatttttttttatttcgaattttgttaatatttgtaaaatattagttttatttaaagatagtttttttataaaaagtttgaaggatatttaagaaattgataaagtggttggtgggagtgaggtgggaattgggttaaagggggagaaaatgggagtgagattttttatagtgtaattttatttaaatttaatttgaatattatttttttaaatgacgaaaaggatagaataaaataaaggttagggggtttgtgtgtatggaggattgtggacgaaaggagtagttgtgagtgagaaatgtttttttggttattatataattatagatgagtagttttttttttttttgtgtttttaagatttgatttaagattttgtaattttagtattttgggaggtcgaggtaggtagatcgtttgaatttaggaattcgagattagtttaggtaatacggtaaaattttgtgtttttaaaaatttagtcgg

SEQ ID NO: 1766 - DNA, 2452 bp, Artificial Sequence
  chemically treated genomic DNA (Homo sapiens)
aaaaatataaaaaaattagtcggttgtggtggtgggtgtttgtaattttagttatttgggaggttgaggcggagaattgtttgaatttgggaggtgaaggttgtagtgagttgagattgcgattatattattgtattttagtttgggcgatagagggagattttattttaaaaaaaaaaaaaaaaaaagagtttttagatattgttggtgttttagggattatattttagaattatttttgttttttgataggaagagatgaatagagggaaaagaagtggtgattgattttatttggattattgtaatgttttattgtggttttaggttttttttttatttcggttattgagtttttattaggagtaaattaatttttttaaagtttagttttaattatgtttttgtttaaagttttttggattttttgatattatttattattgttgtttattagaaatgtttgtagtgatgaaatgttttatatttgtatcgtttagtatggtaattattaattatatgtggttatgagttttatattttgttttattaaatttaaatttaaataattatatttggttagttgttagatagtgtagtgtatttggtttgttatttaaggttttgtttggtattagtttttttttatttttttagggatagttttaatttttagtattttaggttttaggttatatgtagcgttttttgattttattttgtaatttttagtattatggtttgtgttatgttttttttttagtttatattgtttttttgttttgtttttaatgtttaatttatatatgatttttttttcgaaattttttttgatatttgttgttttttaattttttttttttttgaattttttaatattttgttttttttttataatttttagtgttttttgttttatattgtagttggttggtgtgggtatttttttttattaaattgtgagtttttggaggatgtgattgttttttgtagagagtttttgttttttattgtaggtttttttaggtatatagaggagttcgataaattttataaatttttgtattggtatattggggatatagagatcggtattataatttttttgtttttaagttgtttataggtttttacgagagtttgatttatgtttagagaattattgaagttaatggttattttaggtagggagataaaagttatagagggtttagttggcgaggggagttcggtaggagttgtttaagtagaaggttgtgtttatatatatagacgatttttttgtttagtttggtttagtgtggggagatgggaatatttaggcgttattgtttggttgttttgtgaagttgcggattaattagtgatgtagcggttggtttagtcgtttggtttttgtagatggatggatgaagagaggattgaaaagatagtagagtagtgttagtttttggaagtgaagtgttggttgggtggagtgggtatttgggttgggaatgtgagtgtaaggaaatgtttgtgatttgatagtagatagtaggtgaaattttgttgggtttggtttggggggttatgaggtttttataatagtttttgttttaaatggaaaaattgttgaaaagaaaaaaaaaaaaaggaggttaggtgtagtgggttatgtttgttattttagtattgtgggaggttaaggtgagtagaatatttgagtttaggagtttgagattagtttaggtaatatggtaaaattttatttttataaaaaatataaaaattagtagtgtatggtggtgtatatttgtagttttagttatttagggggttgaggtaggaggattattttagttcggggaagttgaggttgtagtgaattatgattatattattgtattttagtatgggcgatagagtgagattttgttttaaaataataataatagtaataataaaatagaggaaaaaaagatagaaatagttttttggttttagattttaattttaagagtattttatattttgaaaatttttagtatatatttatttttgggataaaaatattaaaaaaaggaaattttattgatgttataatataaatatagaaaagtgtatagattataagtttatatatatttgtgtaattattttttagatatgaatagaatatgttagtatttttagaataaatttgtgtgaagtttaatgtgtgtaggattaatgatagaataaatataggttttggagttaggtatgtttggggttgaattttgggtttttgtatttattagtagtgtgattttggatgagtgatttaattttagtttttttttttgtaaaattaaggtggatttataatgtttgttttatagggaagtaggagatttaaaattgaaaatataggtaagttgttaggtatagtgttagtatataagtggggatttagatgttttttgtaatg

SEQ ID NO: 1767 - DNA, 2452 bp, Artificial Sequence
  chemically treated genomic DNA (Homo sapiens)
tattgtagagagtatttgagtttttatttatgtgttggtattgtgtttagtaatttgtttatatttttaattttaaattttttatttttttgtaaggtagatattatagatttattttgattttataggggaggaaattgaagttaaattatttatttaaggttatattgttagtaggtgtaggggtttaggatttaattttaggtatgtttgattttaaggtttgtgtttgttttattattaattttatatatattgggttttatataggtttattttggagatattgatatattttgtttatgtttggggggtagttatataagtatgtgtaaatttatgatttgtgtatttttttgtgtttatgttataatattaataaagttttttttttttaatgtttttgttttagagatgaatatatgttagagatttttaggatgtaaaatatttttaggattagagtttaaagttagaaagttgtttttattttttttttttttgttttgttgttgttgttattattgttttgagatagggttttattttgtcgtttatgttggagtgtagtggtgtgattatggtttattgtagttttaattttttcgggttgaggtaatttttttattttagttttttaagtagttgggattataggtgtatattattatgtattgttaatttttatattttttgtagagatagggttttgttatgttgtttaggttggttttaaatttttgagtttaagtgttttatttattttggttttttatagtgttgggataataggtatgatttattgtatttgattttttttttttttttttttttttaatagtttttttatttaaaatagggattgttatgaagattttataattttttaagttagatttagtagaattttatttgttgtttgttgttagattataaatatttttttgtatttatatttttagtttaggtgtttattttatttagttagtattttatttttagaagttggtattgttttgttgtttttttagttttttttttatttatttatttgtagggattagacggttagattagtcgttgtattattggttaattcgtaattttataaggtagttaggtagtgacgtttgaatgtttttatttttttatattaggttaggttgggtagagaagtcgtttgtgtatgtaaatatagttttttgtttaggtagtttttgtcggatttttttcgttaattgggttttttgtggtttttatttttttgtttaaaataattattggttttagtggttttttgggtatgaattagattttcgtagaagtttgtgagtagtttgaggatagggaagttatggtatcgatttttgtatttttagtgtgttagtataaaggtttgtgggatttgtcgaatttttttgtgtatttggagggatttatagtaggaagtaagagttttttatagaaaatagttatattttttaaaagtttatagtttagtaagagaaagtatttatattagttaattgtaatgtaaaatagaaagtattaaaggttgtaagaagaggatagagtgttggggagtttagaggagaaaaagattagagagtagtaggtgttaaaggaggtttcgaggaagaggttatatgtgggttgggtattaaaggtagggtagaaggataatgtagattgaggagagagtataatataagttatagtgttgggaattataaggtagaattaggaaacgttgtatatgatttggagtttgggatattgagggttgaggttatttttgaggagatagaaaggagttggtgttaagtagagttttgaatgataaattaagtgtattgtattgtttagtaattggttaaatgtgattatttaaatttaaatttaatggaataaaatgtaaaatttatagttatatgtggttagtggttattatattggacggtgtagatgtagaatattttattattatagatatttttagtggatagtaatggtggatagtgttagaggatttagagagttttgagtagaggtataattagagttgggttttaggaaaattaatttgtttttggtgaagatttagtgatcggagtgaaggagaagtttggaattatagtgggatattgtaataatttaggtgagattagttattattttttttttttttgtttatttttttttattaggaaatagggatgattttaaagtgtggtttttggaatattagtaatatttgggaattttttttttttttttttttttgagatggagtttttttttgtcgtttaggttggagtgtagtggtgtgatcgtaattttagtttattgtaatttttattttttaggtttaagtaatttttcgttttagttttttaagtagttgggattataggtatttattattataatcggttaatttttttgtattttt

SEQ ID NO: 1768 - DNA, 2498 bp, Artificial Sequence
  chemically treated genomic DNA (Homo sapiens)
cgggtttaatttttagttttttgggattgtttttttttttaaatagttatgggtgttttaaatagattttgggttagagtttgatgattttttgggatggataggggtttatggagatgggtgtttaggagttttgaagtaaagttttgtaatttatttttttttattagagtgagtagtaggaatcgggaggtaggggtgaggaatttagagtttcggttaaggttaatttaggtagtatttattggaagtagtttagagtattaagagggtaggagtaaaagatttttgttttggttcgttatttttttttttttttttattttttatttgttttttttttattatcggtttttgaagatttaaagagtcgattgaatttttagttgttaatatcgaattcggtttttgggaagatatttttttatttaacggatgaggagattgaggtttggtttggggaaaggtgttttttgatttagatagattttgtttttttatattataagtatttatagaatttaggttggagagtagatttcggggaaaatggggagatagagatatagttgagtaagatattaatattttaatgagggagaagtttatttggttagaagagttataaggaaaagttaaaatttaagtgttgagggtagatataaattagtagtatgttgtgagttttatagttaggggtattttgggtgttgtgttaggttattatttattgataagagtcggtaatattttagttttttttaaaatcgtgtttagttagcggtaggagagtttaggaagtttttagttttttagggagaggttaatacgtgtaagttgggttgtttttaaagttgttatggtatttggaagcgtgtagatggagttcggttggtatttagtaggtgtttatgtttattgaaaaagtaaaggtaaagtttgttgttcgggggaagttttagggtttttatatggttatagggaagttttgttttaggtgggtagttgttttttttttattgcgaatatggaaaggtattggttacgaggggttaatggggttgttgtgtgtataaggtttgttttagggagggtaaaagatattgttttgggatttaggaagttgtttttgaatcggtttttttacgatattattttttaggttgtgggatcgttaggttgggcggaagtggattttagttaaggggatgtttttagatgttatgtttttaaattggattcgtttagaaaggtaggtagagataggtttgcgttcgggaaagttttgggtaacgatttaggatggtatttaggttttttttgggtaggggatggttataggtttttttggcggcggtgtttattaatttcgttttaagaaggagagtttgggcgtggaggttttgggtagttgaaggtagagatttattttttttttggttatttatttttattttagtaacgttttttagaacgttttaaagtttttttaagttttcgtttttaggttagggttttgtagttagttttaaggttttttttaggagcgcgttttttaaataaagttgagagggggcggggggaatgagggagttttagatttattttagagtggtttttagagggtttgggttttttttttcggattgtttagtgggaaggagggtcggttggtgttttaggttcgcgggattgtgatagtcggcgatttttgcgatttttttttttattcgggcgtttttattttgagatagtcgtttttcgagcgtagtttttttagttttcgtattaagtcgttgggttcgtagtttagtattttttcggtgaggtcggagaaggtaagcgaggcgttgagcggtaagcggttgttgtttatcgacgacgcggttatcgacggttcgttcggggaggcgggcggtcgcgggggttgttgcgcggagggcgcgggttgggtcggttgtttcgtacggattttcgtcgggttttcggtcgcggattcggcgtcgttgtttagcgttagttttaggtttagtaggcgcgtttttttcgacgcgtagttcgatattttcgagttgttattcgtgaggttggggggcggcggtggcggtcgcggtttcgtattcgagcgcggacggtttttggtacggatttcggtgcggatttcggttattcgtatattcgtatcgcgcgtttcgggagttattgcgcgtttttttttgttcggtcgtgaggagaacgcggcgttgtaggcgattgttgagttcgggtttgggtcgcggcggtttttagttagcgattagtcggttacgtttttgggtcgggtcggcgacggcgcgcggtggttttttttttttttcggggtaggcgcgggtgtaggcgcgggttggggatcgtagtttcggatcgggggttcggtcgtcggcgtttttatcgcggtttttttcggttttagcgagttgcgcgtatggtttaggttcgttcggtttcgacgtttttgg

SEQ ID NO: 1769 - DNA, 2498 bp, Artificial Sequence
  chemically treated genomic DNA (Homo sapiens)
ttagggacgtcgaggtcgggcgggtttgggttatgcgcgtagttcgttgaggtcgagggaggtcgcgatggaggcgtcggcggtcgagttttcggttcggggttgcggtttttagttcgcgtttgtattcgcgtttgtttcggagaggaaaaagagttatcgcgcgtcgtcgtcggttcggtttaaagacgtggtcggttggtcgttggttaagggtcgtcgcggtttaggttcgggtttagtagtcgtttgtagcgtcgcgttttttttacggtcggataagaaggggcgcgtagtggttttcggggcgcgcggtgcgggtgtgcgggtggtcggggttcgtatcggggttcgtgttaagggtcgttcgcgttcgggtgcggggtcgcgatcgttatcgtcgttttttagttttacggatagtagttcggaggtgtcggattgcgcgtcggaggaggcgcgtttgttgggtttggagttggcgttgagtagcgacgtcgagttcgcggtcgggggttcggcgggggttcgtacggggtagtcggtttagttcgcgtttttcgcgtagtagttttcgcggtcgttcgttttttcggacgagtcgtcggtggtcgcgtcgtcggtgggtagtagtcgtttgtcgtttagcgtttcgtttgtttttttcgattttatcgaggagatgttggattgcgggtttagcggtttggtgcgggagttggaggagttgcgttcggagaacgattattttaaggtgggggcgttcgggtagaaagggaggtcgtaggggtcgtcggttgttatagtttcgcgggtttgaggtattagtcggtttttttttttattgaataattcggagaaaggggtttaagttttttggggattattttgaggtggatttggggtttttttatttttttcgtttttttttaattttatttgggaagcgcgtttttgaaaaagattttggaattggttatagggttttaatttgggagcggggatttgagaaagttttggagcgttttgggaggcgttgttgaggtgggggtgggtagttagggaagggatggatttttgtttttagttgtttagaatttttacgtttaggtttttttttttgggacgggattgatagatatcgtcgttagggaaatttgtggttattttttgtttaggaaaggtttgaatgttattttgagtcgttatttagggttttttcgggcgtaggtttgtttttgtttgtttttttgggcgggtttagtttgaaagtatgatatttgggaatatttttttggttggagtttattttcgtttagtttaacggttttatagtttggaggatgatgtcgtgggagaatcggtttagaggtagttttttaaattttaggatagtgttttttgttttttttggggtagattttgtgtatataatagttttattggtttttcgtggttagtgtttttttatgttcgtagtgagaggagggtaattgtttatttggaataggatttttttgtggttatgtggggattttagggtttttttcggatagtaggttttgtttttgtttttttagtggatatgagtatttattgggtgttagtcgggttttatttgtacgtttttaggtgttatggtagttttagggatagtttagtttgtacgtgttgatttttttttgggaggttggaagttttttgagtttttttgtcgttggttgggtacggttttggaggaggttgaaatgttgtcgatttttgttagtggatgatggtttggtataatatttagagtgtttttggttgtggagtttatagtatgttgttggtttatgtttgtttttagtatttaggttttaatttttttttgtggtttttttgattaaatgggttttttttttattagagtgttggtgttttgtttaattatgtttttgtttttttatttttttcgggatttgttttttagtttgagttttgtaaatgtttgtagtatggaaggataaggtttgtttgaattaagagatatttttttttaagttaggttttagtttttttattcgttaaatgggaggatgtttttttaagggtcgggttcggtgttggtaattgggagtttagtcggttttttgagtttttagaagtcggtggtaaggagagggtaagtggaaggtgaggaggaggagggaggtgacgagttaggataagggttttttgtttttgtttttttggtgttttgagttgtttttagtgagtgttgtttgaattggttttaatcgaaattttgagttttttatttttgtttttcggtttttgttatttattttggtgaagggggatgggttgtagagttttgttttagggtttttaggtatttatttttatgggtttttgtttattttaggaagttattaggttttgatttaaagtttgtttgaggtatttatgattgtttaaaggggaaaatagttttaggaggttgggggttgagttcg

SEQ ID NO: 1770 - DNA, 2500 bp, Artificial Sequence
  chemically treated genomic DNA (Homo sapiens)
tttttttttattgttatttttattattttggtggggatagaaatagagatatagttttttgtaaagttagatttgaggttggttgagatgtaggttgggtattttgtatattttgttggtgtgttaggttgtgtttttataagtttagattaaaaatggggatattaggagttgttatttgttttagaggtataatggtagtaagagatatttttgaaatagtattttgttttttttttgggagaatgaggagtttgttttttttatttttatgggaatttattatagtttttattatttttgtatttaggtatttttatttttttaaaaggttttgtatttttgattttttaggttttttatagtgggagttttagaatagagtaatttagtttttatgtaagttgtggatttttatttgttttaaaggaaagaaatatttttgtatgttttatatattaggtgttatagtatatttataggttttaggggttaggatgtggatatttttggtggggttacgattttggttattatatagttttattttttggttggtatgtaggattttttgagttttttaaatagtatggtgagtatggtatgattgtaaggagggtttttttttggtgtttttttggtggttcgtagagattataaagagggaaaagattttgttaatgttgttggatgtggttgaaaatgttttttttgttgagtttgagaagtgatagtatgttttgttggttggcgtggttttaggattttatttcgtaaatttgattatagatatttggagttttaaagagttagaaaaatttgtaaggttgaatgtagaagtttgaatgtttttattttgagtttttattgattataattatttttgaatagtaattattgtaggaatgaaagaaaatttggggttgattaaatgaagtagtgtaagattttgagtaggggtagatttggttagtagtgtaaaaaaaataaggttttgtgagagtttatattttttttttattttgttgtagtttataggtagttttgtttaatttttaacgtacgtttttatggtttttaggtaaattataggagatggtatcggtttttttaggagtgatttagtaatgtttaggttttaaggtagatttgtttatgttgttaggttgggttagtttggaggttgttttggtatgagtacgtaggtagatagatgttgacgtcgttttaaagaatcgtttttttaggtgttgagggcggtttttttgatgtttattttgtgttattgtttatttttataaggcgtttagttgttgcggtgatgatatttatattaataagtgttttatttatttgtcggttttagggaatgtttgttagttgcgtatggtagttaattttagggtatttttgagtttgatgtttttgtatttagagaattagtttttaaattttgtattaatatttgggtttgaaagattttttatttatttaggatttattttgaaagggggagttatagttaatgattttgatttttgttttaaaggttttatatgtttcgaagtgaagttttttgaaagttattttttgtgtttgagttttggttttgtagaaagggatgttgaaaaagagaagagtaaatagggttttgtaggttagattttatgtttaggtttatgagttgagtttatttttttatttttttagttaaaagcgtagggtggtgatgtttttagattttaaaattttgtagggaatgttttagaattttttgttttatgagaatttatttattttttatagttattttagtttttaattttttattgtttaggttttaattattgatattattttttatttttttttttttttttgatagggttttattttgtcgttttaggttagagtattgtggtgtgattatagttttttatagttttgattttttgggtttaagtgatttttttgttttagttttttaagtagttaggattataggtatggattattatgtttagtttatttaaaattattttgtaggattgggtgtagtggtttatgtttataattttagtattttgggaggttaagattagtagattatttgagattaggagattaagattagtttggttaatattgggaaattttatttttattaaatatataaaaattagttggttgtggtggtttatttttgtaattttagttatttgggaggttgaggtaggagaatcgtttgaatttaggaggcggtagagttgagatcgcgttattgtattttagtttgggcgatagagtgagattttattttaaaataaaaatttttttgtagagatagggtgttattgtgttgtttaggatggtttttaattcgtggttttaatttttgattttaagtgattttgtttttttggttttttaaagtgttaggtaagattataggtatgtttggtttttgattttttttttttttttttattttatagttaat

SEQ ID NO: 1771 - DNA, 2500 bp, Artificial Sequence
  chemically treated genomic DNA (Homo sapiens)
attgattatggaataagagagagaaagaggaattaagggttaggtatgtttgtaattttatttagtattttgagaagttaaggaagtaggattatttgaggttaggagttgaggttacgagttaaagattattttggataatatagtgatattttgtttttataaaagaatttttattttgagatggagttttattttgtcgtttaggttggagtgtagtggcgcgattttaattttgtcgttttttgggtttaagcgatttttttgttttagttttttaagtagttgggattataggggtgagttattatagttagttaatttttgtatgtttagtagagatggggttttttaatgttggttagattggttttgattttttgattttaggtgatttgttgattttggttttttaaagtgttggggttataggtatgagttattgtatttagttttataaaataattttaaatgaattgggtatggtggtttatgtttgtaattttagttatttgggaggttgaggtaggaggattatttgagtttaggagattaaagttgtggagaattgtgattatattatagtattttagtttagggcgatagagtaagattttgttaaaaaaagaaagaggaatgaaggataatgttaatgattggggtttgagtaatagaaggttagaaattgagataattataaaaaataaatgaatttttataaaatagagagttttggaatattttttgtagagttttggagtttgaaggtattattattttacgtttttggttgaagaaataaaagaatgaatttagtttatgagtttgggtatgaagtttggtttgtaaaattttgtttgttttttttttttttaatatttttttttgtaaaattagagtttaggtatagaggatgatttttaaagaattttatttcgggatatataaaatttttgaaataaaggttaaggttattggttatagtttttttttttagggtgggttttgggtgaatgaagaattttttaggtttagatgttggtatagagtttgagaattgattttttaaatgtaaaaatattaggtttagaagtattttgaggttggttgttatacgtagttggtaagtattttttgaaatcggtagatgaatagagtatttattgatataaatattattatcgtagtagttgggcgttttatgaaaataaataatgatataggatgagtattagaaaagtcgtttttagtatttggaggggcggttttttgaagcggcgttagtatttgtttgtttgcgtgtttatgttaaggtagtttttaagttagtttagtttggtaatatggataggtttgttttaggatttgagtattgttaggttatttttgagaggatcgatgttattttttgtggtttgtttgggaattataagagcgtacgttggggattgggtagggttatttgtaagttgtagtaaaataagaagagggtgtaagtttttatagggttttattttttttgtattgttggttaaatttgtttttgtttagaattttatattattttatttagttagttttaaatttttttttatttttgtagtggttgttgtttaaaggtaattatgattaatgagggtttaaaataaaggtatttaaatttttgtatttaattttatagatttttttaattttttaggattttaaatgtttgtggttagatttgcggggtaaaattttagaattacgttagttagtaaagtatgttgttattttttagatttagtagaaagaatatttttaattatatttaatagtattgataagattttttttttttttgtggtttttacggattattagaaagatattagaaagaagttttttttgtagttatgttatatttattatattgtttagagagtttaggagattttgtatgttagttaaagggtggggttgtgtggtagttagaatcgtggttttattagagatgtttatattttaatttttgagatttatgaatgtgttatggtatttggtgtatggagtatataaggatgttttttttttttaaaataaataagagtttataatttatataaaagttgagttgttttgttttggggtttttattgtggaaagtttgagagattagggatgtaaagttttttggaaaggtgagggtgtttgagtgtaaggataatgggggttgtgatggatttttatggaagtgagagaggtaagttttttatttttttaggagaaaagtagggtgttattttagagatgttttttgttgttattgtgtttttagggtaaatagtaatttttaatatttttatttttagtttgggtttgtgaaaatatagtttaatatattagtaaaatatgtaaaatatttaatttgtattttagttagttttaggtttgattttgtaaggggttgtgtttttgtttttgtttttattagaatggtaggggtaatagtaaaaaagaa

SEQ ID NO: 1772 - DNA, 2477 bp, Artificial Sequence
  chemically treated genomic DNA (Homo sapiens)
atggagttttttttttagtttttattcgaggattgataaagagaagttaggagagaaggaagttgatttagaagttgttgagaaggagggtattcgagaatagagaggttttgggagttagatttaggtaagagtttatggatttataaagggatatatatatatataatggaacgttgtttagtaagaaatgaataagttgtagatatagatatatataataatatgagtaaattttaaaaaaatttatgtaaaagaaaaataaaagaatgtatgatgattttatttatgtgaaaagtttaagaataagaaaaattgttttatggtgataaaagttagaagtatagtgatttgaggggtaggtattgatcgggatagagtttgagggaagtttttgggatgttagaatgttttttatatattgatttgggtaattaaataatagaaattaaaatagtgttattataagggagatgattgtttgaaagaaggtataagaaaaatttgggaggttataattatttttgtattttaattggggttatgtaaaatttattaaattgtgaattttaaatagaagtatttttatgtatataagtgatattttaaaagttaaaaaaaataaaaatatggatatgtgatttattggatgaagagaatgttattaattatttgaaagggaattttagaaaattgggagaaaatgagtttttatttttatattatttttttttattagtattattagatgtttgaatttttaatagttttttaaataagaggttgtttaggtatatattagttttttatttatgaggttttttatttttaatataattaatgtttttttaatagattttatattattatttgtgtaaagttaggagtaagtgtttaatatttgatagtattttttgtttataaagtttgtaattaaattaaggaggaggaagttttgtttttatggagttgagggttgagttgggagatgatattagtgttttttagttaggtattaaagcgttgcgaggataaggatgttaggagttatttatgagatttgggtagtagcggttttgagtttttaaggtttttttttaatatgtagatggtgaagtgatttttttttgtaattttgttatatttttaggtattaatttttagaataattttgttttttttttttttgttgtgagtatttgtaatagtttgattttttagaaatttttatagagagtaaaagtgttttaaatagttggagatggagttgtgcgtatgtattgtttgttttagatagaaattaaacgttttgagaaaaattaaacgttattaagacgtgaagtgagttttgatatgattaaggtgagtgtaatttagtttttaatattttatattatacgttttattttatttgattatttttttaattgtattttttatttattgattttttaggtttgtgggaatgtttttatttatttaattttagttattaatataaatatatttatatatagatagaaatacggttgtgttatttttatttttagatttttgtttgtgttattttttttaattagaatggttttttttttatttgttttttttgttttgttttgttttgttttgagatagagttttattttgttatttaggttggagtgtagtggtgtaatttcggtttattgaaatttttaatttttgggtttaagcgatttttttgttttagttttttaagtagttgggattataggtatttgttattacgtttagttaatttttgtatttttagtagagacgtggtttttttatgtttgttaggtaggttttaaattttttattttaggtgatttattttttttagttttttaaagggttgggattataggtttgagttattatgtttagtttttaattatttttaattaaattatgtttatttttttttttaaaattgttttatgacgatttattttcgtgtagtatagggttaggtatagagtagatgtttaatgttgattaaattttttacgatttatgcgtaatattgtttttatataataatggattgaggattaaaaaggattattttggggttagggtttaagttttttttgattttggtttattattagttagatgtgtgattttatttaatttttatggtttttaaatttattttattttgataatgaaagatttaagttataaaagtttttaaattttttttattaagggttatagggattttatgtgtattgaatgattattttaatagtgagtaatcggtagtagtttagtttttttatttttttttggtttgggtttatagtttttggatataatttaagtagatatagtattaaattttttagtaggtgttaattagaattagtttttgttggttgggaacggtgatttatttttgtaattttagtatattgggaggttaaggtaggaggattatttgaggttag

SEQ ID NO: 1773 - DNA, 2477 bp, Artificial Sequence
  chemically treated genomic DNA (Homo sapiens)
ttgattttaagtgatttttttgttttggttttttaatgtgttgggattataggaatgagttatcgtttttagttaataaagattaattttgattggtatttattggaggatttgatgttatatttatttaggttgtgtttaaggattgtgagtttaagttagggaagaatgagaaggttgggttattgtcgattgtttattgttagggtagttatttagtatatatagaatttttgtggtttttggtagagaaaatttagggatttttatgatttgaattttttattgttaaggtaaaataaatttgaggattatgaagattgagtagagttatatatttggttagtggtaagttaaggttaaggaaagtttgaattttggttttaaggtagttttttttgatttttagtttattattgtatgaaaatagtgttgcgtataaatcgtagaaagtttaattagtattgaatatttattttgtgtttagttttgtgttatacgaaagtaagtcgttatgaagtagttttgaaaagaaaaataggtatggtttagttaaaagtaattgaaggttgggtatggtggtttaagtttgtaattttagttttttgggaggttgaggagggtggattatttgagataaggagtttgagatttgtttggtaaatatggagaaattacgtttttattaaaagtataaaaattagttggacgtggtgataggtgtttgtaattttagttatttgggagattgaggtaggaaaatcgtttgaatttaagagttggaggttttagtgagtcgagattgtattattgtattttagtttgggtgatagggtgagattttgttttaaaataaaataaaataaaataaaaaaaataagtaaaaggaaagttattttagttgggaaaaatggtatagataaaagtttggaaatgagaatggtataatcgtgtttttgtttgtgtatgaatgtgtttgtgttggtggttagggttgggtgggtggaggtatttttatagatttggagggttagtgaatagaaaatgtagttaaaagggtgattaggtggggtgagacgtgtggtgtaaagtgttggaggttaggttatatttattttaattatattaaggtttattttacgttttagtaacgtttggttttttttaaaacgtttgatttttatttagagtagatagtatatgcgtatagttttatttttagttatttgaaatatttttattttttgtaggaatttttagggagttaaattgttataagtgtttatagtagggaaaagaaagatagaattgttttggagattgatgtttgaggatgtggtagaattataggaaggggttattttattatttatatgttgaaggagagttttggaagtttagggtcgttgttgtttaggttttatggatggtttttggtatttttgttttcgtagcgttttgatgtttggttggaaggtattgatgttattttttagtttagtttttagttttatgaaggtaagatttttttttttttaatttagttgtaaattttgtgagtagagggtgttgttagatgttaaatatttatttttggttttgtatagatgatggtgtggagtttgttaagagggtattggttgtgttagaagtgaaaagttttatggataagaaattggtgtgtgtttgaataattttttgtttgaaaaattgttaggaatttaagtatttgatggtgttgataagagggaatggtataggagtaaaggtttatttttttttaattttttgaggtttttttttaggtaattagtggtattttttttatttagtgagttatatatttatatttttgttttttttaatttttaaggtattatttatatgtataaaaatatttttgtttaaagtttatagtttaatgagttttatataattttagttaagatatagaaatggttataattttttaaattttttttatgtttttttttaggtagttattttttttatagtaatattattttgatttttgttatttaattatttaaattaatatatagagaatattttaatattttagaaattttttttaggttttgtttcggttagtatttgttttttaggttattatgtttttggtttttattattatagagtagttttttttgtttttgaattttttatataagtggggttattatgtatttttttattttttttttgtatgaatttttttgagatttatttatgttgttgtgtgtgtttgtgtttgtagtttgtttattttttgttgagtagcgttttattgtgtatatgtgtatttttttatggatttataagtttttatttaggtttggtttttagggtttttttattttcgaatgtttttttttttaatagtttttgagttagttttttttttttttgatttttttttgttaattttcgagtgaaggttggaaggggagttttat

SEQ ID NO: 1774 - DNA, 2439 bp, Artificial Sequence
  chemically treated genomic DNA (Homo sapiens)
ttttaaatagagatatgtttggtagagttaagaaggaatgtttatttttgtttggggaagttgtagaagtttttatagagaggatgatatttaatatgagttttgaaggatgattgcgagaagaaggtgaaggggtaggtatagaataaagaaaattatagaggtaaaagtattaaatgatgaaagatcgtgttgttttatgtttagaggtttggtaagttttttgttgtaagttttttgttgtaaagttgattagaatttaggtttttttttattgaaagttcgatgtttgggggtttaatagttgaaatatttgttttagggtttagaatttaaacgtggtggtaaagtattatttttgaaaagaaggaaaaatgtattgatttttaaaatttaaggtgaaaagggaatgtagatgtttatattttaatatattataaaagatttttggatatttattttttggtttatattttttttgtttttgtattgtagatatattttagtatatataggttgtatagaagataaagtattagttttaggatgaataaatgggaatattgatatttcgagaggtttttttagtatggaaatataatgatgtaattttatgtggaaataaaggtgttttatttttatttttatttattttaatacgttggtatatgtttgtttttaagtaattttttttttagatatggggtttaattatttgttttgtagatgacgtgtatattttgatatttgtatggaaataaggtaatttagttttagaaagttaggagggtggttaagattatagcgggaggatggagtaaatttttgggtttatgtttttttagacgaggggggtttatttttttttgaaatacgggtttatttatataagtaaatagattagaatatattataggaaggaatttttacggtatgcgttgttttttgttttgttttgtgaagataaaaggaggaagaaataaaagatttagagagtagagttggtatgaattatgaagttgttttatattaattatttttatcgtttttattttttgttgtttttttcgatataggttttgggttttttgttgggaaaaggtaggtcgaattggagttggttggggagtttattagtatttcgttagagtcgagggttgtttgttttttaggaggtattttgaattttttttttagttatttttttgtaattaatatgttgtttttgtagttgttttatttattgtttttgtagttatcggaggttataggtttttaagaagaattgttggggtttattaatatatatatttttattttataggaagtagtattttatggtttgtatattggttttttgggtttataatatagtagggtttagatttggggagaagtaggtacgagggatgtattgggagtagggaggaaggttttggttaggtgttttggtaatgtgggtaggaaaaggttttggtggtaatgggtgttgtatgaggaggttttatggttagtttaggtaaaggtttaggagttttaattgggaagtagattttgaagttatgttttttaatttagatttaggggttttgaaacgttgtgtttgagatgttttttttttattgatttttgtaatgtttgagttagtttgtagttgttatgtatatggttattagggattaggagaatttgagttttatatgtggtttggttggttttatttttttgggaggttattattatagttgagttataagattttgggattgggatttttatagatttttgggatagtaggttttggggagtgatattgattttaattttgtaggtgtagttttttagaagttagtttttttttgtaaaataaaggtatataaaggattatttttagtttttttaattattagtaggaatttaagagagagtttttttagttttgagagtttttaatagtattattttttttatttaaatttaataaagtaatgttgttttttaaggtttattgattataatttaatggagagttgaggttgttagatattaagatttagtattatagaagggtagagtatggtaggattttaggggaaaagaattagtataattttatataaaatggagtaataatatatttattttagaaaatttgttatgagaattatttagattatttttttaaagtattgtattatttagtttttttttagtgataaataatttcgaattttgatgtacgtagatatttgttttttgtttttagttagttttaggttgtgtttgaatttattttttatgttttttattttaggaattagtttgaaggagttgttgttgttaggggtaggtttttttagtgacggatggtagtaggtaatagagtaagtagggatatatgatattttttgaaattttttttgggaattggtatattat

SEQ ID NO: 1775 - DNA, 2439 bp, Artificial Sequence
  chemically treated genomic DNA (Homo sapiens)
atggtgtgttagtttttaggagagattttaggaggtattatgtgtttttgtttgttttgttgtttgttgttattcgttattggaagaatttgtttttggtagtaatagtttttttagattagtttttggaatgagaggtatagggaatagatttaaatatagtttggagttaattgagaataagaaataagtatttgcgtatattaagattcggggttgtttgttattaagaaaaagttaagtaatatagtgttttaaagagatgatttaggtaatttttatagtagattttttgaggtaggtgtattattattttattttgtatgaggttgtgttaattttttttttttgggattttgttatgttttgtttttttataatgttaagttttggtatttggtagttttagttttttattaggttgtggttagtgggttttgaagaatagtattgttttattggatttggataagaaggatgatgttattggagatttttagggttagagggatttttttttgggtttttgttggtgattggaagggttaagagtggttttttatatgtttttattttatagagaggaattggtttttggaaggttatatttgtagggttggagttaatgttattttttagaatttattgttttagaggtttatgaggattttagttttaggattttgtggtttagttgtagtgatgattttttagagggatggggttaattaggttatatgtagaatttaaatttttttggtttttagtggttatatgtatgatagttataagttggtttaggtattataggaattagtaagggaaaagtattttagatatagcgttttagggtttttaggtttgaattgggagatatggttttagggtttgttttttagttgagatttttgggtttttgtttgagttgattataggatttttttatgtaatatttattgttattaaggtttttttttgtttatattgttagagtatttggttaaggtttttttttttatttttagtatatttttcgtgtttgtttttttttagatttggattttgttgtgttatgagtttagaggattaatgtgtaaattatggaatgttgttttttgtgaagtgaagatgtgtatgttgataaattttaatagttttttttagaagtttgtagttttcgatggttgtaagggtagtggatggagtaattgtaaaagtagtatattgattgtaaggaagtaattgaagggagagtttaaaatgttttttggaaggtaggtagttttcggttttggcgaggtgttaatgagttttttagttagttttagttcgatttgtttttttttagtaaaagatttagggtttatgtcgagaagggtagtaggaagtgggggcgatggagatgattaatgtagagtagttttatggtttatattagttttgttttttaagttttttgtttttttttttttttatttttataaggtaaagtaaagagtagcgtatgtcgtgggaatttttttttgtaatgtgttttgatttgtttgtttgtataaatgagttcgtgttttagaagagagtgaatttttttcgtttaaagggatataaatttaaggatttgttttattttttcgttgtgattttggttatttttttggttttttaagattgagttattttgtttttatgtagatgttagaatgtatacgttatttgtagggtaggtggttaaattttatgtttagagagggagttgtttgaaagtaagtatgtgttagcgtattgaagtaagtgagggtggaagtaaagtatttttatttttatatgaggttgtattattgtgtttttatgttgagaaggtttttcgagatattagtgtttttatttatttattttaaaattggtattttgttttttatataatttgtgtatgttaaagtatgtttgtaatataaaaataaggaagatgtaggttaggagataagtatttagggattttttgtagtgtattaaaatatgaatatttgtattttttttttattttgaattttaaaaattagtatatttttttttttttttagagataatattttattattacgtttaagttttgggttttgaggtaaatattttagttgttgagtttttaagtatcggatttttaatgaaaggaaatttgagttttaattaattttgtagtaagaaatttgtaataagaaatttgttaaatttttaagtatgaaatagtacgattttttattatttgatgtttttatttttgtggttttttttgttttatgtttgtttttttatttttttttcgtagttattttttaaagtttatgttagatgttattttttttgtgaagatttttatagtttttttaagtagaaatgaatatttttttttggttttgttaaatatatttttatttaaaa

SEQ ID NO: 1776 - DNA, 2500 bp, Artificial Sequence
  chemically treated genomic DNA (Homo sapiens)
atttttttttaaaatttattttggaagaagagatgttttaggaaatataaatagattattgttttgtaattttaggaaaattaaagagaatttaagttttacgaaataagtaattaaagggtgagaaaatatgatagttgtttaagatcgggagtgtattagtttttcgataatatttttaggtttttttagggttgttttttgggtaattttttaggtattgtttttttattaatattagattcgttgtagtttttgaatatgtgacggtatagtatgtaaaaatgtatatattattagggttggaggatttttatttagttatcgttaatgataggataataaaaattaagtttacgtatttattaagtggtaaagttatagtttagattttaatttgattttatatgtataaagaggaaagaagagggatgaagataggatgttgggagggaaaaaggaggagaaaaaagggagagaaaatggaagatggaagtaatagttggggtgtagtaaaaaggggtattggattagttagaaaatttattatgaattaaatttgagtatatgtttttaatttttggggttatatgtttaataaatagaattgttgggttatatagttatttgatgtttaaattttgagaaattgttaattgttttttatattagttgtattatttggtatttttatcggtaatgtataaggttttaattttttagttttagtatttattatgttgtatgattttgaaaaagttattttatttatttgaattttattttttttttttttaaagagtaggggttagaattagttattttgtttttgtttatttatatattttttttttttatttaaattttgattttttattgtttatatttgtttttaagagttttttgatagtgtgaagtattgtaatgagtaagttttagttttgttttttagagttagaattattttaatttatatttttaagttatattaatgtatttttatttttatttatattttttagcgtatatttttttttttttgtttatttttttaatttttttgtaagtattattttgttttgtttgtcggttgttagttttttttttcgagtttttgcggagttgttagatttttgattatttttttatttttagtttataattgtttttttttggagtttagcgattgttaagtggtttttgtgaaattttattaggataatttttttgtttgtgtttttttttagttgggttgtttttagaaattttagttgtttttttatttataatcggtaaattataggttggtttttgagttatttaatatcgtatttatttataaatatgtttagatgagttttgaatttgtcgaattttgtagtttataagtaagagttaaatttattggagatttaatttatatgtttttttttgtagaaggtgttttttgtttatgcgggatttttattttttttataattttaggaatgatatttgttttttttttattttttttgtttttgtttatgtttattatttattttttttattagattgtgagatttatgagagtaaggagttggagtattttgtttaaagttgtatttttagtgtttggtatattataggtttttagtatatgtttgttgaatttatgaatacgtgttttttttttatagagttaattatggatttgtttatttgtttatttattagatttaaagttattttggggtagattgagatttatttgttatggtaatatttgttaaaaataaaattattttgatatttgttaaaatggtaaggaagatattatttaagattattgtaatggaggagagaaattaggtaaatataataaagatagttggggatttagagttaaggaatagagtgagtggatgaaaaattattaagaggagataagggtagggagatttttgttaaaataatttattagggtttttatcgaaggtaggttaggatgattagatagtgttattattcgaatgtttgtggaggttaaaattcgtatgttgaaacgttaatcgttaaggtgatggtattaagcgatgaggattttggggagatgaattaggttatgaaggaatgggattagtgtttttataaaagggattttagagagttgttttgttttttttattatatgaggatataattagaaggtgttattttttaatgaagagagattttacgagatatggaattttttagtattttgatttttaattttttagtttttataattgtgagtaataaatttttgttgttaagaattagtttatggtatttttttatagaagtttaattggattgatagatgttaaggggttgggggatttttagtaggttaatttagtagagtttttgttaaaattgggttagataggttatagataagatagttaaaattaaagtttagttgagaagggaatttagaggagtatgattaaaatttggttaaggggagagtttt

SEQ ID NO: 1777 - DNA, 2500 bp, Artificial Sequence
  chemically treated genomic DNA (Homo sapiens)
aagattttttttttgattaaattttagttatgtttttttgaattttttttttaattaggttttgattttggttattttgtttgtggtttgtttagtttagttttagtaagaattttgttaggttagtttattgaggattttttaattttttgatatttgttagtttagttgggtttttataaaaaagtattataaattaatttttagtaatagaaatttattgtttatagttgtagaggttgggaagttgaagattaaggtgttagaagattttatatttcgtgagatttttttttattaaaaaatgatattttttagttgtgtttttatgtgatggaagaggtaaggtagttttttggggttttttttataaggatattaattttatttttttatgatttaatttatttttttaaagtttttatcgtttaatattattattttggcggttagcgttttaatatacgagttttggtttttataaatattcggatgatagtattatttgattattttggtttgttttcggtaagaattttggtaagttgttttagtaagaatttttttatttttgtttttttttggtaattttttatttatttattttgttttttggttttaaatttttagttgtttttgttatatttgtttaattttttttttttattgtaataattttgaataatgttttttttattattttaataagtgttagagtaattttatttttaataagtgttattatggtaggtaaattttagtttgttttaaagtagttttgggtttaataggtagataggtaggtagatttatgattgattttatggaagaggaatacgtatttatgaatttaataaatatgtattgagggtttgtaatatgttaggtattgaggatatagttttggataagatattttagttttttgtttttatgaattttatagtttgatgagagagatagatgataaatataaatagaaatagaaaaagtaaaaagggggtaggtgttatttttgggattgtagagggaataggggtttcgtataaataggagatattttttgtaggagaagatatatgagttgaatttttagtgaatttaatttttgtttgtgggttataagattcgataggtttagagtttatttaagtatgtttgtgaataagtacgatgttggatgatttaggagttagtttatgatttgtcgattgtgagtaggaagatagttgaggtttttagaggtagtttagttgagaggagatatagatagggagattattttaataggattttataaagattatttagtagtcgttgagttttagggaaaaatagttatgagttgagggtggggaaatagttaagaatttggtaatttcgtagaagttcggagagaaaagttgatagtcgatagatagaataagatgatgtttgtaaaaaggttaaaagaatagataagagagaaaaaatgtacgttgagagatatggatggaaatggaagtgtattaatataatttggggatatggattaagataattttagttttaaggagtagagttaggatttatttattatagtattttatattgttaggaaatttttggaaatagatgtgggtagtggaaggttaggatttggatggaaagaaagaatgtgtgaataggtagaaataggatagttagttttaatttttattttttagagaaaaagaaagtgaggtttagataaataaaatgatttttttagagttatgtaatatagtgagtgttagagttaagagattagaattttgtatattgtcgatgggaatgttaaatggtgtagttaatgtggaaaatagttggtaattttttaaaatttaaatattaagtgattatgtgatttaataattttgtttgttgggtatgtagttttagaaattgaaggtatgtatttagatttgatttatggtaggttttttggttagtttagtgtttttttttattgtattttagttgttgtttttattttttattttttttttttttttttttttttttttttttttttaatattttatttttatttttttttttttttttttatatatgtagggttaggttggggtttaagttatagttttgttatttaataaatacgtgaatttggtttttattgttttgttattgacgatgattagatgagggttttttagttttaatagtatatgtatttttatatattgtgtcgttatatgtttaggaattgtagcggatttagtattgatgagaggatagtatttgggaggttgtttagaagataattttgggggaatttgggggtgttgtcgagaagttgatatattttcggttttgaataattgttatgtttttttattttttaattgtttgtttcgtagagtttaaattttttttaatttttttgggattataaagtagtgatttatttatgttttttggagtatttttttttttagggtgagttttaaaaaaaaat

SEQ ID NO: 1778 - DNA, 2473 bp, Artificial Sequence
  chemically treated genomic DNA (Homo sapiens)
tttaaattaaaggttgatacgtttttgttttatattttatttaatgttggtaatttaatgagggatattaggataaaatcgagaatgcgcggtttgtgtttgtgaatttttattatttggttttagttagttttttattttttatatttgttaagataaatttttttaaatttttttttttttggttagaagtgatttttatatttagtttcgattatggaaggttgttataggttattttttttgttgggtaagttttttttttttttaagtttatgtttaattgttatattttttttgaggattttttttagtttttttttttatttttattgttatatttaatagagcggagttgttttttttggtattttattgtcgatagtttatttttgagttatagtaataacggttatttgattttatttatttgttgatttgtttatttttttattagtttatgattttttttagggtaagatttatttttatttgatttatttttgtattttagattttagttaggtaaataatagggatttagtggagagagagatggataggtgggtaggtgaagatatagatgtacggttgaatatataaattggtaaagttttaaatgaattaataagtggatattttattgagagatttaaatgtagaagggtgttaggatataagaggaacggttgcgagttatgaaaatgggttttatggggtaaattaaaagtttattgaaggtaaatgtattataataagattggtattttttggagttttcgggttgattaattatttttatatgtattatttatttattttttataatgatttggtgaggtaatgagttattattagtttaatgtataaggaagttgaggtttgtggatattagttgaagttttatagttagcgaatggtaggttagggtattagggtttaggtttgtttgttttttttatttattttttgttattataagttttttgatttttagttttttgatttgttttagtgggatttttttgcgtttttgttttagttgtagaggatttattaggtatttagagagaaatgagtggtgttgtgaatattcgattgtgtttatgtggaatttatatatatagtttgtttgaaaatgattgataggatggaaattgataagttattattcgtttcgggtattagcgatgattggttaatatgaatattgtgttgattttcgttagatagaagaagatgttatttgtcgttaatggggtgttatacgtatatttgtttaaaggaaaatgtttttttggtgattgtttttaatttttattttattttatagttataaaaaagaaaagatttagtagaaaggatgaatttatttaggggtaggatggaaaggtattttttttatttatttttttttttttttattagaataattaaaatttagtgaaaatgttggtgtaagttagaagagggggatttgggttttaagagtagttaggtattttgggttttagattagagttttagaatttagtagttatgtttataaggtagttaaagtttagttagtattatcggtttttcggttagttatatttgtttttgtttaataatgatgatttgaacgtatatgtataaataataatagataatattattgagtattttattatgaattatggaatgtgttaggtaaagacgttattttacgtaagttataaaattaatttatggggtaggtgtagatttataaattttgatttaagaattttgaatttttaaaagttttgaaaattaaaatattttttcgtaagtttggtatagatttatttggtgttaagatttgagttaaagtgatatatattgattaatagttttttttattttttttttattattaatatttatattttttgttataaaaatattaatatgtttgatttaagggtgttattatagtttttgttgagggatgttattaataaatatggtatatttattatattgtttttttttaaaagttaaataaatttaaattcgagtatatttggttttaaggattgtagataagaaattgagaatttgttaaatttattatatggatgaggaaataggtttagaaaaggtaggaaatttttttgaggttatagagtttaaaagtagtagatgaaggtttatatttaggtagttttgttttagagttggttcggttaattagtgggttttgttatttttgataaatgtttttgttagttggttttagttttatttttttagcgtagtagtttagtttttgtttgtttttgagtaagaagtaagtatgtgtttttttagtcgaggtataaggtaatttttagggtattcggattataattataatgttttattaatataaattttaggatatagatttgtgttttaaattaagagttaaatataataataatattagttttaggtaattattagttaa

SEQ ID NO: 1779 - DNA, 2473 bp, Artificial Sequence
  chemically treated genomic DNA (Homo sapiens)
ttgattggtagttatttaagattgatgttattgttgtgtttgatttttgatttgaaatataggtttatattttgagatttatattaataaagtattgtaattatgattcggatattttggggattgttttgtatttcgattaagaaggtatatgtttattttttgtttaagaataaatagggattgaattgttgcgttgggaggatggggttgagattagttagtaggggtatttgttaaaggtagtaaagtttattgattaatcgggttagttttggagtaaggttgtttagatgtaaatttttatttgttgtttttgagttttgtaattttaggaaagttttttattttttttgagtttgtttttttatttatataatgggtttaataggtttttaattttttgtttgtagtttttggggttaaatgtgttcggatttagatttatttaatttttaaaggaaagtaatatagtaaatgtattatatttattaataatattttttagtagaggttgtggtagtatttttaaattaagtatgttgatatttttgtagtaaaaagtatgaatattaatagtaagaaggagatagaaaaaattattagttaatgtatattattttaatttaaattttagtattaaataagtttgtattaaatttacgaaaaaatgttttggtttttaaagtttttgaggatttagaatttttaaattagggtttgtggatttgtatttgttttataggttgattttatggtttacgtggagtaacgtttttatttagtatattttatagtttatagtaaagtgtttagtaatgttatttgttattatttgtatatgtacgtttaaattattattgttgagtagaggtaagtatagttggtcgagagatcggtggtattggttggattttggttattttgtgggtataattgttggattttgaggttttgatttgaagtttagagtatttggttgtttttagaatttaggttttttttttttgatttgtattagtatttttattgggttttggttgttttggtaaagaaagaaggaaataaatgagaagaatgtttttttattttatttttaggtggatttattttttttgttgaatttttttttttttatggttataaaatgaggtgaaaattgagaataattattaaaagagtatttttttttaggtaagtgtacgtgtgatattttattaacgataagtgatatttttttttatttagcggaaattaatataatatttatgttaattagttatcgttggtgttcgaagcggatgatgatttgttagtttttattttattagttatttttaggtaaattgtgtgtgtggattttatatggatatagtcgaatgtttataatattatttatttttttttaagtgtttgatgggttttttataattagagtagagacgtaggagggttttattggggtagattagagggttggagattagaaggtttgtgatgatagaaggtggatggaagaggtaggtagatttaggttttggtgttttggtttgttattcgttggttgtgagattttagttgatgtttataagttttagtttttttgtgtattgagttaatagtaatttattattttattaggttattgtgaggagtaaatgaatgatgtatatgaaagtgattgattagttcggaaattttaggaaatgttagttttgttatgatgtatttgtttttagtggatttttgatttgttttatggagtttatttttataattcgtagtcgttttttttatgttttggtatttttttgtatttaagttttttagtgaggtgtttatttattagtttatttggaattttgttagtttgtgtgtttaatcgtatatttgtgtttttatttatttatttatttatttttttttttattggatttttgttgtttgtttggttaagatttgggatataaagatgaattagataaggatgaattttgttttaaaggagattataggttaatggagaaatggataggttaatagatgagtggagttaggtggtcgttgttgttgtaatttaggagtgggttatcgataatgggatgttagaggagataatttcgttttgttaagtgtggtagtagaggtggagggaagagttaaaggaagtttttaaaaaggatatgatagttgaatatagatttgaaagggggaagggtttatttagtaaaaggaatagtttgtgatagttttttataatcggggttgaatgtggaggttatttttggttaggggagaggggatttgggggaatttgttttggtagatataagggatgggaggttagttggggttaggtggtaggaatttataagtatagatcgcgtattttcgattttattttgatgttttttattgggttgttagtattgagtgaagtgtagggtaagaacgtattagtttttggtttgag

SEQ ID NO: 1780 - DNA, 2408 bp, Artificial Sequence
  chemically treated genomic DNA (Homo sapiens)
gttgatttatataggatagggagtgggtttttggttttggttttgtttagtttaggatattttttttagttgagttagtttgggtcgggatagatagggttgttttacgtatattttaagatagttttaggttagggcgttgtttagatttgatgatttaggagtgtatttttggatttagttttgttttttaaatattttttatagatttattttgttgttagtattatgtagatatcgagaggtataatttttatttttatagattatttattttagtatttataattattatttagttattattttgtggagatatagttgattaggatagagttttaggtttatttttattaaatcgtttgttaaaagaaagtgttaaaggtttcgggtagttttatagtatattagttattttgtttttattttgtagttttatcgagtgggaataatgtatttttaagagtataggaaatatttggatgtttattattttttttttagtttttgggtttaggtttttgtttgtttagagaatagtagttttgagtaaagtttattattttattaattaatttaaatattaaagtgtttagtatttgttaggagagttggggttttttattaagtttaatatattatgtttttttcgttgaaagatatttttattttttttagacgttataattgtaggagttgggggtttgtttagaattatagaatgttaggatttaaggagtttttgttttttcgttttatataatttgaatttgagttcggaatagggtagggatttgtttaaggttatatagagcgttcgttatataatttaggatagaaagaggttaggtttttgtttcggatattttaggtagttttttatttagttgagattgttattgataaaggagggtgtttgagaaggaatatttgtttttaagataaggttattattattgtaggagaggtttaggaaagttgttttagagttatttttgtattttttttattgggtttttggggagaggtaggtggaatttgatttttatgtatttttttttatttttatagagggagaatgttggattttcggaagggagcggggttaggttataaggaaggtagtggttaggaattattttttttcggggagtggggagaatgttgaacgtttggtattcgtgggggtggaaagttagagaggttaagtgttgtttagagatgattttatgattcgggaattaggagttgtcgggttgttggtgttggaatttaagttttcgtatatagttcgtgtttgtggttttggtttggtagagtaggaggaaggttttttatggttgtttaagtgtttatatttaagggtagggtttttgtgtttttatttttattttttgtggtaaattttttaagaatttaagtgataggttttaattaagtatatagtttgtttaggtttttttaatagtttttttttgtagagatggaaataagggtttagaaaagtaaagttatttgtttaaggttatataagtaggaagtagttatattgggttagaatttaggttttattgatttggatatttaattataaatatataaatatacgtatgaatatatatgtatacggggttattagtttgttttaggttttaagggagttttgttaagtaggggggttaatttagtcgggagaaagaaagaatggtatattttggttagttgttgattaggttaaagtttttaataggggttgtagttttattaggagatttgttttaggttgagagatttttttttattttttattgtttttaggagttatggaaggttgtttatgtatttagttttttttttagtatgtgaaagtgttaagaggtattttaaaataatttatgggattagtatgtttattggttgttaggaattattttcgttttatattagagaaatgaaggttatgagcgaaagtggggcgtgaagattttgtagttaagttagtagtaaaattaaggttgaaattaagatttatttttagtttagttttttttgtgggtatttgtttatttttaattttttatttttatatttagtttttaaaaaagaaattagtttagtttgaagttatttcggggtttcgcggtacggtttggattcgattttattttaaagttttgaaaagatggagtttttaaaggttgtatttagatgagtttaggattttttttttatagtaagttaaggggttgggaagaaattttttttagtttttagtggtgataggaggatatagggaattaaatttttttttgagttttggaagttttttttttgttttgttttggttttttttttatttatgatttttgataagagggaaggtaattttaaagtggataagagttatt

SEQ ID NO: 1781 - DNA, 2408 bp, Artificial Sequence
  chemically treated genomic DNA (Homo sapiens)
aatggtttttatttattttggagttgtttttttttttgttagaggttatgggtggagaagggattaaaatagggtagagagggggtttttagagtttaaggagagatttaattttttgtgtttttttattattattgggagttggaagaagtttttttttagttttttgatttgttgtaggagggaaattttgggtttatttaaatgtagtttttgaagattttatttttttagagttttgaaataggatcgaatttaggtcgtgtcgcggagtttcggggtgattttagattagattagttttttttttggaaattgagtataaaaatgaagggttaaggatgaataggtgtttataaagagggttgaattgggaataaattttggttttagttttggttttgttgttgatttggttgtaagatttttacgttttattttcgtttatagtttttatttttttaatgtaaaacggaggtaatttttaatagttagtgggtatgttaattttatgggttgttttgaaatattttttagtatttttatatattgaaagagaggttggatgtataaataattttttatggtttttgggggtagtgaggggtgggaaaaggttttttagtttgagataagttttttgatggaattatagtttttgttgaggattttgatttggttaatagttggttaaagtgtattattttttttttttttcggttagattgatttttttatttaatagggtttttttggagtttggggtaggttggtgatttcgtgtatatatgtgtttatgcgtgtgtttatgtgtttgtggttaaatgtttaggttagtgaagtttgggttttggtttagtgtggttattttttgtttgtgtggttttggataagtgattttatttttttgagtttttgtttttatttttgtaaaaagggattattaaaaggatttagataggttgtgtgtttggttaaggtttgttatttgggtttttgggggatttgttataggagatggaggtaggagtatagggattttgtttttaggtataggtatttgggtagttatgaggagttttttttttgttttgttaaattaaagttataggtacgggttatgtgcgggggtttgaattttagtattagtagttcggtagtttttgattttcgagttatgaagttatttttgagtagtatttaatttttttggttttttatttttacgggtgttaagcgtttagtattttttttatttttcgggagagagtgatttttggttattgttttttttgtggtttgatttcgttttttttcgggaatttagtattttttttttgtgggggtggaagagggtgtatgagggttaggttttatttgtttttttttagaagtttagtggggagagtataggagtggttttgaagtagtttttttgggttttttttgtaatgataataattttattttagggatagatgtttttttttagatatttttttttgttaatggtagttttagttgagtgaaggattgtttggggtgttcgaaatagagatttgatttttttttattttgagttatgtagcgaacgttttgtgtgattttgggtaagtttttgttttgtttcgggtttagatttaagttgtgtgaaacgggaggataggagttttttgggttttggtattttgtgattttaagtagatttttagtttttgtagttatggcgtttggagaagatgggaatgttttttagcgggaggggtatggtgtattgaatttaatgaaaaattttaatttttttggtaaatattaggtattttagtgtttgaattaattagtagaataatgaattttgtttagagttgttgttttttgggtaaatagaagtttgagtttagaagttggaggaagggtgatgggtatttaaatgttttttgtgtttttgagggtatattgtttttattcggtggagttataggatgggagtagggtaattgatgtattgtagggttgttcgggatttttgatatttttttttggtaagcggtttggtgggagtggatttgagattttgttttgattagttgtgtttttatagggtagtggttgagtgatgattatgggtattggagtggatggtttgtgagggtagggattgtgtttttcggtgtttgtatggtgttggtagtagagtagatttgtgggagatgtttggaaggtaagattgaatttaggagtatatttttgagttattaggtttgggtagcgttttgatttgaggttgttttagggtgtgcgtgaggtagttttgtttgtttcggtttagattgatttagttgggaaaagtattttggattgggtaagattagaattaggagtttattttttgttttgtgtgaattagt

SEQ ID NO: 1782 - DNA, 2498 bp, Artificial Sequence
  chemically treated genomic DNA (Homo sapiens)
gttgtgtattaaggtagatttataagtgtgagttttgttattttttaattatatgagtttgggagtttattttatttttgaaatttttagtttttttttttgtgattagggttggtagtattttgtagggtgatgaggattaagaggaatgtatttgtgtgtgtaagggatttagtacgtgattaatgaatagtggttgtgattaatttttatttgttttttttttggttagtgggattagtgtttaaaggattagaggtttgggaaaatttgtagaggtagttttgttgttggaaggaagttagtttggggatagggagatggtgttttgtaaattgtaaaggaatataatttataataggttattattttgtttttgagtttagagattttttaataattaattaggtttttttagattgtgaaaaaaagatatagagatagttagagatttgtttaaggttatatagttttgattatttgttttaagtagatagaggtaaagattatttttatttttttcgaaggtgtaaatgatagtgattagaaatatttgaaattttatttggggatttgggtttttagggataaaataaataaataaaaatttagaaggtaaaaagaaattatatattaatttatggtttggtgttttggtgtttgaatggttaaattaggtttgggggtgggggtggagtgagggtttaaatgtcgtttttaaggtcgggttattttgaatataattatttaggagagagttaggtttggtattgtttgtaattagttttttattaagttttagggtagtttatttttatagtaagaattttaggattttagggtgttagttagaaatgggggaagggtttaggagtttttggatgtttttttgttaggagttgatttagtatttttgttattaattttttggatgatcgtggataatttttttttttgagttttagttttttaatttgtaaaagataggttttaaagagataagtttttttttgttttagtttagtaattaagttgggtattgtttcgattatcggtggagatagttaggagggggttggtttttttagggttttagagatagaggtgtattgaagttggagtttgtaatttaggtagtagattcgaaatttttgttggattcgagggttagggaggttttcgggatgtaaataaattttttgtgtttttagagtagagtagagagtttacgttgtagttttattttagttgattagattagttttgggtgttggttttttgtttttttttagttttttttatcgatttttaaggaagttattttttagattaggttagtttgttttatagacggtttcggtagggtttttttaaggtaaggagtatttttattttgggtagtcgggttagttatgtgttatatttgtttttacgtttagaggttagagtgatatcgttagttttcgtaggtttggttattgattgttgggttttattaagttattgtttttatatatattagtttttttttgttttttttttttattattttaggtgttatttgattagtagttttttttattgtgttagagaaaattggagtagtcgagttttcgggtttggaggatagggggaggggtgagatgtagtttgaaggggtgggggtcgttgaataggaaggtttgggttgaaggtgggggttgggggaagtaggaggtaagaataaggttgggaagtgggggagggaggaaggatggttgtagaaaggttaaagttagaaagaattgttgagattagagtgattttttggggagtattgtagttttttgaaaaggataaaaaggtttaaattttaataattgtaatttttagtttatatttttaatatatgtatagatattatttttttaaagttaaattttggtcgggttaagaattttcgtttaggtgttaataaagttagaattttataagtttgttaaatagcgatgatgatttttgagtgttataggtgttttatagaggatattggagtttatattaataaagtgacgtattaattgtgtgtgtttttgggtgagtagtagagttaggacgggggttggagttttttgtatttttttttttagttatttagtttttagtagatgggattagagaggttttagtgagatgtaagaatgtgtttaaggttattattgtgttagttaatgataaataagtttaagaagttaggtttatttttttaaggttaaatgagattttaattgttgatatatgtgtttttttttttttttttttagggtattatgtagtgaaaatatacgagaaattggttttttagaatattgtattttttttgtttattaatattttattttttaaagtgttatttgtaattatttagtttttttaagggtagaaattttgtttttttagtataggagggtgattttaggttttggatagtgtttagagtggtttgatatttttggtaa

SEQ ID NO: 1783 - DNA, 2498 bp, Artificial Sequence
  chemically treated genomic DNA (Homo sapiens)
ttgttaagggtattagattattttggatattgtttaggatttggggttatttttttgtgttggaggggtagagtttttatttttaaggaggttgagtgattgtaaatagtattttgaggggtggggtgttggtggatagaaaaggtatagtgttttgaaaagttagtttttcgtatgtttttattgtatggtgttttagagagggaggagagagaatatatatgttaatagttggggttttatttaattttagaagaataagtttgattttttgggtttgtttgttattaattaatatagtggtgattttgggtatatttttgtattttattggggtttttttggttttatttgttgaaggttgggtgattgaaaaagagggtatagaaaattttagttttcgttttagttttgttgtttatttagggatatatatagttaatacgttattttgttgatgtgaattttagtgttttttataaaatatttgtggtatttaaaggttattatcgttgtttggtaaatttgtaaagttttggttttattagtatttagacgagggtttttaattcggttagagtttggttttggggaggtggtgtttgtgtatatgttgaaaatgtaaattaagagttatagttattggggtttagatttttttattttttttagggggttgtagtattttttaaaaggttattttgattttagtagttttttttggttttgatttttttatagttatttttttttttttttttattttttagttttgtttttgttttttgttttttttaatttttatttttagtttagatttttttatttagcggtttttatttttttaggttgtattttatttttttttttgttttttaggttcgggagttcggttgttttagttttttttggtatagtagaagaggttgttggttaggtgatatttggggtaatggaaaggggaggtagggagaggttggtatgtgtggaaatagtgatttggtgaagtttagtagttagtggttaggtttgcggggattggcggtgttattttagtttttgggcgtgggggtagatgtggtatatggttggttcggttatttagagtggggatattttttgttttggagaagttttgtcggagtcgtttgtgggatagattgatttggtttggaggatggtttttttgggggtcggtgagggaggttgggaagaggtaggaagttagtatttagggttgatttaattagttgagataaggttgtagcgtgggttttttattttgttttgagaatataggaggtttgtttatatttcgagagtttttttagttttcggatttagtagggatttcggatttgttgtttagattataagttttaattttaatgtatttttgtttttgaggttttgagggagttagtttttttttggttgtttttatcggtaatcggagtaatgtttagtttggttattgggttgggatagagggaggtttgtttttttgagatttgttttttatagattggaaaattgaggtttagagaagggaattgtttacgattatttagggagttagtaataagggtgttgggttagtttttggtagggagatatttagaggtttttgaattttttttttatttttagttggtattttaggattttggagtttttgttgtgggaatgggttgttttgaggtttggtgaaaagttggttgtaggtagtgttaggtttggtttttttttgagtgattgtgtttagagtaattcgattttgaaggcgatatttgaatttttattttatttttatttttagatttggtttaattatttaggtattagagtattagattatggattggtgtgtagtttttttttattttttagatttttatttatttattttgtttttggggatttaggtttttaagtagaattttaggtgtttttggttattgttatttgtattttcggggaaaataaaaatggtttttatttttgtttgtttaggataggtggttaaagttgtgtgattttgggtaggtttttgattatttttgtattttttttttatagtttgaagggatttgattggttgttgaaaagtttttgggtttagaagtaaaatgataatttattatagattatatttttttatagtttgtaaagtattatttttttgtttttaggttagtttttttttagtaatagaattgtttttgtaagtttttttaggtttttgattttttgagtattgattttattggttaggaggaaggtaggtaggggttaattatagttattatttattgattacgtgttgggttttttgtatatataaatgtattttttttaatttttattattttgtaaggtgttattagttttagttataaaagaggaaattgaggattttagagatgaaataaatttttaagtttatatagttaggaagtggtagaatttatatttgtgaatttgttttgatgtataat

SEQ ID NO: 1784 - DNA, 2452 bp, Artificial Sequence
  chemically treated genomic DNA (Homo sapiens)
tgaatatgtgtgtgtgtgtgagtgtacgtgagtgtgagtttgtaagttttttgagggttaagtatttggttgtttattttatttttttagtatttagtacggggtatagtattaaatatattgaataaatgaataataaaatatataatagttattagatttttttagttgttttttaggatttttggaggatttagttatttttaaattttaggtatagatggatagtcgttgggaatttgaaatattttaggtatagttttagattttttattgttgttttattgatgttttattttgtgtattagagtttatttttttttcgtcgtgtagatgggtaaattgaggtttagagagagtttaaattttatttaaagttatataggtaatgagagacggttttaaagtttgatattatatttagaattttttttattatattaagtgtggttagttttggaggagaaattttttttaagttttattttttgattataaataatatgaaaaatataagagcgatgtttttttattttagggggttgaaaaatgggatttatgaagttattaattatttttttttaattaaattaaaattaaatgtgagtataggtacgttttttttattaaagataattaaacggatagtgcggttacgtaaataaaatgagtttaggatttaaacggaaagtaaattaaataaaaagttttttcgggatgaggggtttgtttacgattgtgttattcgtaaattaggagtttattaattttttttaaatattagtaatttaattaaatttgtttttttttttattttaattttgtcgtatatttaaaatagattttattatttataggagttggttatgagtgttgattttataattttatttttttttaaaaaattaaaaattttataaaatttatatttagttgatagaggtttcgggggaaattatagttcggaaaacggattagttagagtatttagattttatggaaatgttgggaggttgttttgagggtgggtgtcgtgagaaggttcggggagaggtgggttagggttgttaatgggggtagggtcgcggaaggagttgtttgtgtggggttttggcgataatcgcggggtttagcggtttttgtgggtgttgataggagtttggcggtgagtgatggaggaggcggttgtaaaataggttatcgtcgggcgttcggggtttattttgcggatggtgttgttgttaagttatttttagaattcgataaggacggatgtttcgagcggttttttggggtggggggaattaggaagtagtgaattaattgaaatcgtggtgaagttttttttttttgaagagtgagagagcgtggtatgagagtgtgtgtttgtatttatatgtgtttatataagtattcgtatatacgagggatttagttggaaaggggataggtggtttttaaaagtttaagtttatatttttagggttggggggtggggtgggttaatgataatttttttttttatttagtggtaagaaattatattgttaggttgttaaaaagattttttgggatttggggcgggagtttatagttagatggtatatttaagatggtggaattatttataatagtgagatttataaggtgagatttaataatataaaagtgaatatttattgagtacgtgttaggatttagagagtattttaggtttttgataaatgttaatttattgattttttaacgttagattttgagttaggttttagtaatagttttatttaatagataaggaaattgaggtatagagagggtaaaaaagttggttttttgtattcgtgggttttgtattagtgaatgtagttaatttaggattaaaaatatttagaaataaaattgggtttgtattgaatgtgtatagacgttttttttgttattttttaaataatatagtataataattatttgtatagtatttatattgtattaggtattattaatattttagagatgatttaaagtatatgggaggatgtgtataggttatcggtaaatgttatgttattttatattgggttttggtatttatgggaggttttggaattaattttttatcgagagatattgagggataattgtaatgtgtttaaagttaggaagattataagtagtcgagttgggatttgagtttacgtagtatagttttaggtggttttttaattatatataatgttattttttttaagaaagtgtatattgggtaaatatttgttaagagatggaaattttttttttttttttggatggagtgtttttttggaggtggttttgagagtaagagagtagggtaggggttttgggtgaaggtgatagagaaggagggtgataagttataatagtagtggtaatgtggggattggttgttgggggaaatagaaagggttttggg

SEQ ID NO: 1785 - DNA, 2452 bp, Artificial Sequence
  chemically treated genomic DNA (Homo sapiens)
tttagggttttttttgttttttttagtaattagtttttatattgttattgttgttgtgatttgttattttttttttttattatttttatttagagtttttgttttgtttttttatttttaaggttatttttagaaaaatattttatttagggagggagaagaagtttttattttttagtaaatatttgtttaatgtatatttttttaagagaggtggtattgtgtgtggttaaagggttatttggagttgtattgcgtgggtttaaattttagttcggttgtttatgatttttttgattttgggtatattatagttgttttttagtatttttcgatgggggattggttttaggattttttatggatattaaaatttaatataaaatagtataatatttgtcgataatttatgtatatttttttatatattttaaattatttttagagtattgataatatttaatatagtgtaaatattatgtaagtagttgttatattatattgtttggagaatgataagaaaaacgtttgtatatatttagtatagatttaattttgtttttgaatgtttttgattttgggttggttgtatttattgatgtagaatttacggatatagagggttaatttttttattttttttgtgttttagtttttttatttgttaagtgaggttattattgggatttagtttaaagtttggcgttggggagttagtgagttagtatttgttaagaatttagaatattttttgggttttggtacgtgtttagtaagtatttatttttatgttgttaagttttattttgtaagttttattattatggatagttttattattttgagtgtattatttaattgtgaattttcgttttaaattttaaaaagtttttttggtaatttaatagtatagttttttattattaagtgggggggaaggttgttattagtttattttattttttaattttaggaatatgagtttgggtttttaaaagttatttgttttttttttagttgagtttttcgtatgtacgagtgtttgtgtgggtatatatgaatgtaaatatatatttttatattacgtttttttattttttaggaagaaaggattttattacggttttagttaatttattgttttttggttttttttattttagggagtcgttcggagtattcgtttttgtcgaattttaaaggtagtttagtaatagtattattcgtagagtgaatttcgggcgttcgacggtaatttattttataatcgttttttttattatttatcgttaggtttttgttagtatttataggaatcgttgggtttcgcggttgtcgttaaggttttatataaatagtttttttcgcggttttgtttttattggtaattttggtttattttttttcgaatttttttacgatatttatttttaaagtaattttttagtatttttataaaatttgggtattttgattaattcgtttttcgaattataatttttttcgaggtttttgttagttggatgtggattttgtaggatttttaattttttaaaaaaagatagaattatggggttagtatttatgattaatttttgtaggtggtgagatttattttagatatacggtaggattaaagtggggaggagagtagatttaattaagttgttaatatttaaagaaaattgatgaatttttggtttacgagtagtatagtcgtgaatagattttttatttcggggaggttttttatttgatttgtttttcgtttaaattttggatttattttatttgcgtagtcgtattgttcgtttaattgtttttaataaggaaaacgtatttatgtttatatttaattttgatttaattaggaggaagtaattaatggttttataaattttattttttagttttttgggatgagaaaatatcgtttttgtgttttttatgttgtttatgattaagggatggggtttgagggggattttttttttagggttggttatatttgatgtggtagaaagaattttgaatgtggtgttaggttttggggtcgttttttattatttgtgtgattttaggtggggtttagattttttttgggttttagtttgtttatttatacgacggggagagagtaagttttgatgtataagatgagatattaatgagatagtagtaaaaggtttagaattgtgtttggagtgttttaggtttttagcgattgtttatttgtatttgggatttaagagtggttgaattttttagaaattttagaagataattgggggagtttgatgattgttgtatattttattatttatttatttaatatgtttggtgttgtgtttcgtgttgggtgttggggagatggaataaatagttagatgtttggtttttaaggagtttgtaagtttatatttacgtgtatttatatatatatatatattta

SEQ ID NO: 1786 - DNA, 2489 bp, Artificial Sequence
  chemically treated genomic DNA (Homo sapiens)
atttttttttttttagttatgtataatatatttatataaaaattttatattttaatgggattttataaatatatatatggtattatattgggtgtattatttttttttttttttaaatagagttttgttttgttatttaggttggagtgtagtggcgttattttagtttattgtaatttttattttttgggtttaagcgattttttttttttagttttttaagtagttgggattataggtgtatgttattatgtttggttaattttttgtatttttaatagagatagggttttattatgttggttaggttggtttttaatttttgattttaagttatttgtttattttggttttttaaagtgttgggattatagatgtaagttatcgcgtttagtcggatgtatgattttttaatttgcgttttttatattttaggatgttttggaattatttttatgtgttagtataaaaatttatttttttggtttgggacgtggtttacgtttgtaattttcgtattttgggagttcgaggtaggggggttatttgaggtcgggagtttaagatcggtttgattaagatggagaaatttcgtttttattaaaaatataaaattagttaggcgtggtggtgtatgtttgtaattttagttatttagaaggttgaggtaggagaattgtttgaatttgggaggaagaggttgtagtgagtcgagattgtattattatattttagtttgggtaataagagtaaaatattgttttaaaaaaaaaaaaaaaaaaaaaatttattttttttttttgtattgttgggtaggattttattgaatggatatattatattttatttagttacgattttattaagggaattttaggtgttttttagttttttattaggatgatggatatttttatataaggttttttgtaggtgttattttgggttagaaagtaaaaatttttcgagacggggattgtattaggtttcggtttttagttttattgtattttatttgtgttaaggttacgggaatttttttatcgtttttgttagtagatgttatttagtatttattttaagatatttatattttgattcggaagagattagaagtattttgtagttcgtgtggataagttttttttttgatttatagtttttttattttcgtatttaggagagggatggtagcgttgagggtcgtgggatttttttttttggaggtttttttattttcgtggtttttgcgcggtttagttttttttcgagttggtttaaggggtaatttgatttaggttagttggtggagtatgaggtagcgtttagttgagcgttacggtattttattaagttcgaaatgtgatcgttattgttgttatattttagcgtttttaataatttttttataaatgagaaaaatagagtttttttaaatgttttttttttgatattaaggaaagcgtatggaattttgtttagaggtttgagttcgggtgattttaggagtggttttagagtttgaggaaaggtttggggggcggagggggtgtttttttagttttaggtaaagtagtgagttgggggttatttgttgttttttttgcgtttgggtttgtaaagttagcggttgtcgtttaaattttattttttttaatatgttaggattgtttattttaggttatttatttatatggttatggtttagaggttttagatttatatgtttagtggggttaaggatttaggtaacgtaaattgaagtaagtttcgtagagatggtgggaaattgtaaatggatgttttggttgaaggaggtagttgaaaatttggagagagaataagaataagaagagaaagggaagaggaggtagagagaaaagagagaggatattttttaagtttatatattgtttattgttttaaaaaaatttaaatatgtaatgagttaagtaggtatgtttttaggttagtttgtaggtttttttttaattgaatttattaatatagtagataagttgtcggtttggtttttttatttttttagagtagtattgtttagtagagatttttgcgatgataaaatatttgtagcgtttattgtaataattattggttatatgtagtttttgagtatttgaagtaggattaaagaattgaatttttaatgttatttaattttattgaattttaatataattataattagttataggtaattaattgttattatattagataatatggttttagatttttttaatgtggagggtattatcgtgtttgattattgtaaaaaagattatttttttttggggagagggggtagattatatttgagattattaagtattaattagagttttgggtaaatggaaagaaaggaaattcgaaatattgagtagtaaaagtttaggtgtaattagatgtttgttggtttaagagtggttatttagtgtttttttatttttttattttttagtgagttt

SEQ ID NO: 1787 - DNA, 2489 bp, Artificial Sequence
  chemically treated genomic DNA (Homo sapiens)
aaatttattgggaagtgggggagtggaaggatattgagtgattatttttgagttagtagatatttggttatatttaagtttttattgtttagtatttcgaattttttttttttttatttatttaggattttgattaatgtttggtggttttaggtataatttattttttttttttaagaaggagtgattttttttgtagtagttaagtacgatgatattttttatattgaaagaatttagagttatgttgtttaatatggtagtaattagttgtttgtggttagttatagttatattgaaatttagtaaagttaaataatattaaaggtttagttttttagttttattttaagtgtttaagagttatatgtagttagtggttattgtagtgaacgttgtagatattttattatcgtagaaatttttattggatagtgttgttttagaggggtgagggagttaggtcggtagtttgtttattgtgttgataagtttagttagggaagagtttgtaaattggtttggagatatatttatttagtttattgtatgtttaaatttttttgaagtaatgggtaatatgtaaatttgggggatgtttttttttttttttttttgtttttttttttttttttttttttgtttttgttttttttttagatttttagttattttttttagttagggtatttatttatagttttttattatttttacggggtttgttttagtttacgttatttggatttttgattttattaggtatgtgagtttgagatttttgagttatggttatataaatggatggtttagaatgagtaattttgatatgttaaggaaaatgggatttaaacggtaatcgttgattttatagatttaggcgtagaggaaatagtagatagtttttagtttattgttttgtttgaaattggaaaaatatttttttcgttttttaggtttttttttaagttttggagttatttttggggttattcgggtttaggtttttgggtagggttttatgcgttttttttgatgttagaggaaaggtatttggggaggttttgttttttttatttgtaaggggattgttgggggcgttaaagtgtgataatagtagcgattatatttcggatttaataaaatatcgtgacgtttagttagacgttattttatattttattagttgatttggattaagttattttttgagttagttcggaggggagttggatcgcgtagaggttacgaggatgggggagtttttagggaagagaattttacgatttttagcgttgttattttttttttaggtacgagggtgaggggattgtaagttagaggggagatttgtttatacgaattgtagggtgtttttggtttttttcgggttaaagtatgagtattttggggtgggtgttgaatggtatttgttggtagagacggtggaagggttttcgtggttttgatataggtgaagtgtagtggggttgaggatcgggatttggtgtaattttcgtttcgagggatttttattttttgatttagagtaatatttgtaaagagttttgtgtaaaaatgtttattattttggtgagaaattggaaaatatttaaagtttttttgatgaggtcgtagttaaataaaatgtggtatatttatttagtggaattttatttagtagtgtagaaaaaggaggtggattttttttttttttttttttttgagatagtgttttgtttttgttgtttaggttggagtgtaatggtgtagtttcggtttattgtaattttttttttttaggtttaagtaatttttttgttttagttttttgagtagttgggattataggtatgtattattacgtttggttaattttgtatttttagtagagacggggtttttttattttggttaggtcggttttgaattttcgattttagatgatttttttgtttcggatttttaaagtgcggggattataggcgtgagttacgttttaagttaaggaggtgaatttttatgttagtatatggaaatggttttaagatattttggagtgtgaaaaacgtaggttaaagaattatatattcggttgggcgcggtggtttatatttgtaattttagtattttgggaggttaaggtgggtagatagtttgaggttaggagttggagattagtttggttaatatagtgaaattttgtttttattaaaaatataaaaagttagttaggtatggtggtatatatttgtaattttagttatttgggaggttgagaaaggaggatcgtttgagtttaggaggtggaggttatagtgagttgagatggcgttattgtattttagtttgggtgatagagtaagattttgtttaaaaaaaaaaaagagtgatatatttagtatgatgttatgtatatatttataaaattttattaaaatatgagatttttatatggatatattgtatataattggaaaaagaaagat

SEQ ID NO: 1788 - DNA, 2458 bp, Artificial Sequence
  chemically treated genomic DNA (Homo sapiens)
gtgtgtgtaaagtaatatggaaaaatgcggaggtgggaaagatagagatagagagatagaagagatagagagatataagagatagagagatagagagatgttggtttgaggttttggggatttatttttatttgaaattattttttttttttttttttgagatggagttttattttgttttttaggttggagtgtagtggtatgattttagtttattgtaatttttgttttttgagtttaagcgattttttcgttttagtttttcgagtagttgggattataggtgtttaatattacgtttagttaattttttaatttttagtagagattaggttttattatgttggttaggttggttttgaatttttgatttgaggtgatttgttcgttttagttttttaaagtgttagaattataggcgtgagttatcgtgtttagtttaatgttttaatttttagtagagatggggtgttattatgttgtttacgttggtttggaatttttgggtttaagtgattttttcgttttggttttttaaggtgttgggaatatacgtatgagttattatgtttattatatttttattgtattttattaatatgtttacgtatgtttagatatataaatattttttattgtgttattatcgtttataggatttagtatggttatatgttgtaggggggtttgtagtttaggagtaataggttacgttatagagtttaggtgtgtagtaggttatgttatttaggcgtgtaatgtattttatgatgttcgtataatgatagaattatttaacgatacgttttttagtatgtatttttattgttacgtgatatacgattgtatattgtttggaattggtatatagtaagtgtttattaagggttatatttttattatttattaatgggttcgttttttgttatagttaattttttgttgttaatatttggtttaatggagtttttttgtttttttggagaggattattagttttttatattttttttgtattttgtttcgtggtttagtaggtcggttattttttttgtaggtagttttacggtggaggttttacgcggttgtttttttatttgtttgagttaagtgtttttggggaacgattcggagtttgatgggaggaggagatttttttgtttttttttttagttttaaatttaattgaaattgttttgtaataattgtatttgtggtttgtgaaagttgtgtttcgtggcgattagggattgagattagttggtgaaaaatttggtataggggtatatacggtattattggggatattaagtaagttacggataatgggggagatagagggtttttgtaattagaaattattgggaatttcggttatttttttttgttgtagatatgttttcgttatgtcgggtcggcgtaggaatacgttgttttttttagtattagttttttttttttttagtaatataggtggtaatgtggtagagtgtttaaagcgtttttgtagttagattgtttgggtttgaattttggatttgttattttttagttgtgggattataaaggattttgttttttgtggttgttggtaatgaaacgatagtgtatttttatttattgttatgtacgtggatgaattgataggtatgcgaagggtgaaataggatttgatttgttttaggggttttttaagaggtagttagtaggatagaaagtattcgttgttttcggaggatttttttttttttacgacgggttatttggttggaaatattaatagggtttttttaaggatattagtaattttcggtatatgtttattttatattatttttatttatatattatattaaaggtaatcgataaatagttttttaagagtttaaatgttttagagttgattcgttgaattatgtaatattattttattaaatatttatttattttgatttggtaatttgtttttatattttggaattagtatataaatatatttacgtatttgtataaatatataatatatatatatatatatatgtatgaatatatatatataagtataaatatattatatatatatatatgaatatataatatatatatatatacgagtgaatatatgatatataaaaatatatatatgtattaatatatggtatatatacgtatatgtatagatatataatatttatatatatataatgtatgaatatataggtatatatgtatatatatacgatgtaggaaaatatagtaaaagtatatatatatatatatacgaatatataatatatatatatatataggatataaaattttaaaaaagatagaaatgtattttgtttttttatttgttttttttttatagttaatttttaattggatttttgttttcgtagtttttttagagtttagatttttttaaatggttagagggtttttttgagtttaagag

SEQ ID NO: 1789 - DNA, 2458 bp, Artificial Sequence
  chemically treated genomic DNA (Homo sapiens)
tttttggatttagaagggttttttggttatttggggaagtttgggttttgggaaggttgcggaggtagaagtttagttggaagttggttgtgagaaggaaataggtgaagaagtaagatgtatttttgttttttttgggattttatattttgtgtatatgtgtatgttgtgtattcgtgtatgtgtgtatatgtgtttttattgtatttttttgtatcgtgtatatgtatatatgtatttgtatatttatgtattgtgtatatgtgaatgttgtatatttatgtatgtgcgtatgtgtgttatatattaatgtatatgtgtatttttatatgttatgtatttattcgtgtgtatatgtgtgttgtatatttatgtatgtatatgtagtgtatttgtgtttgtgtatatgtatttatgtatgtgtgtatatgtatgtgttgtatatttatgtaggtgcgtagatgtgtttgtgtgttggttttaaaatatgaggataaattgttaaattaaagtgaataaatatttaatgaaatggtgttgtatgatttagcgagttagttttggaatatttggatttttagagagttgtttgtcgattatttttaatgtagtgtgtgggtggaaatggtgtgggatgaatatgtatcgaaagttgttgatgtttttaaagaagttttgttggtatttttagttagatggttcgtcgtgggggagagaaagtttttcgaaagtagcgggtgttttttgttttgttggttgttttttgggaggtttttaggatagattaggttttgttttatttttcgtatgtttgttagtttatttacgtgtatagtagtgggtgggggtgtattgtcgttttattgttaataattataggggataaagttttttgtggttttatagttaggaggtggtagatttaggatttaaatttagatagtttgattgtagagacgttttgggtattttgttatattattatttgtgttattgggaaaagggagaattgatgttgggaggaatagcgtgtttttacgtcggttcggtatggcggggatatgtttgtagtagggagaggtggtcgaggtttttagtggtttttggttgtaggagttttttgttttttttattgttcgtggtttgtttagtatttttagtgatgtcgtgtgtgtttttgtgttaggttttttattagttaattttagtttttggtcgttacgagatatagtttttatagattataaatgtaattattataaggtaattttagttagatttggggttgggagagaaaatagaagggttttttttttttattaggtttcgaatcgttttttaggagtatttaatttagataaatggggaagtagtcgcgtggagtttttatcgtagagttgtttgtaggggaagtggtcgatttgttgggttacgaagtagggtgtaggaaggatatggggagttagtgattttttttaagggggtagggggattttattaaattagatgttaatagtaagaagttggttataataggggacgggtttattggtggataatgaaaatataatttttagtaggtatttgttatgtgttagttttaagtaatgtatagtcgtgtgttacgtaataatggggatatatgttgagaaacgtgtcgttaggtgattttgttattgtgcgaatattatggagtgtattatacgtttggatggtatagtttattatatatttaggttttgtggcgtgatttattatttttaggttataaatttttttatagtatgtgattatattgaattttgtaggcggtggtaatataatgggaagtatttgtgtatttaaatatacgtgaatatgttaatagagtatagtaaaaatatggtgggtatggtggtttatgcgtgtatttttagtattttgggaggttaaggcgggaggattatttgagtttaggagttttagattagcgtgagtaatatagtgatattttatttttattaaaaattaaaatattaggttgggtacggtggtttacgtttgtaattttggtattttgggaggttgaggcgggtagattattttaggttaggagtttaaggttagtttggttaatatggtgaaatttggtttttattaaaaattaaaaaattagttgggcgtggtgttggatatttgtagttttagttattcgagaggttgaggcgggagaatcgtttgaatttaggaggtagaggttgtagtgagttgagattatgttattgtattttagtttgggagatagagtgagattttattttaaaaaaaaaaaaaaaaagtggttttaggtaagagtggatttttagggttttaaattagtatttttttatttttttattttttgtatttttttattttttttgtttttttgtttttattttttttattttcgtatttttttatattgttttatatatat

SEQ ID NO: 1790 - DNA, 2422 bp, Artificial Sequence
  chemically treated genomic DNA (Homo sapiens)
ttatcggaaagagaagttttagtattttaatggagtttcgtttttagtataggtaaggataggttttaggtttagagttgttagttcgagtttaataatttagtttatttttgtggtatttatttttaattttgtgtttaatttaaggtgattaattttatatagtttgttagaattatttaggttttaaaattgaaagtttataggtgaatggaggtaagggtggttggttatttttgttttaatttatgggtattagatattggttttttattaatggtagtttttttttaaaataaatatttgaatttaaaaaggggtcggacgtagtggtttacgtttgtaattttagtattttgggaggtcgaggcgggtagattatttgaggttaggggtttgagattagtttggttaatatggcgaaattttatttttattaaaaatataaaaattagtcgggcgtggtggtgtacgtttgtaatttcggttattcgggaagttgaggtaggagaatcgtttgaatttgggaggcggaggttgtagtgaattaagatcgtgtaattgtagtttagtttgggcgatagagtaagatttcgtattaaaataataatagtaaaaataaaataaaataattttaaaaatttaaaaagagagttatttgagggaaaatattaagaaattaatagtatttttggtgaaaagaaatggtaaaaatattgtgaatattgtgttatgtgagtgagtgatggtgttgagaaatgtataatgtttgtaagtttggaaatttaagtttagtttttgggttggtggtttattggtcgtttgattttaaataggttgtttgtttttttcgagtttttatattattttaagtttataaggttaattatttttagaggtggggagaggttagagggtaggtaggttttgttgtgggtaggtaggttttgtttatttttatttttttaagggtgaggttttaaggtatgagttgtttttagtgtaaaagttggtattaatagtagtaatttataaatttttggagaggttcggtattttttatttagtgattgttgagtttgattgatggggttatgtcggtaaattagttattatttagtagagatattttttagagatgttaattgtttagtgtttatgcgtttttatttttttttggtataggcggttggttgtcgattttttgttattattgtttgataatagtgtttgatttgtttatatagattagggtttttgtatgtatgttgttagtatttaattattagttagtacggcgtatgaagtacggtttattaatgtttttgaggggagtaaataggtgttggtagaaatttattttcgtggataaatttgtggatacgtgtatttttatacgtgtttatttagtttttaagtataggaatgagttagtgttacgtgtgtatatgtattttgtgaattatttatacgtcggttaagaagtagttttagatatatacgtataggatggagtatatgtatgtatataataggtaatgttatatggggttgtgttaggattatattatagaatatttgtaaggcgttttgaatagcgttcggtatgtggttaattattttttagtaaattagattttttattatttttttttagtgtttttttatttattgaggtataatttatatataataaaatgtataagttttaagtgtttagtgtagtgttttttgataaatagatatatttgtgtatttattaatttagttaaggtttagaatatttttattatttaggaagttttttcgggtttttttttagttaatatttttaaaagtaattattgttttgattttttttgttatagttgaattttgtttgtttttgagttttatataaatggaattatatggtgtgttttttttggtaatgtttattgtggatgtttagatgtgtgtatagttatttatatttatatatatgtgtatggatatttagttagatttatttagaaatggggatttttgagttgtaaattttttggttttagtttgtagtttagttaagtttttttgggtttagaggattaaaggagatggggagagtttttgatgttgggtttagttatcgtggggggttttttttatattttttttagttttttttattgagtgattttagataagaattgaaaatttgtttttttttgtgaaatgaaatgaataataataatatatagtttataatttttttgtattgagtatttattatgtagtaggtattgttttaaggattgcgtaagttcgagtttattttgtttttttagtaattttataatttaggtattattattatttgttttatgggaaaggaatttgaggtatagagaggtttagtagtttgtttgaggttatataggaa

SEQ ID NO: 1791 - DNA, 2422 bp, Artificial Sequence
  chemically treated genomic DNA (Homo sapiens)
tttttgtgtgattttagataagttgttgggtttttttgtgttttaggttttttttttataagataggtaatgatgatatttggattatagggttgttgggaggatagagtggattcgaatttgcgtagtttttagaatagtgtttattgtataataagtgtttaatataggggagttatgagttgtatgttattattatttattttattttataggagaaaatagatttttagtttttgtttgaggttatttagtaagggaagttgaagaaaatgtggaaggagttttttacggtggttggatttagtattaggggttttttttattttttttagttttttgaatttagagaggtttagttgaattgtaagttgaggttaagggatttatagtttagaaatttttatttttgaatgagtttgattgagtatttatgtatatgtgtgtaagtgtgagtggttgtgtatatatttgagtatttataataggtattgttaagaaggatatattatatgattttatttatatgaggtttaagaataagtaaaatttaattataataagagaaattagaatagtgattgtttttggaggtattgattggaagggaattcgagagaattttttggatgatggaaatattttggattttaattgagttggtgggtatataagtgtatttatttattaaaaggtattgtattaaatatttaaaatttgtgtattttattatgtgtaagttatattttaataaataaaggagtattgggaaaaaataataagagatttaatttattgaggagtaattaattatatgtcgggcgttgtttaagacgttttataggtgttttgtaatgtaattttaatataattttatgtagtattgtttgttatgtatatgtatgtattttattttgtgcgtatgtgtttgaggttgttttttagtcggcgtatgagtagtttatagaatgtatatgtatacgtgatattgatttatttttatatttgggggttaagtgggtacgtatgagggtgtacgtgtttatagatttgtttacgggaatagatttttgttagtatttgtttgttttttttaagagtattaatgaatcgtgttttatgcgtcgtgttggttggtagttagatgttaatagtatgtatgtaggggttttggtttgtgtagataaattaagtattgttattagataataatggtaggggatcgatagttagtcgtttgtgttagggaggggtggggacgtatgagtattgggtaattagtatttttaaagggtgtttttgttgaatggtggttaatttgtcgatatggttttattagttaaatttagtagttattgagtggggaatgtcgggtttttttaaagatttgtgagttgttgttgttggtgttagtttttgtattgggagtaatttatattttaagattttatttttaagaggataagggtgaatagagtttgtttgtttataatagagtttgtttgttttttgatttttttttatttttgaggatggttggttttgtgagtttgggatgatgtggaggttcggagagggtaagtaatttgtttagagttaaacggttagtgggttattaatttaggaattgagtttgggtttttagatttgtaggtattgtatattttttaatattattatttatttatatgatatagtatttataatatttttgttatttttttttattaaaggtattattagttttttggtatttttttttaagtgattttttttttaaatttttaaaattattttgttttatttttattattattattttgatgcggagttttgttttgtcgtttaggttggattgtagttgtacgattttggtttattgtaattttcgttttttaggtttaagcgatttttttgttttagtttttcgaatagtcgggattataggcgtgtattattacgttcggttaatttttgtatttttagtagagatggggtttcgttatgttggttaggttggttttaaatttttggttttaaatgatttgttcgtttcggttttttaaagtgttgggattataggcgtgagttattgcgttcggtttttttttaaatttaaatgtttattttaaaaggaagttgttattaatggaaaattagtatttgatatttataagttgaagtaggggtgattaattatttttgtttttatttatttgtgaatttttagttttaaaatttagatggttttggtaaattgtatggagttaattattttaaattgaatatagggttaaaaatgaatattataaaaataaattaggttattaaattcgaattggtagttttgagtttggagtttgtttttatttgtgttgaaggcggagttttattagaatgttggagttttttttttcggtag

SEQ ID NO: 1792 - DNA, 2465 bp, Artificial Sequence
  chemically treated genomic DNA (Homo sapiens)
ttttgttaatagggtttttaaagaaattatgggatgttcggttgaatttgaattttagataaataataaattttttaagtataagtatattttttaattattagtagtttggtatatattattttaggtttttttttgtgaagatatgtatttttttttgagacggagtttcgttttgttgtttaggttagagtgtagtggtgtaattttggtttattgtagttttcgttttttaggtttaagcgatttttttgttttagtttcggagtagttgtgattataggtatacgttattatgttcggttaatttttgtattttgagtagagacggggttttgttatgttggttaggttggttttaaatttttgattttaggtgattcgttcgttttatatattttttttggtatggtttgtatttgatatcgtttgtagtttgtttttttttttcggggtattatcggggttattgtgtttattagagtaggttgtgaggttgtggattttatttggattaggatttttgtttcgttgtttgttaattgtgtgattttgagtaggttattttatttttttgagttttcgtgtttttatttgtataacgtggaggatacgggtagttttgttattttttgtatttgttgattttgttttttttgaaagttgtatagaatggagaggtcgtggtggttttaattagtttttcgtgatgggcgttaggattgttgtttgtttattgtttttttaaaggaggtagtggaagggggtcgagtaggaatcgggtatataattttaagatttagtttgttttaaaaaaaaaaaaaaaatgaagggtgtttgtttttttggaaattatttgttaatttttaggatatcgttttttttttaggcgaaggaggtggaggagattatcgagggtatgttttttaggttggaagagttttgtagtttggttgatttggtgagtggttgtttggaaggcgtgggtttaggtttaggttagattttaggtttttgttggagttttttgcggaagttattttggtggtgagttagtaattaggaggaatggggtagcggttagcgttgagaggaaagttacgtgtaaatatttttttttttttttttttttcgtttttttttttttatttaattttaagtgttttttgaggcggttattttgatttcgtttttttttcgagatggtttttatttcgtagaggagttaggagtggattataaggtggtattttcgggtatcgatgtagggagtcgtttagcggggacgttagattatatttaattttttttagttttgtatcgttttttgtgtaaatatggagatagttaggaaatggttttaggtttgcgaggtttaggaggagttttttgtttaggttatagttcgtggtggagttgggtatcgagtttttttttgaatttttttgttttttttgtttttattttttattttgtttggttggtttaaatttattagtttggttgaggaggaagatggaagataatggtttagaagataaagttttttacgttagagtttttagaaatcgtttttagaggttgggtgtagtggtttatatttgtaattttagtattttgggaggttaaagcgggtagattatttgaggttaggagtttaagattagtttgattaatatggtgaaattttgtttttattaaaaatataaaaattagtcgggtgtggtggtaggcgtttgtaattttagttatttaggaggttgaggtaggagaattgtttgaattcggaaggtggaggttgtagtgagttgagattgcgttattgtattttagtttgggtgatagattaagattgtgttttaaaaaaaaaagaaaagaaaaagaaattgtttttagattttagtgtttttaggattgttgttagttaggtgtggagtttttaggagtgttgatagaattttttagaagtttttaagtttattagaggtaaattagtaatttgggtttgaggtgtttgtttggaggtttaaagggtagagttttatattgtgattaggttttgtgtttttttagagtggaggaagtttggttatttgggtttagtggtgtgcgtttatgtttttgagaagtatcgtgttcggattttgagagtgtttgtgagaatttaagggagtaatagtaatagtagttttagatgtttattgaacgtttttttttgtgttcggtataaagttattttagatagtaggtattgagttatttttatttatttagcggatttcggtttagtttttagggttatagtagaaattttaagaggatttatatggtttttttttttgagttaatttttacgtttagatgtgggtttaggtgggagttaggtaataagataggtttttaatagtttggattgttttttttttattattacgtattggattttttttttttttttttgtttt

SEQ ID NO: 1793 - DNA, 2465 bp, Artificial Sequence
  chemically treated genomic DNA (Homo sapiens)
aagatagaaagagaaagaaagagtttaatgcgtggtggtaaagaaaggataatttaggttgttaaaagtttgttttgttatttagtttttatttggatttatatttgaacgtaaaaattgatttaagagaagaaattatataggtttttttgggatttttgttgtgattttagaggttgggtcgaggttcgttgaataggtagggatgatttagtgtttgttgtttagggtggttttgtgtcgggtataaagaaaggcgtttaatgaatatttggggttgttgttattgttatttttttgggtttttataaatatttttagggttcggatacggtgttttttagggatataaacgtatattattgggtttaggtggttaggttttttttattttggggagatatagggtttggttataatatggagttttattttttgggtttttaggtagatattttaagtttaggttattggtttgtttttaataagtttgggagtttttagaaaattttattagtatttttgggggttttatatttggttggtagtaattttaggaatattgggatttagaagtaatttttttttttttttttttttttttgagatataattttgatttattatttaggttggagtgtagtggcgtaattttagtttattgtaatttttatttttcgggtttaagtaatttttttgttttagttttttgagtagttaagattataggcgtttgttattatattcggttaatttttgtatttttggtagaggtagggttttattatgttggttaggttggttttgaatttttgattttaagtgatttgttcgttttggttttttaaagtgttgggattataggtgtgagttattgtatttagtttttagaggcgatttttagagattttggcgtgggaggttttgttttttgggttattgttttttatttttttttttagttaggttagtagatttgggttaattagatagagtaggaggtaaaagtagagagaatagaaggatttaggaaggaattcgatgtttaattttattacgggttgtggtttgggtaagaggttttttttaggtttcgtaggtttgaagttattttttggttgtttttatgtttgtataggggacggtgtagagttgaggaaagttaaatatagtttagcgttttcgttgaacggttttttgtatcggtgttcgagagtgttattttgtggtttatttttggtttttttgcggaataaaaattatttcgagggaaggacgagattaagatggtcgttttaggaagtatttggggttgagtgagagagagagagcgagagagagagagaggagggagtgtttgtacgtggttttttttttagcgttggtcgttgttttattttttttggttgttaatttattattaaaatggttttcgtagaaaattttagtaagggtttgaagtttggtttgggtttaaatttacgttttttaggtagttatttattaggttagttaggttgtaaaatttttttagtttgaggagtatgttttcgatggttttttttatttttttcgtttgaaaaagagacgatattttggagattagtaagtggtttttagggagataaatattttttattttttttttttttttaaagtaaattaagttttaggattatgtgttcggtttttgttcgatttttttttattgttttttttgaaagagtaataaataggtagtagttttggcgtttattacggaggattggttaaagttattacggtttttttattttatgtagtttttaaaagagataagattaataaatataggaaataataaagttattcgtattttttacgttgtatagatgaggatacggaggtttagagaggtggggtaatttgtttaagattatatagttaataaatagcggggtaaggattttaatttagatggagtttataattttatagtttgttttaataaatatagtggtttcggtgatatttcggagaggaaaagtaagttgtagacggtgttagatataaattatattaaaaaaaatgtgtgaggcgggcggattatttgaggttaggagtttgagattagtttgattaatatggtagaatttcgtttttatttaaaatataaaaattagtcgggtatggtggcgtgtgtttgtagttatagttatttcgaggttgaggtaggagaatcgtttgaatttaggaggcggaggttgtagtgagttaagattgtattattgtattttagtttgggtaatagagcgagatttcgttttaaaaaaaagtatatgtttttatagagaaaggtttggaatgatatgtgttagattgttaatagttaagagatgtgtttatatttaaaaaatttgttgtttatttgaaatttaaatttaatcgggtattttatagtttttttggaaattttattaataggg

SEQ ID NO: 1794 - DNA, 2474 bp, Artificial Sequence
  chemically treated genomic DNA (Homo sapiens)
gataggagaggaatttatttcgttaagaaggattttttttttagataagaaattaatatggttttgttttttgaattttgtgtgaagttaattaggtttttagagtgtaggtagaagggtagttgatgttttttgagtatttattatgtgtttgatatttttagttttttgatttttttttattgttaatatattattaattttattttagagatgggaaaattgagttttaaggtatatagtgtgaggttaatttaggttttaggtcgagtttgttgggtgatttaaaatttagtttttgaagtgggaattatataaaggtttttggtattaggaataatttttgatggtggaagtgtttagatataatgagtgttttaattaaaaatttatttttttgtggttttttttaaatggatgtaaacggaatgaattgtaggatttttggatttaaaagtttgttttttaatgtaggggattaagtttaggtaaatatttagatttttgaaaacgagattattttttttatttttacggtagtttcggagttgtaatttggatcgtatttttggagagtagtttcgtgttttagtaaagttgtgggtaagtgatgggttttagttcggggggttattgatattagggatatgagttatagagggtaaaggttcggagagttttagttatgttttagttttgtttggagtttgatattttttagagggaagttttatttagagatttttatattaggtttattgttttagagaatattacgtcgggtataattaaatttagggagagaaataggtgggaagagtaggtgtttgttttaagatggtttcgattgttttagggtataaatttacggaaaaatatttaatttagaaaaaaaaaaattattttaagtatatgtatttatatttattaaataaagtttaaaatataatttttggggatttttaagtaataaaatgatttatgttaggatatgatgatttagtgggaaagagggaattttattatttacgcgttttttttaaaaaattaatttgttttttggataggtgatgggagtttttgttattagatcgttttaagaaaatcgtttagtaaaataaaataaaaaattttttttaaataatttaagttttaaagttgagtaatttgatgtaggttagtttttaatttacgttttcgtaggatatatagagttagggagttagttggttaagtttgggggtttgaattaagaaggatttattagtcgaaaaattttaaaattttgtgttatgtgaaggaattttttaaaatattggattttatttaggcgtagcgagtcgtttaaagttatggtaatttttttttcgttgttatattatttttatttttgtgtttttagatttttttttgttttgtaatgttttgttgggattttcgatttcgtttgaggttttgtggttaagggttagggtttttattgaagttaggaatagtttggattttttagcgtgaattttgtttgaagggttatatattttttaaattttagagaatatttaaatggttttttagtaattattgagaatgataaataggaaagattttgattgttttgtttggtttttttgttttttttgatatgattagaaaaaattattcgagttgacgataaatgttgttttgggattttatttttgttattagttgtgggttgatttggggtgtatgatttgatatttgtgagttttagttattttatttgtaaaatggggataatgttgttcgttttttagggttggagtgataattaaaagagatgtatttatttaataatataaatgagtatttgttatgtgtcggggattattttggatgttgaggatatagtagtaaacgttgagattttgttgttaaggaattaagagtttagtatgagagattaggtgataaatgaatagatagataaggtaggtgattttaatagcgttaagtgtttttaagaaaatagagtcgggtagtggtatagaaggtgataaggtgtttgggaagcgggataattttagaatgacggttaaggaggatttcgtggaggaagtgatttttgagttgagattgggaggaataggaggtcgtaggtttgaaaagaaatggtggaggaggtcggacgtagtggttcgcgtttgtaattttaatattttgggaggttaaggtaggtagattacgaggttaggagattgagattattttggttaatatggtgaaatttcgtttttattaaataaattataaaaaattagttaggcgtcgtggtaggtgtttatagttttagttatttaggaggttggggtaggagaatggcgtgaatttgggaggcggagtttgtagtgagtcgagatcgcgtattcgcgttacgttattttagtttgggcgatagagtaaaatttcgttttaaaaaaaaagaaaagaaaaga

SEQ ID NO: 1795 - DNA, 2474 bp, Artificial Sequence
  chemically treated genomic DNA (Homo sapiens)
tttttttttttttttttttttgagacggagttttgttttgtcgtttaggttggagtggcgtggcgcgagtgcgcgatttcggtttattgtaagtttcgttttttaggtttacgttatttttttgttttagttttttgagtagttgggattataggtatttgttacgacgtttggttaattttttgtagtttgtttagtagagacggggttttattatgttagttaggatggttttaattttttgatttcgtaatttgtttgttttggttttttaaagtgttgggattataggcgcgagttattgcgttcggttttttttattatttttttttaagtttgcggttttttattttttttagttttagtttaaaggttattttttttacggggttttttttgatcgttattttgaagttgtttcgttttttagatattttgttattttttgtgttattgttcggttttgtttttttgggggtatttagcgttgttgaaattatttattttgtttgtttgtttatttattatttggttttttatgttggatttttagttttttgatagtagagttttagcgtttgttgttgtatttttagtatttagagtggttttcggtatatagtaggtgtttatttgtgttgttgaatgaatgtattttttttagttgttattttagttttgagaagcgggtagtattatttttattttatagatgaggtaattgaggtttatagatgttaagttatgtattttaggttagtttataattggtgatagaggtggaattttaaggtagtatttgtcgttaattcgagtaattttttttagttatgttagagaggatagagaaattaaatagaataattagggttttttttatttattatttttagtaattgttgaaaagttatttggatgttttttgaaatttaaaaaatgtgtaattttttaggtaaagtttacgttgggaagtttaggttgtttttgattttagtgggaattttggtttttggttatagggttttaggcggagtcgggggttttagtaaaatattgtaaaataggaaaaaatttaaggatataaaaataaaagtgatgtggtagcgggaaaggggttgttatggttttgagcgattcgttgcgtttgggtgggatttaatgttttggaaggtttttttatatgatatagagttttggaatttttcggttggtaaattttttttaatttaggtttttaggtttggttaattagttttttggttttgtgtgttttgcgggggcgtaggttggaaattggtttgtattagattatttagttttgaaatttaaattgtttgaagagaattttttgttttgttttgttggacgatttttttggaacggtttgatggtagaggtttttattatttgtttagaggataaattgattttttagaaaggacgcgtgggtggtggaatttttttttttttattgagttattatattttgatatgagttattttattatttggaggtttttaaaggttgtattttgagttttgtttaataaatataaatgtatatgtttaaaataatttttttttttttaaattaagtattttttcgtgaatttgtgttttggaataatcggaattattttagagtagatatttgttttttttatttgtttttttttttgggtttggttgtattcggcgtgatgttttttgaaataatagatttggtatgggagtttttagatggggtttttttttgggaaatgttagattttagatagggttggggtatgattaaggtttttcggatttttgttttttgtgatttatgtttttggtgttagtggtttttcgggttggagtttattatttatttatagttttgttgggatacgaagttgttttttaaagatgcgatttagattgtaatttcgaagttgtcgtggagatagagaaaatggtttcgtttttagggatttaaatatttgtttaaatttggttttttgtattgaagaataggtttttaagtttaagaattttgtagtttatttcgtttgtatttatttgaaggaggttatagagaaatgagtttttagttagaatatttattgtgtttaagtatttttattattagaaattgtttttggtattaaaggtttttgtgtaatttttattttaaaggttggattttgaattatttagtagattcggtttgaagtttggattggttttatattatgtattttgggatttagtttttttatttttgagatggggttggtggtgtattagtaatagaaggagattaaggaattgaaagtattaggtatatagtaggtgtttagaaaatattagttgtttttttatttgtattttgggagtttggttgattttatatagggtttagagggtagagttatgttggttttttgtttgggagaagagttttttttggcgaggtgaattttttttttgtt

SEQ ID NO: 1796 - DNA, 2463 bp, Artificial Sequence
  chemically treated genomic DNA (Homo sapiens)
tttgtttaattaatttttttgtgattttaattattttttcgtttgttttttttagtagattgggtattttttgaaagtaagaattgattttatttttttttttatttagagtatatagtttatatttagtatttgttgattgaatgggtattgttgtttattttggttgtcgcgatagttttggaaggttttaggtagggtggtaggggttagaatttattttatttttcgtagtttaatggggttttgtagagggttttaagtgatgttgtaaagttttatattgagaaatgttatttttattttggttttgagaggggataggggtttggttataagttgggattagtatttaggttattaataagttttaataagttttttaaagtttaatttttattaaattaggtatttttcgaggttttgtttttgtttaaggtaagcgtagtaatgtgtttgttttacgattttaataatttcgggtttaaagttaaggtgtatttgggttaattatttttttttttttcgtagtaagaaaaataataatttattaaaagataaatgtaaaaagaagatgtacgtgagaacgagtttacgtggatgtgtaagtatttgttttagagatatagttacggggttgttttagggttagtgtatgaatttaatatgattttatttttgtataagatttttttgtattttttattttaatattatttggttgaaattttcggtttagttttagattatttttgtttaatttttgtaaataaggttatatttgggtatttatggtttattttacgtttttttttatgatagacgttcgtttgagtttagtttttgtagttatcgttttttattaaagtagattttttttttttttttgtttacggaggagtgagggggaattgttgagaggaggggtagattggttagggagggggcgattgagaataggaagaagatggggtgagatttgagaggtacgttttggatataataaataagtttgttgttttgtttagaaagggattcgggatttttaattttattagagttttaaaagtattagtttaaagttaaagttagatatacgtaaagttgtagttttcgggggaatttagagtttaaaaataatattttttttgatttaaaaattataagggaatatttacggtatattttttgattaaaaaaggaaagtgaaaaataaggtttttttttttttttttttaattattataaaattaatttgtgtttattttattaagttacgatttttgttggttttaagcgagtttaatttatgttggttatagatacgaggggtcgggaagtttgggtatgttttagtgaattgaatcggttttttttgaatggttgttattttttttttttgttttttttagtataggaaagttattaaggagtcgtttacgttagtatatttattatttagatttttagggtattgtttatttgagaggttagatatagcggggtttattaaagttttaaagtagtagtaataattttttaatcgttgtttttgagatagatgaagtatttattatgtgataggtattgtgtttgggattggggatgaagtaacgatgaaggagatgaaagatgaatgtgtggtaggggggtggatgagtaggtgggtgaaggggttggaagggaggaggaaaggaagagagaatatatattaggttatggaaaaaaagaaataaatagaggttaggtatggtggtttacgtttgtaattttagtattttgggaggtcgaggtaggtagattatttgaggttagattattggttaatatggcgaaattttatttttattaaaaatataaaaattagttaggtatggtggtatgtatttgtagttttagttgtttaggaggttgaggtatgagaattgtttgaatttagggggtggagtttgtagtgagttaagattgagttattgtattttagtttaggtaatagagtgagattttattttaaaataaatatttaagtagaaagatagatgatggtaggagagaaaggggatttattttggtaggagaattaggggaagttgttttgaggaggtgataattgagttgatagttgaatgaagtagagaaagtagttatgtggatagttgggaggagtgaaaggtacgtgtaaaggttttgaggtaggagtttatttggagtgtttgaggaatagtatagaggttattagtaggtgggaatggagtgagggagtgagtgagtgaggaagagaggtaggtagggatcgggtgatacggtttggtttacggtgaggagtataaggttattttgtatttatatttcgggaggggagatataggagggtttagaatgggggtggtgtagattaaggtatattttgaatagattttttggtagttgtgtggggagtagatgaatgaagggtgtaagtgg

SEQ ID NO: 1797 - DNA, 2463 bp, Artificial Sequence
  chemically treated genomic DNA (Homo sapiens)
ttatttgtattttttatttatttgttttttatatagttgttagaggatttgtttagagtgtattttggtttatattatttttattttgagtttttttgtgttttttttttcggagtatagatgtagagtagttttgtgttttttatcgtggattaggtcgtgttattcggtttttgtttgttttttttttttatttatttatttttttattttatttttatttgttaatggtttttgtgttattttttaaatattttaggtaggtttttgttttagggtttttgtacgtgttttttattttttttagttatttatatggttattttttttgttttatttagttgttagtttaattgttatttttttaaagtagttttttttgatttttttattaaaatagatttttttttttttttgttattatttgtttttttatttaggtgtttgttttgagatgaagttttattttgttgtttaggttggaatgtagtggtttaattttggtttattgtaagttttattttttgggtttaaataatttttatgttttagttttttgagtagttgggattataggtgtatgttattatgtttggttaatttttgtatttttagtaaggatggggtttcgttatgttggttagtgatttggttttaagtgatttgtttgtttcggttttttaaagtgttgggattataggcgtgagttattatgtttggtttttgtttgtttttttttttttatagtttgatatatgtttttttttttttttttttttttttttaatttttttatttatttatttatttatttttttgttatatatttattttttattttttttatcgttgttttatttttagttttaagtatagtgtttgttatatagtaggtattttatttattttaagaatagcggttgagaggttgttgttgttgttttgaggttttggtgagtttcgttgtgtttggttttttagatgaatagtgttttgggagtttgggtgatggatgtgttggcgtaggcggttttttggtggtttttttgtgttaaaggaagtagaggaaggaaatgataattatttagaaaggatcggtttagtttattaggatatgtttaagtttttcggtttttcgtgtttgtggttaatatgaattgggttcgtttgaggttaatagaagtcgtgatttgatggaataggtataagttagttttatgatgattaagaaggaaaaaaagaaaattttattttttattttttttttttaattaagaagtatgtcgtgggtgtttttttgtggtttttgagttaaagagagtattgtttttgagttttgagttttttcgggggttgtagttttgcgtgtatttaattttaattttgaattaatgtttttagggttttggtgggattgggggtttcgggtttttttttgaataaggtagtaggtttgtttattgtgtttaaagcgtgttttttagattttattttattttttttttgtttttaatcgttttttttttggttaatttgtttttttttttagtagtttttttttattttttcgtgagtaaaggagggggaaggatttgttttggtggaaggcggtggttgtagaggttgggtttaggcgaacgtttattatggggggaggcgtggaataagttatgagtatttaaatgtggttttgtttgtagggattgaataagggtggtttggggttggatcgggggttttagttaagtaatattggggtgaaaaatgtagaaaagttttgtgtaaaaatgggattatattaagtttatgtattggttttaaagtaatttcgtgattatgtttttagagtaagtgtttatatatttacgtggattcgtttttacgtgtattttttttttgtatttattttttggtggattgttattttttttgttgcgggagggagaagaatgattggtttaagtgtattttgattttggattcgaagttgttgaagtcgtgaggtagatatattgttgcgtttgttttgggtagagatagagtttcggagggtgtttggtttggtagaagttagattttgggaagtttgttgggatttgttagtaatttgggtgttagttttagtttgtaattaagtttttgtttttttttagggttaggatgggagtgatattttttagtgtggggttttgtagtattatttgaagttttttgtagaattttattaagttgcggagaatggagtggattttagtttttgttattttgtttggggttttttagggttgtcgcggtagttaggataggtagtaatgtttatttagttaatagatgttgaatgtgagttgtgtattttggatagagggagaaatgagattaatttttgtttttagggagtgtttagtttgttgggagaaatagacgggaaaataattgaggttataaggggattggttgaataaa

SEQ ID NO: 1798 - DNA, 2493 bp, Artificial Sequence
  chemically treated genomic DNA (Homo sapiens)
tgaagttattttttttcgttttttggtttttagaggtttttaaatatgttgaatttatatagggttttgttgttgtagtttaattttagttgcgggagttttgggtagttttgtatttgttttaataaaaagtggggaagttgtgtagttttgttaatgaatgttttgggtttgttatttttttgaaggaaaagataatttgtattttgattattttttagaaaggattgggaagaaatattttaataatgtaattttttaaatgaaatattttattttgaaattaatttttaatttaaagttgtaaaggtattatagagagtttcggtatatttttttattgagttttagttttttaagtagtaaaattattaaataattatagatgttaaaattggggaaaagatttagttttagattttatttatttttaaataagtttggtgtatttatttaaattttattgatttttgaaagagggaggcgtatatatatttatattttggggattatttttttgatatttaaaataatatgggtagtttaattttagtattttaagattaagtatttaaaaattgaaatttggattaatatattaacgtaaatttttatttggttaatataataaaaataagagttattatttgttttatatttattaggtgatagtttttgcgtatgggtgatatgatttttatttttttagaatttgttgaggaagagatttttttgtagtttttataaaatgaggatataaatgtagagatgttaagtaatttgtttaaggttatatagttaatgtgttgttatagtggaaatagatatataggtttaggttgtgtttaaagagaattattgtggatgtcgttttaattttttttgttaagttatatttattgttgttatcgagaattttcgttatacggtagtgaagtttttaattttttattttatatattatttagaattagttgtaaagtgttaggagatttggttaggtagttttaagtattagcgagggttggaagtttttattgtgaagttttttatagaaagtcgcggttggtagttttcgtttttgtatgggaataaattaatattggtattttaaatataggaaaggaaggaaattggaaatatagtttatatttggttagttttttgaaatattgtattatgttatcgatattaattaatgaaaagtagggttgtgtgagaggttttggtttggaaatgtattaatatacgtttaatatgtttgtataggaatcggattatatgtattttggttttaaaataataaagtaattattttaaagttggtgttttcggagttgttattaatttaatttattttacgcggattagtataggttttgcgcggttttttataatgtttttcgatataaatgttgaaaaggcggtattgtatatgtttgtttgagtttcgtataagtaagtgttaaattttatgtattttaatatttttttaaattataaatattttattttggagcggaaaaaaatatatagtagtagttttagtattttttggtattgttattttagtttgagtttgagtaattttttttttgtcggggaagtttaaatgaattatttgttttatattaagaaatattaagttatattttttgttaattattatttgttagatgttatttgttgtaaaattcggaatttaattttagtttgaatatatagttaatattaaacggtttattaatagtcgcggtcgtatatgggattatttgtagtgaataaacgttttttttttataaattgttttagggattggaaagaaaagtatgtgaagttttggaataaataaagtatcgtgttttgagttgtttagtatatgatttttgtatgttgtgagaataggtttaaaatgatttaagagtaagtgtttatttcgtaattttgtaagaatgttttcgagaaaggattttagatgatgtaggtaaattttattgtttttgatttgtaatagaaagaattagttcgttttttgaaggattagtatttttagttattgtttttatatatatgtttatttgtatttggaatttagggtttaagtaatagatattacgggtgtttttttttcgtttttggtgacgttatttttttagtttaattttacgttgatttgggatttattaagttggagtaatttgagtgtgtaaagttaaatgtgttattatttttattataaattaatagtttttatgtaaatattggtagttttttattttatgaaggcgagagaaggtaaaatggtatcggcgtatttgatttaaattaattaaaagtagagggttgtgtaatttaatatattgattttattagtgggatttaaattttttataataagtgtatatagttgtagtgtttttttattattacgttgtaaaggttaattcgtatattttttttgataataatatgataggttttatatatttttgt

SEQ ID NO: 1799 - DNA, 2493 bp, Artificial Sequence
  chemically treated genomic DNA (Homo sapiens)
gtagggatgtgtgggatttgttatgttattgttagaaggaatgtgcggattagtttttatagcgtagtggtgggagagtattgtagttgtgtatatttattataaaagatttaagttttattggtaaaattaatatattgaattgtataattttttgtttttaattagtttaaattaaatgcgtcggtgttattttgttttttttcgtttttatggggtgaggaattattaatatttatatagaaattgttaatttgtggtgaaaatgataatatatttagttttatatatttaaattgttttaatttgatggattttagattaacgtggagttgagttgaggagatgacgttattaggagcggggaggagatattcgtgatgtttgttgtttggattttggattttagatgtaggtggatatgtgtgtagaggtagtgattggggatgttggttttttaagaagcgagttggttttttttattgtaggttaaaaataatgagatttatttatattatttaaaattttttttcggaagtatttttataaaattgcgaagtgggtatttgtttttgggttattttgagtttgtttttatagtatgtaagggttatgtattgggtagtttaaggtacggtgttttatttattttagagttttatatgtttttttttttaatttttgaaatagtttatagaggaagggcgtttgtttattgtaaatgattttatgtacgatcgcggttattagtgagtcgtttggtattagttgtgtgtttaagttgggattgaatttcgggttttgtagtaaatggtatttgataaataataattgataaaaaatgtgatttggtattttttaatatggaatagatagtttatttaagttttttcggtaaaaaaaaaattgtttaaatttaaattgaaatagtaatgttagggaatattaggattgttgttgtgtattttttttcgttttaaagtagagtgtttatgatttggggggatattagagtgtatgaagtttgatatttatttatgcgaaatttaggtaagtatgtgtaatatcgtttttttaatatttgtgtcggaaggtattgtggggagtcgcgtaaagtttgtgttgattcgcgtggagtggattgaattaatgataatttcgagagtattagttttagggtaattgttttattgttttggagttagggtgtatataattcggtttttgtgtaaatatgttgaacgtgtgttaatgtatttttaaattagagttttttatataattttgttttttattaattgatgtcggtagtatggtatagtattttaaagggttggttaagtataaattgtgtttttaatttttttttttttttgtgtttggaatgttaatgttaatttgtttttatgtaggagcgggggttgttaatcgcggttttttataaagggttttatagtgaaggtttttagttttcgttgatgtttggggttgtttggttaagttttttgatattttgtagttaattttgggtgatatatggggtgggggattgggggttttattgtcgtgtaacggaagttttcggtgatagtagtgggtgtgatttggtaagggagattggaacggtatttatagtgattttttttagatatagtttaaatttatgtgtttgtttttattatgatagtatattagttgtgtgattttgggtaagttatttaatatttttgtatttgtgtttttattttataaaggttataagagaattttttttttaatagattttaaagaaatagaaattatattatttatgcgtagaggttgttatttagtaggtgtaaaataaatggtagtttttgtttttattgtgttggttagatgaagatttacgttggtatattagtttaaattttagtttttaagtatttaattttaaaatattgagattaaattgtttatgttattttaaatgttaagaaaatggtttttagagtgtgaatatgtgtgcgttttttttttttagagattaatggaatttgaatgaatgtattaaatttatttgaggatgaatagagtttaaggttgaattttttttttaattttagtatttatggttatttaatgattttattatttgggaaattggaatttagtgagagggtatatcggaattttttgtagtgtttttgtaattttgaattaaaaattaattttaaaataaaatgttttatttaaaaaattgtattattgaagtatttttttttaattttttttggaagatggttaaagtataaattgtttttttttttaagggagtgataagtttaaagtatttattaatagaattgtataatttttttattttttattggagtaggtgtaaggttgtttaaggttttcgtagttggggttaggttgtaataataaagttttgtgtggatttagtatgtttagaagtttttagagattagaggacgaaagagaatggtttta

SEQ ID NO: 1800 - DNA, 2396 bp, Artificial Sequence
  chemically treated genomic DNA (Homo sapiens)
cgggtgggggtcggggagttaggggtttagttgggaggggggtagggtgatttttttttatttcgtagttttcgttttagaagggaattcggaagtttgttttttttttgatttgaatatgtagcgggtttggaagttaattgaattttttaagtttattgggttgtgtagttgtttaagaaggaggggggttttgagaatcgtttttattatttattgtagagtttgaaggagttaaagtgggattattttttggttgttggtaggacgatgtttatttggtttttgtatcggtttttgttgggcgggtgatgggtgattggggggttcgggagattttttatttttatagtttgttagttttttattgcggtaataatgatttagtcgttatggtaatgaggttaattaatgtatttatttggtagaattaaaatttcggacgtatttaattagttttgatatttttatttttaagaagttaatttttggtgttttatttgtttaggtatgtaggtatgttataaaataaaatattgttataaaaggaggagttgtaagaagaaatgggggaagttgtggggaggagttgggaggggggggtttttgtttattttttagagagaagaaaatttggaatgttattttttttttttcgatgatggtataaaattagtatagttaagtaaatgtgttataaatataaagatgttgttaggaggtaaagtgtttttatttaaggagaggaagaatggttgaggggttttagaaagggggttgggtggttaaacggttggagggggtgtcgtttgtaatttttttaagtattgtaattagagggaaaagttatttttttcgagaacgtgtatttgtagaacgtttagatagttataaagaggataattaaaaaaagaaaaaagttgtaagtcgtagttatttttttcgttagggtatttattcggttgtaatttttagttaattgttcgagtaggtgaaaaattataaaagtaagaaaagttagtgtgggttaggaggaggtcggggagtttgggtcgaaaatagtttatgagtaagtgttttgaaatttcgttttaaataagtcggtaaatgaatttaattttgttagatttttttttttttacgtagattaaatatttcgttggcgtgttgtttagatatagataataaaggattttttatagcgtatagagacgcgttgataaagtagttatttaaagatgtagtattgttttttcggtttaaaacgatttgttagatggatttaaatgaaaatgttaagttatcggtttggtttggggtttgttggtggattggttggggggagggggttggttgttttagagaattagaaattattatttgtgattgggttgttttttaggtcgtttttaaaataggattgtacgtggtcgtttagtaaataattttggttttttttgttttgggaaggcgtttgttaagatgtttttaatatttagtagtagtaattttgttgtagtattgtttatttaaagggggcgtgtggtaaaaaaaggttatatgaaaatgtatgggggagaatttgtttttatttgtttcgggtggattagaattaagaggagaggaatttggttttatttttaattttgtattttagttttttttatataaagggttattataaaatgagttattttttttttttaggaaagaaagatagggttggaggtgggttggttgtaagggtgtggttcggggatatatttagggtgatatttaaatattttttaaattggggagtgggtttttatgtagttaaggttttaagggaggaagaatagtatttaggagtttttagagttttaatataagtcgtgcgttgattttttttttaggttatatttcggggtagtcggataggggtggtttttttaaatgggggaattagtttttttttttgggattgttagtttttaatttagagaaagatttgttgtttgttagatgtttagtgagggtttatttattttagcgatttttttttgatggggtgtcggttaagcggttattttttttttatgtttgttttgtttatggtagtttttatatgagattggtttgtttttttttttttgttttttttttttgtttttttttttttttttttttttttttaaatgttgtaaagtttagacgttggaattagataaagtttatttttattatttttaggttgtgtggtttaagggaagttatttttttgagttttagtttattttgttgtgaaatggggttttaattatttgttttaaagagttgttgtgaggattaaatgtttttgtgtattaaatttattaattagttattaatacggtatttatcggttttttttaata

SEQ ID NO: 1801 - DNA, 2396 bp, Artificial Sequence
  chemically treated genomic DNA (Homo sapiens)
tgttgaaagaggtcggtggatgtcgtgttagtggttggttagtgggtttaatgtataagggtatttaatttttataatagttttttaggataggtggttgagattttattttatagtagggtaaattgaggtttagggaggtgattttttttggattatatagtttgaaggtggtggagatgggttttgtttggttttagcgtttgggttttataatatttgagagagaaaaaggaaggaagggaggataggaaggaaagatagaggaaggagagtagattagttttatatagaagttgttatgagtagggtaggtatggaaaggaagtgatcgtttggtcggtattttattagagaaaggtcgttggagtgaatgagtttttattgggtatttggtaggtagtaggtttttttttagattggaagttgatagttttaggggaagaaattagtttttttatttaggagaattatttttgttcggttgtttcggagtgtaatttgaaggagaggttagcgtacggtttgtgttgaggttttgggagtttttggatgttgtttttttttttttggaattttggttgtatggaggtttattttttagtttagagggtgtttgggtgttattttgagtgtgttttcgggttatatttttgtagttagtttatttttaattttgttttttttttttgggaagggagggtgatttattttatagtgattttttgtatgagaagggttaaaatgtaaagttggaggtgagattagatttttttttttttggttttggtttattcggagtaggtggaaataagtttttttttatgtatttttatgtaatttttttttgttatacgttttttttaagtgaatagtgttataataaaattgttgttattaggtgttagagatattttagtaggcgtttttttagaataagaagagttagaattatttgttgggcggttacgtatagttttattttaagagcgatttggagggtagtttaattatagatgatggtttttagttttttggagtagttagttttttttttttagttagtttattagtagattttaaattagatcgataatttagtatttttatttaagtttatttgataaatcgttttaggtcgagaaagtaatattgtatttttaaatggttattttgttagcgcgtttttgtgcgttgtaaaaagttttttgttatttgtgtttagatagtacgttagcggaatatttggtttgcgtgaggggagagagatttgataaggttgaatttatttatcggtttatttaaagcgggattttaaaatatttgtttataaattgttttcggtttagatttttcggtttttttttagtttatattggttttttttgtttttataattttttatttgttcgggtagttagttggaggttgtagtcgggtgggtattttggcgaggagagtgattgcggtttgtagtttttttttttttttaattgttttttttatgattgtttagacgttttgtagatgtacgttttcgggggaaatggtttttttttttggttatagtatttgggagggttgtagacggtattttttttaatcgtttgattatttagttttttttttaaaattttttagttattttttttttttttaaatgaaggtattttgttttttggtagtatttttgtgtttataatatatttatttgattgtgttaattttatattattatcgaaaaaggaaaagtgatattttaggtttttttttttttgaggggtgggtagagattttttttttttagtttttttttataattttttttatttttttttatagtttttttttttgtggtaatgttttgttttgtggtatgtttatatgtttagataaataaaatattagaggttggttttttaaggatgaaaatattagggttagttgaatgcgttcgaggttttagttttgttaaatagatgtattaattaattttattgttatagcgattaggttattgttatcgtagtgaaaaattggtaagttatgggggtggagggtttttcgggttttttaattatttattattcgtttaataggaatcggtgtagaggttaaataggtatcgttttgttagtaattagaaagtggttttattttggtttttttagattttgtagtgggtggtgggggcggtttttagagttttttttttttttaggtagttatatagtttagtggatttgggaaatttagttgatttttaggttcgttatatgtttaggttaggagggaagtaggttttcgagtttttttttggagcgagggttgcggggtggagagaagttattttgttttttttttagttagatttttaatttttcgatttttattcg

SEQ ID NO: 1802 - DNA, 2500 bp, Artificial Sequence
  chemically treated genomic DNA (Homo sapiens)
ggttttttgttcgtggggattttgttaggttgtttagagtagttttttagtgttatttttttttttattttttttttttttggggtttagtcgtttttagttttagtgttgttttttttaagttggatgtaatttagtttttgttttttatttgttattttatttgtgtagttaatattttatgtacgttttttatagtgtagaaggaaaatataattttaatttgattttatttagtgatgttaaatattgtatgtgaatatttttatttagaagtttatttaatgtagatttattaaaaagtaggagttttaaatgtttgtattgtgtaagtatttttagtatattgttatataggtgtttaagagtgttttaagagatatttggaaaattggttggggattgtttttgttggtttgggaatgtattattatttttttttagtttatataaaggggtgaagttttgatgtttggaaatttgttttttaaagtgtttttaggaattgataatatttggataatgaggggtgtttgtattttttttgatttaaattgttggtagagggggatatttttgtatgattgggtaaggttaaatatagaattaaattaggaagaatagggtttgatatgatgaatttttgtttcgttttgttattgataagagatagaataaatgtttttaaagaattttgtattatgaacgtttgatggtaattttgttttagggttttgttgttcgttgttaggtagtaggtatattatttagggtcgtggggaaggcgttttgtagttatattgtagtaggaggttggttatatttacgggttttattaagttaggatgtagagttcggttcgttttatggtataggttcgggttgttcggagtttataatgaattagagttatagttgattatttttaaggttggcgtttacgttgggtgtttgagaagacgatgaatttgtagtgtcgaagtgttgtttggttttttaggaattagttgtagttgggattttttgtagtttttttcgtagtaagttggggtagttatgagttttgtttgtttaacgtggggttaggcgggtatgtttgttgtgtttggtagttttgatatttttagattttgttggaagatgttcgtggtttgaaagtttattttgtagtcgttttattttgggatgtagtttttgtattggtaggattaacgtaaatagaatttgtttggtttatttttcgtcgggttttaataggtttgtaacgttattgtttgttagggagagttattcggtgatattgttaattaaaattatgattttgggggtaagaaaaaattttaaaacgttgaagttattttttttaatagaaattttattttgaaggtgtttacggaggttaggttgattagaaaaatttataagttataaataagtttaaatagttttatttaatttatttaattcggtgtttggagtttttatggggagaggtgtttggtattaatatagggtgggggtggttatttttatttttagtttttgggttttagagttgagaggagggagagaattgaatttttttggaagaatgtggaattgttgagtagatgttttggaatttgttgatttaggtatttgggagtatagtttgatcggttatttttgcgttaagttatttatagtttaatggttatttttaattggaaatttattttaaagtggtggtagtgacgggggagtggttgtatttgtaatttattattttatatagagaattttttttttttatttttttttggttaaagttgttgttttgaacgtgggtgggttttggagtttaagattgagttggttgtttggagaaaaattggagggatttgaaaaggttcgagggagggtgttttttgagttgggggtggtagaaaatattttaaatgtgtaggtttaagttttttgtagtgaagggaataggattttggtttcggtagatttaatttagtttttgggtttttgggttaatttgtgaaattatttttttttttaggattgggagagaacggttttaaataagtgtaatttaatttttttgattgtggttttttttaatgaaaaattaaaatttatttttttttttgttagttttttattgaaagttataagaaatgaggttggggtggagggtttggagttgttatggaagtatgatgtttagaatttattatgggatggatggttattggtgttacggattgtggtgtagatattgttttttgtgttaggatgtggtttggttttgtatttttttgtttttgaagttgtgtttgtttgtgatttgggagtggtacgaatttatagaatttagtttattttgtaggaagtgggagagtttttcgggtattttggtgttgaggaagtatagtttaaagaggaaatttttttgaaatttatatagatttttttttagaatgttttggaaggaagtataattttaagagga

SEQ ID NO: 1803 - DNA, 2500 bp, Artificial Sequence
  chemically treated genomic DNA (Homo sapiens)
tttttttgaagttgtgtttttttttagaatattttggaaggaggtttgtgtggattttaaggaaattttttttttaagttgtgtttttttagtattagagtattcggggagtttttttattttttgtagggtgggttgggttttgtgggttcgtgttatttttagattataggtaggtatagttttaaaggtaaaggggtgtaggattaggttatattttggtataggagataatgtttatattatagttcgtgatattaatgattatttattttatagtgggttttaggtattatgtttttatagtaattttaggttttttattttagttttattttttgtgatttttaatgggaaattagtaggagagagaataaattttggttttttattaaagaggattataattaagggaattaaattgtatttatttaaggtcgtttttttttagttttgaggggagaggtaattttataaattagtttaagaatttagagattgagttaggtttgtcgaagttagagttttattttttttattgtagaaggtttgggtttgtatatttaagatgttttttgttatttttaatttagaggatattttttttcgggtttttttaaatttttttaatttttttttaagtagttagtttagttttgggttttaagatttatttacgtttaaagtagtaattttggttagaaaaaaatgaaagaagggaattttttgtgtgaaataatggattatagatatagttattttttcgttattgttattattttaaaatgaatttttaattgaaaatagttattggattatagatagtttggcgtagagatggtcggttaggttgtatttttagatgtttgggttagtaaattttaaagtatttatttagtagttttatatttttttaagaaagtttagttttttttttttttttagttttgggatttaggggttagagatgagggtggttatttttattttgtgttgatgttaggtatttttttttatgaggattttaggtatcgagttaagtaaattaaataaaattatttgagtttatttatggtttgtgggtttttttggttagtttgattttcgtgagtatttttaaaataagatttttattagggaagatgattttagcgttttaaaatttttttttgtttttagagttatggttttaattaatagtattatcgagtggttttttttggtagatagtggcgttgtaggtttgttgaggttcggcgaggaatgagttaagtagattttgtttgcgttaattttgttagtgtagaagttgtattttagggtagagcgattataaaatgagtttttaggttacgagtattttttagtagaatttgggggtgttaaggttgttagatatagtaggtatgttcgtttgattttacgttggataggtagggtttatggttattttagtttgttgcggggaaggttgtagagaattttagttgtagttggtttttgagaggttaggtagtatttcggtattgtagatttatcgtttttttaggtatttagcgtgagcgttagttttgaaaataattagttgtggttttaatttattataagtttcgagtagttcgagtttgtgttatgagacgggtcgagttttgtattttggtttggtggagttcgtagatatgattagttttttgttgtagtgtggttgtaagacgttttttttacggttttgggtagtgtatttgttgtttgatagcgagtagtaaagttttgagataggattgttattaagcgtttatggtgtagggttttttgggggtatttattttgttttttgttaatggtaaggcgaggtagggatttattatgttagattttgttttttttgatttgattttgtgtttgattttgtttaattatataaaaatatttttttttattagtagtttaggttaaggaaagtatagatattttttattatttaaatattgttaatttttggaaatattttggagagtaaatttttagatattagggttttatttttttatgtgaattgggaaaaaataataatatatttttaggttaataaaaataatttttaattaattttttaaatattttttaagatatttttaaatatttatatagtaatgtgttaaggatgtttgtataatgtaaatatttaggatttttgttttttgatgagtttatattggatgaatttttggatggggatgtttatatgtagtatttaatattattgaatggagttagattagaattatgttttttttttatattgtaagggacgtgtataaaatgttaattgtataaatgaggtaataggtaaaagatagaagttaggttatatttagtttgggaggggtaatattggagttagaaacggttagattttaaggaaagggagggtggggaggagagtgatattgaggagttgttttgaataatttggtaggatttttacgggtagagagtt

SEQ ID NO: 1804 - DNA, 2495 bp, Artificial Sequence
  chemically treated genomic DNA (Homo sapiens)
ggttttgtcgggtattaattagtcgtttgtgtgtggttttgttttttgttattttgttttgacgttttttttttgtcgatattattttgttttgatttttgtgcgttttaagtgaattttgaaatttggtagcgttagttattcgattttattttttttaaaattgttttggtttttttaggttatttgtatttttttatgaattttagaatttatttgttatgtaaaaaaaaaaaatttgttagaattttgattgggattgttaaaattatttttaaaaattattgaagttgattttgaaatgtagtatgtaagggtttgggtgtgtaatttgtacgtgagttttagtgtataaaagaaagtgagagttagtaagtcgggttagaggggataaaggagagagtggtggcgtatgtgtttaggttttcgtcggtttttgagagtttttttttttttagagtgattatagggtgggtaggaggttttttaggatttttggagggtgtgtttttttattaataatgataaagggtgtgatgtagattttttaattttattatatgtgaaaagagtgtttattgttgaaaggattaaataagataagacgttgagtagttgagttgtaaatgtttgtggattgaagtttaaagttagtttatatagatttatttatttgtttattttttgtcgtggttttttgtgttttagttattattatcgttttatggcgtatggttgacgtgttgttttgtaaagggttaggcgttattttttagtatgtattattttttattggtttcgtttttggggtttatgatatatattatttggttatttttattttggagtattataggttaaattagttagtaattcgtggaattaatttacgagtggtgtttatttttggataatggtttagtggaggggttggtttgtagtttatatttattatggttttgttgaatggtgttcgttagattttgtataatcgaatttagtttagttttatgaaggttttgtataagttagtttttttttttcgttatttgatggaataatagatttataggagaatttatttgtaattttaagtttcgagttaaagacgttttaagggatgaacgtgggtgatttgtggaatattgcgatgtatttatgagatagattgtacgtttatcgcggcgtttaaagaaattagatcgggttgtattagaggcggtgttgtaattcggttgttttttgggaaagaatgtaagtttttagtgtgcgaagtatgaggggttgtagaggaaattgttttggtggttttggttttgggagtaagtatttgtttttcgtttatttaagtatattagcgagttttataaatatttaagtggtttacgagatgttttatttttaggtttcgttttatttttttcgttgttatatagaggttattagaaattacggttttttgggtttgatagttaggtagataggattaggttaggttgtagttgttaatttttgcgttggtaatttttagattttttgtataatgttatcgtttagttatttttttttgggttgtttgtttttatggggtttttgtaattaaaaaaaataataatttatttttattttttttttttaatatgttttattaataattgtgtaaatttgtttattttttaggattttattatgatgtaaagtagataaaataattaatttgttttttttttttttggtatatgggtgttttgtagtttttattttttttaattttcgttttacgtttacgagtatgaagttgaattaatttatgttttgttgaagtcggattgtgagattgtgtaggtagacgtggttttttttttgagtttgtaaagtagtagaatttatgataatgggtttcgtagtaatagggattgattgcgttatgttgtttttgtttatttttatagcgtttaggagtttgtatgttattattgggattattttatagaaaatagaggtttttaggggtaacgtaatttgttttaggataggtagttataaggtagagaaaggagggttggatttgtatttgtgaaattatagttttggggtatggtttttgagatttatagttggggttgaagatttttaggggggttttgttgggtttattgttttttagagtggtttagttcggttgtagggtgttgtttttagtttggtgtattgcggtcggaggaggtggaggatggaaagtaagatttaaagatagggagtgtaaggggatagtgatatttgaggatttcgaggaggaagtaggagaattattcggaatggttagtttgggtcgagtttgggttaatatttgggttgagtttagtttatagagcggttttcgggtttttgtatttgtaggaggttagagttgtttttatttttaaatgttagatgaggtgttagtatttggataggagacgttttgtagttagtttatagatatgagggtgtcg

SEQ ID NO: 1805 - DNA, 2495 bp, Artificial Sequence
  chemically treated genomic DNA (Homo sapiens)
cgatatttttatgtttgtgagttgattgtaggacgttttttgtttaggtgttggtattttatttaatatttgaaggtaaaagtagttttggttttttgtaggtgtaaggattcgggagtcgttttgtgggttgggtttaatttaggtgttggtttaggttcggtttaggttggttatttcggatgatttttttatttttttttcggagtttttaagtattattgtttttttgtattttttgtttttgaattttattttttattttttatttttttcggtcgtagtgtattaagttggaagtagtattttgtagtcgggttggattattttggagagtagtgagtttagtagagtttttttagggatttttagttttagttatgagttttagaagttatgttttagggttgtggttttataggtgtaggtttaatttttttttttttgttttgtggttgtttgttttggggtaggttacgttgtttttgggagtttttgttttttgtaaaatggttttagtaatggtatgtaaatttttgagcgttgtaaggatggatagagatagtatggcgtagttagtttttgttattacggaatttattgttatgaattttgttgttttgtaggtttagaagaaaagttacgtttgtttatataattttataattcggttttagtaaagtatgagttaatttaattttatattcgtgaacgtgaagcgggggttggaaggaatgaaggttgtaggatatttatgtattaagaaaaagaaagataaattggttgttttatttattttatattatgatggagttttaaaaagtaaataaatttatatagttattaataagatatattaaaagaaaggagtgagaataagttgttgttttttttaattgtaggggttttatgaaggtaggtagtttagggaggaatgattggacggtgatattgtgtagggggtttggaagttgttagcgtaggggttagtagttgtagtttggtttggttttgtttgtttggttgttaaatttagaagatcgtggtttttggtggtttttgtgtgatagcggaggaggtggggcgaggtttggaagtgaagtatttcgtgagttatttaagtgtttatgaagttcgttaatgtgtttaaatgaacgagaagtaggtatttgtttttaggattagagttattaaagtaattttttttgtagttttttatatttcgtatattggaagtttgtatttttttttagaggatagtcggattatagtatcgtttttaatgtaattcgatttggtttttttgagcgtcgcggtgaacgtgtaatttattttataaatgtatcgtagtgttttataaattatttacgtttattttttgagacgtttttaattcggggtttagagttgtaaatgaatttttttatggatttattattttattaaatagcggagagaggggattagtttgtgtagagtttttatagagttgggttaaattcgattatgtaaagtttaacgagtattatttagtaaaattatggtgggtgtgagttgtaggttagtttttttattgggttattatttaggggtaaatattattcgtgggttagttttacgagttattggttgatttgatttgtgatattttaaggtggaagtaattaaataatatgtattatgagttttaagaacgaagttagtggagagtggtatatgttagagggtaacgtttggttttttgtaggatagtacgttagttatgcgttatgggacgatggtggtggttgggatataggaggttacggtaggaaatgggtaggtgggtgggtttatgtaagttggttttagattttaatttataagtatttgtagtttaattatttagcgttttattttatttaatttttttagtaataaatattttttttatatgtagtaaggttaaggagtttatattatattttttattattattaataaagggatatattttttagggattttagggaattttttatttattttgtggttattttagggaaaggaaagtttttagggatcgacgggagtttgggtatatgcgttattatttttttttttattttttttagttcggtttgttggtttttatttttttttgtgtattagaatttacgtataagttgtatatttaaatttttgtatgttgtattttagagttaattttagtgatttttgagagtgattttgataattttagttaaaattttagtaggttttttttttttatatgataagtggattttaaaatttataggaaaatgtaaatgatttagaagagttaaagtaattttggaaggagtaaagtcgaatggttgacgttattagattttaagatttatttgaaacgtataggaattaagatagggtggtgtcgatagaaggaaggcgttagagtagggtgataggaggtagggttatatatagacggttgattgatattcgataaaatt

SEQ ID NO: 1806 - DNA, 2500 bp, Artificial Sequence
  chemically treated genomic DNA (Homo sapiens)
ttgtcgcgtttgtgatatttcgtttggatagtggtagtaggttttttattggtttttagtttttattgatattgatttttattatagaagttagagtatgttttgaaatcgtttaggtttttttttatagttttgtttagagtaatagtttttttagatttatagagttttattttattttttttatttttattttttattgtttgtttttttttaggttttttagttttattggtttttttgtaggtttttaagtataataggtttgagggttattgcgttgattgttttttttgtttggaattggtatggttggtttttttattttttttaagtatttgtttaatgttatttttttagtgaggtttattttgattattttatttgtaattgtaatttttttatttttataattttttattttttttatttttttttgtttttttatgttatttattattttttaatatatttattatggtgtatagtattaattgaataaaatttagtaggggagataggtaataaataagaaaataaaagtatgagtataggaaagtttattttagtagtgagtgttttgatggaaataatattttagggatgggatagagattgtagggtaggttgttttataatggttttagaggagattattgagtagagatttaaatttgtgtttagaggcgttttgaggagtggagttgcggttgggggtgggaaggaaggttattttaggttgtaggaattgtaagggtaaaggttttgaggcgggagttaggtttatgggtagatgtttgaggatattttcggtttttagggttttttagaagttttagttttttgggtttggttgtgtatttttgcgatttttatcgtaggtttttttttttatttattagtgtagagtttgggggttgtcggtgggttttaggttagggaagtagaaatgggtaatttttagaggtagaaattagtcgatttcggtggttcggtgggtggttaataaagtttggttggttttcgcgggttgtgtaggagtttattttagggaggtatttagagatatttttggtttggttttgtcgggaaagtgggtcgagtagggagagggggattagagaggaagagatggatagagtttttcggacggtgggttgggttcgaggttcgcggatcgttcgaggggggtttttgggttcgaggtcgttcgtatcgattagtgttgtggttcgggtagtttatcgttttttcgggttttagtttttcgttttggtagatttcgaggcggtttcggagatttcgggtttggcgaatattgggcggggaggggcgttaattttagtttttcgggcggggtttttcggttttcgcggttacgttgtagtttaggcggaggcgcgggatttcgagttgggatcgtttttttgggtttcggtgcgatcggcggcgggaggtgagagtgggttcggcgggtttcgggaggaggtggttttagggaaggtgtggtcgcggggaagtggcggcgaatagtttcgacgcgaggacggggaaattaaggcggtagttagggagattttgatcgaggtgatttttgtttagggcgataatcgggttggggtttttcgtagtggttattggttcggcggtttcgtatttttagttcgttttttttttaataaaagaatttaggaagacggtggggcgggcgggaggttcggtgtgcggtggtttggtttttttattggtggagaggagggagcgtttttttttagacgcgggggaggggaggggttatggttttacgggttgtttattttttttttgtgttttagtgttgggtttaggatttttagtgaggttatttttttggtaaatatttgtgattttttttttttttttgggttttttttattggaatggcgtttttttttatttaggggtttggtttgtttttttttataatttttagtattatcggtttttatgttattttttattttattaattatttttttattaatttattagtatttattttgtttgtttatagtgtgtttttttttgtgggaatgtaggttttaggagggcgggagatttcgatttgtttattgatgtatttttattaatttaatagattttttttgagggtttttttgagttttgtacggtgttgggtattggggtttttttgggaatttagttgagttttattttagatattttggggttgggaatagtgttgtaaatatatatgatatcgtcgtgggatgaaggaaataaattagaaatgggggggtttattggttaggtgattttaggttaggttattttggtggttagggttattttagatgatatggtgattatggaaggttttttagattaggtgattttagttaaagttaggaagtgttagaagggaaaagttaggaattatgagggtatgtgtagttttgatttggatttaggtagggagttggggtttgaagagtaaagg

SEQ ID NO: 1807 - DNA, 2500 bp, Artificial Sequence
  chemically treated genomic DNA (Homo sapiens)
tttttattttttagattttagttttttgtttgagtttaggttagagttatatatgtttttatggtttttagttttttttttttagtattttttggttttaattgaagttatttaatttgggaggttttttatgattattatattatttaaggtggttttgattattaaggtggtttgatttaaggttatttgattagtagatttttttatttttggtttgttttttttattttacgacgatgttatatgtgtttatagtattgtttttagttttagaatgtttagggtggggtttagttaagtttttaggagaattttaatatttagtatcgtgtagggtttagagaggtttttaggagggatttgttgaattaatggggatatattagtggataaatcgaagtttttcgtttttttggagtttatatttttatagggggaaatatattgtaggtaaataaaataaatattaataaattaatgaaagaataattagtgaaataagagataatataaggatcggtaatgttaagggttatggagaaaaataagttaggtttttggatggggagagacgttattttagtagggggggtttaggaagggggaagagattatagatgtttgttagaggagtggttttattgggggttttgggtttagtattggggtatagggagggggtgggtagttcgtggggttatgattttttttttttttcgcgtttggggaagggcgtttttttttttttattagtaggggggttaggttatcgtatatcgggtttttcgttcgttttatcgtttttttggatttttttgttggaggagaggcgggttgggggtgcgggatcgtcgggttagtggttattgcggggagttttaattcggttgtcgttttaaatagaggttatttcggttagggtttttttggttgtcgttttggttttttcgttttcgcgtcggggttgttcgtcgttattttttcgcggttatattttttttggggttattttttttcggagttcgtcgggtttatttttatttttcgtcgtcgatcgtatcgaagtttaagagggcgattttagttcgagatttcgcgttttcgtttgggttgtaacgtggtcgcgggagtcgggagatttcgttcgggaggttggagttaacgttttttttcgtttagtattcgttaggttcgggattttcgaggtcgtttcgaggtttgttagggcgggaaattgaggttcgagagggcggtgaattgttcgagttatagtattggtcggtgcgggcggtttcgaatttagaggtttttttcggacggttcgcgggtttcggatttagtttatcgttcggaaaattttgtttatttttttttttttggtttttttttttttgttcggtttattttttcggtagagttaaattagggatgtttttgggtatttttttagggtgggtttttatatagttcgcgagggttagttaagttttgttggttatttatcgggttatcggggtcggttgatttttgtttttggaaattatttatttttgtttttttggtttgaaatttatcggtagtttttaggttttgtattagtgggtggaggaggaggtttgcggtgaaggtcgtaggaatgtataattaaatttaagagattggaatttttggaaggttttggaagtcggaggtgtttttaaatatttgtttatgaatttggttttcgttttagagtttttgtttttgtagtttttgtagtttagaatggtttttttttttatttttaatcgtagttttattttttaggacgtttttggatatagatttgagtttttgtttagtggttttttttgggattattgtaaagtaatttgttttgtagtttttgttttatttttggggtgttatttttattagagtatttattgttagagtaaatttttttatgtttatgtttttatttttttgtttattgtttgttttttttattaaattttatttagttaatattgtatattataataaatgtgttagaagataataagtggtatggaaaaatagaggagggtaagggagatgggaaattgtgggagtagggaggttgtaattgtaaatagagtggttagggtaggttttattgagaaagtaatattggataaatatttgaaggaaatgagggagttagttatgttaattttaggtagagggaatagttagcgtagtggtttttaggtttgttgtgtttgaggatttgtaagaaggttagtgaggttgggaggtttggggaggggtagatagtaggaggtgggggtagaaggggtgggatggggttttgtaaatttgggagggttgttattttagatagggttgtgaggagggatttgagcgattttaaggtatattttggtttttgtggtgagaattaatgttagtggaggttggagattagtgaggagtttgttgttattatttaggcgagatgttataaacgcggtaa

SEQ ID NO: 1808 - DNA, 2433 bp, Artificial Sequence
  chemically treated genomic DNA (Homo sapiens)
atttttagtttagaagggttttgattttagaattgggacgtaagggtggggagttcgagtttttattagtatttcgtttttgtatattttttgttcgttttttagtcgttataatttcgttttgtagtaggtttttttattaatatcggattttcgacggggaaggggttagttcggcggttttagaggttattgggttagaatacgtgtttcggattttacgtgcgcggaaaatgaattcgtattcgcgacgcggtcggcgggggcggatggtagcgagggtcggatagcgaatttttatttcgcggaggagtcggggtcggagttcgtacgtgggtttgcgacggtttcgttttttgggggcgtttttttagggattttagtttcggttggtgggttttgtaggttcgggttcgatcgcgttcgttaggtcgttcggaggtttcggcgagttcggcggaggcggcggttttttttcgttcgacggttacgttcgcgcggattggtcgtttttcgacggcggggcggggcgggacgggtcggggtagagttcgcggttaggtgaggcgtttcgtttttcggcggttttaggtgcggttgtgggatttcggatcgcggcggggtcggggttagggtcggggtcggggtcggggcgttatggtcgagttttagttgaattgtttggacgaggcgtacgtgaacgagaaggtgatcgaggcgtaggtcgttttttattattgcgagcggcggcgggtcgcgttggaggcgttgttgggcggcggcgagtaggtttatcgcgagcggtttaaggaggagtagttgcgggattttttttttagttcggagcgttaggttttgcgggtcgtttggagtttttacgaggacgtcgttttcgtcgttaacgttcggggtaagagtaaggttaaggttaaggttttcgcgtcggcgtcggttgagttcggcgagtttttggtttattggttcgatcgtttcgatatcgaggtgttttttttggatttgggttggacggatattggtttttatcgcggcgtgagtcgggttacgttttttatttattcgtttaaggacgagaaggcgtcgtattttaagtaggtggttaggtagatgatttaataggtttagaaggtaggttttcgttttcgtttttatatcgttgggatttcggttttagttttttggatcgggttttattttttaggtagggttcggggtaggtcgttttgagtattttttggaaaatgggttttaattcgtttttattttttggggttgtagtgaggtttgtagagcgaatggttgggaacgtgtttggtaaattataaggtgttggatagatgttagtcgtcggtattttagcgtttagaggtattggttttgttttgtatttttgaaatttttttgtttagtttttttttttagggaagattgggggtcgaggttttgtggttaaaatgtattatttaaaggttttgatgataatttacgtgttgtttagaatatatttcgagtcgtttttttatgtgatcgttaaaataattttagggagtgggtggcggtgattttttcggttttatttttgttatgttgttttttggattatttttttttttttatagttaaagttgagttggcgtttttatagttatagttttttttgggtcgggtattaggttttagttgtttggaatgaatgggggacggggtatattgaggatttattgtgtgtttggttttgtgttgggcgttttggtatagtaggttatttgattcggtagtttaggaaagggtttttatttagtatatgtgttttgtttgagagttggaaggaggggttgtttttagggtggttggtgaggttagtttattgtggaataggtggaagattttaatttttatgtttttgggtgggagttttgggtagtttttagattaaatgtaggatgttttattatatttgaatttttaataaataatatataattttttagtattagtttattttaaatatgatatgagacgtattgatattgaaaaatttttcgttgtgtatttgaaatttaaattgaatgggaacgttttgtatttttatttgttaattttggttgttttatattgagatttgttaagaaatagtagtagtttttggtgtttaatttagaataatataataggagtggtttgggtttattatttaaattttatttagtgagtgaggttggagttttggtttttttcgaggttgaagaggtttgaggagggaaaatagagttagaaagattagtgtttaggtttatttttttggaaggggtgatttaggtagttggggtgatttagatagttggttatattggttattagaaggaagggttaattttttattgcgtatatttttattttttttttttataattt

SEQ ID NO: 1809 - DNA, 2433 bp, Artificial Sequence
  chemically treated genomic DNA (Homo sapiens)
gaattatagagagggagggtagaaatgtgcgtagtggaaagttaatttttttttttggtagttaatgtagttaattatttagattattttaattatttaaattattttttttaggaagatgagtttgagtattggtttttttagttttattttttttttttaggtttttttagtttcgaggggaattaggattttaattttatttattgagtggaatttgagtggtgaatttaagttatttttgttgtattattttgaattgggtattaaaagttgttgttgttttttaataaattttagtgtagggtagttagagttagtaaataaaagtataaaacgtttttatttaatttgaattttagatatataacgaagaattttttagtattagtacgttttatgttatgtttgggataagttgatattaaaaagttatgtgttgtttattgaaagtttaaatgtagtggggtattttatatttgatttggaagttgtttaggatttttatttaaaggtataaagattaaagttttttatttgttttatagtggattggttttattagttattttggaaatagtttttttttttaatttttaagtaggatatatatgttaagtaggagtttttttttgagttgtcgagttaggtgatttgttgtgttaaggcgtttagtatagggttaggtatatagtaggtttttaatatatttcgttttttatttattttaggtagttggggtttagtattcggtttaggagaggttgtgattgtgagggcgttagtttagttttgattatgggaggagaggggtggtttaaggagtagtatggtagaggtgggatcgggaaggttatcgttatttattttttgaagttgttttgacgattatatgagaaagcggttcgggatatgttttgggtagtacgtaggttattattaagatttttgagtggtgtattttaattatagggtttcggtttttagttttttttggggaggaaggttggatagggaagttttagaagtatagagtagagttagtgtttttgaacgttggaatatcgacggttgatatttgtttagtattttgtaatttgttaaatacgtttttagttattcgttttataggttttattgtagttttaggaagtaggggcgggttggggtttattttttagagggtgtttagggcggtttgtttcgggttttgtttgggaggtggggttcggtttaggggattggggtcgaggttttagcggtgtgggggcgaaggcgggggtttattttttgggtttgttggattatttgtttgattatttgtttgaggtgcggcgttttttcgtttttgggcgggtgggtgaagagcgtgattcggtttacgtcgcggtagaaattagtgttcgtttagtttaggtttagaggaggtatttcggtgtcggaacggtcgggttagtaggttagggattcgtcggatttagtcggcgtcggcgcgggggttttggttttggttttgtttttgtttcgggcgttggcggcggggacggcgttttcgtaggggttttaggcggttcgtagggtttggcgtttcgggttggagaggaagtttcgtagttgtttttttttgagtcgttcgcggtaggtttgttcgtcgtcgtttagtagcgtttttagcgcggttcgtcgtcgttcgtagtagtagaaggcggtttgcgtttcggttattttttcgtttacgtgcgtttcgtttaggtagtttagttgggattcggttatggcgtttcggtttcggtttcggttttggtttcggtttcgtcgcggttcgaggttttatagtcgtatttggagtcgtcgaggggcggggcgttttatttggtcgcgagttttgtttcggttcgtttcgtttcgtttcgtcgtcggggagcggttaattcgcgcgggcgtggtcgtcgggcggggaggggtcgtcgttttcgtcgggttcgtcgggattttcgggcggtttggcggacgcggtcgggttcgggtttgtagggtttattagtcggggttagagtttttgaggggacgtttttagggggcggggtcgtcgtagatttacgtgcgggtttcggtttcgattttttcgcggggtaaaggttcgttgttcggttttcgttgttattcgttttcgtcggtcgcgtcgcgggtacgagtttatttttcgcgtacgtggagttcggagtacgtgttttggtttagtggtttttggggtcgtcgagttgatttttttttcgtcgagggttcggtgttggtgggggggtttgttgtaggacgggattgtgacggttgaggagcgggtagggggtgtgtaaaagcgaaatgttaatgagagttcgagttttttatttttgcgttttagttttgagattagagtttttttgggttgggagt

SEQ ID NO: 1810 - DNA, 2339 bp, Artificial Sequence
  chemically treated genomic DNA (Homo sapiens)
ataggtgaataaaaaaattaaatagtgtggggaaaaaatagatttgtatataaatttttatagtagcgttatttataatttttaaagtataaatagtttaagtgttcgtacgttgatgaatggataagtaaattgtggaagttttatgtaacgtagtgtcgtttagttacggggagacgtgaagttttgatatttgatatagttaacgcgttgtaaattattgtattaggtgtgggaagttaggtataagaggatcggtacggtatgattttatttataggaaatgtttagaacgggtagttttatatatttaaagttaattagtgttgttaggggttgggggaagaggaaggaggagggattgttgatgggaacgggtgttttttggaggtgattgaaagattttaaaattgattgtgatgatggttatatagttttgagaatgtattaaaaattagtgaattgtgtgttttagatgggtgaattttttcgtgttaatgatattttagtaaggttggaaggatatagatttggttagcgaggagggtttgggttttgttaaagtgggtagagtttgtggggtttattggtttagttttagtttttttgtgtagttttggggtttggttttttttgtcgtattttataagttgttttttttttttagtcggggttttaggtttgtttttttttgggttgagtattatttttgttagaggaaggttaaagtatttggattttaatattttaaggatttttgtaggtttttttcgggatttattttttagtgagcgttgtcgtgcgtatttttgggtttgagggttgggtattttttaggtatgtaaggggtttttcgtgtagggttgtgagtaacgtgggggtagtcggtcgtagtttttagtttcggggtttgttggtatttttattagtttttagtttgggtattttatttaaggaattcggtttttagagttcggggtattgattaatatttatataggtagtagagagttgttgaattttgaacgcgaggtagggaagaaagttgaagtatttgttatttataaattaaaatgaatttattttttttttaaggatagtcgttgtaataggtcgtagttaataggttttatggtgtgatttttgcgtaggaagttattgtttatatcgggtgtggaagtatttgtaatttttaggggatttgttgttttatagaattcgacggaaagttcgaggaaggtcgagtttcgggggttataggtcggatgtcggagttgttttatgggtggtgttcgagggagttttgggaggagtcgttagtttaggtagtgggtggagacgggttttgttttttgtttttattagtttcgtttagttttcgggttatttattatagtttcgttagagtaggtagacgtgtagatgttaaggtagacgtgtagatgttaagtcgtatttgtttattaaatttacgttttcgttataacgtagttgtcgagtaaatgttttttatggattaaaaatataagtagagatggtcgggcgcggtggtttacgtttgtaattttagtattttgggaggtcgaggcgggcgggttacgaggttaggagatcgagattattttggttaatacggtgaaatttcgtttttattaaaaatattaaaaaattagttaggcgtggtgggggcgtttgtagttttagttattcgggaggttgaggtaggagaatggcgtgaattcgggaggcggaggttgtagtgagttaagattatattattgtattttagtttgggcgacggagcgagatttcgttttaaaaaaaaaaaaaaaaaaaaaaaaatatatatatatatatatatatatatatgtagagatatgaatgtcgatttttatgatgtttatttatttatgaaattaatggtttatttgttagaaatttagtttttgggttgatattaaatttaattgttggttttttttgttgaatggaggggttgggagaagtcgtttttagttggtagttttagatttgtgtttatttggtaggtttttatttaggtggggataggttattaggcgggagttattggggtattgttggggtttaggatatttgtaggatgagtgaaggaggaggagagggaggaagatagagaggattatttcggttattttgattttgttttttggttatgtttgggtttttagaggtaggagttggggggttgtagggttgggggttataacgattttttagttgttgttattttttttggtaatgaattttaaagtttttatttttttatcgcgggtgttagatataggtttggtgtaggt

SEQ ID NO: 1811 - DNA, 2339 bp, Artificial Sequence
  chemically treated genomic DNA (Homo sapiens)
atttgtattaggtttgtgtttggtattcgcggtggggaggtgggggttttggggtttattgttagggagggtgatagtagttggagagtcgttgtggtttttagttttgtagttttttagtttttgtttttgagaatttaggtatggttaggaggtaaggttagagtggtcgaggtggttttttttgttttttttttttttttttttttttatttattttgtaagtgttttgagttttagtagtgttttagtgattttcgtttggtggtttgtttttatttgggtgggggtttgttaggtagatataggtttgaggttgttagttggaggcggttttttttagtttttttatttagtaggaaaagttaatagttgggtttggtgttaatttagggattgaatttttggtaggtaagttattggttttatgaataaataagtattataagaatcggtatttatgtttttatatatatatatatatatatatatatatatttttttttttttttttttttttttgaggcggagtttcgtttcgtcgtttaggttggagtgtagtggtgtgattttggtttattgtaattttcgtttttcgggtttacgttatttttttgttttagtttttcgagtagttgggattataggcgtttttattacgtttggttaattttttggtatttttagtagagacggggttttatcgtgttagttaggatggtttcgattttttgatttcgtgattcgttcgtttcggttttttaaagtgttgggattataggcgtgagttatcgcgttcggttatttttgtttatatttttaatttatggagagtatttattcgataattacgttgtagcgaggacgtgagtttagtgagtaagtgcggtttggtatttgtacgtttgttttggtatttgtacgtttgtttgttttggcggggttgtggtgggtgattcgggagttgggcggagttggtgaaggtagaaggtagagttcgtttttatttattgtttgggttgacggttttttttagggttttttcgggtattatttatggagtagtttcggtattcggtttgtgattttcgaagttcggtttttttcgagtttttcgtcgggttttgtggagtagtaggttttttgggggttataaatgtttttatattcggtgtgagtagtggttttttgcgtagaaattatattatgggatttgttggttgcggtttattatagcggttgtttttagaggaagagtaaatttattttgatttatagatagtagatgttttaatttttttttttgtttcgcgtttagggtttagtagttttttgttgtttgtgtgaatattaattagtgtttcggattttgggagtcgggttttttgggtggggtgtttaggttgggggttggtggggatgttagtaggtttcggggttggagattgcggtcggttgtttttacgttgtttatagttttgtacggagagttttttgtatatttgggagatgtttagtttttaggtttaggggtgcgtacggtagcgtttattgagaagtggatttcggaagaggtttgtaagggtttttggggtgttggggtttaggtgttttgatttttttttggtaaaggtgatgtttagtttagagaggagtaggtttggggtttcggttggggagagggggtagtttgtggggtgcggtagaagaagttaggttttagggttgtatagagaggttggggttgagttaatggattttatagattttgtttattttagtaaggtttaggtttttttcgttgattaggtttgtgtttttttagttttattgagatattattggtacgagaaaatttatttatttaaggtatataatttattggtttttagtatatttttagagttgtgtaattattattatagttaattttggaattttttaattatttttaaaggatattcgtttttattagtagtttttttttttttttttttttttagtttttggtaatattgattggttttgagtgtgtggagttgttcgttttggatattttttgtgagtggaattatatcgtatcggtttttttgtatttgattttttatatttggtgtaatggtttatagcgcgttggttgtattaggtgttagagttttacgttttttcgtggttgaacgatattgcgttgtatggggtttttatagtttgtttgtttatttattagcgtacgagtatttgggttgtttatattttggggattgtgaatagcgttgttgtgaagatttatgtataagtttgttttttttttatattgtttaatttttttatttatttgt

SEQ ID NO: 1812 - DNA, 2444 bp, Artificial Sequence
  chemically treated genomic DNA (Homo sapiens)
atttttatttgaaaaagttttgattagtttattttttcgaattaattagaagatataaagtagagtttatttttttggaaatgggttttttatttttttttttttttttttttttttagtttggaaattttttttttttatttttgtttgttttaggttttattggttatgatcgttttttattgttgggttttagtttttttttttttttataaattttttttttttttagatgaaaagattaatattgaaaaggtaagttgatgtgtttcggtttgtatagagttttggaagtagagttgggatttgaattttgggtttttgattttttgtttagggttttttattttggtagagtaggagattaattttttttttttttttttttttaaatgaagtttttatatatagttatttatatatgtataagtagtttttaaggttagagaagttaattttaaattttagagttgtggaggttttatagattatatggagttttagttagtgattaaatttgaggtaatagtatttggaggtttagttttagtattgaggggagttggagggaaaaattaagttaagagtaaaattttttcgttttgaaaataatagtggtataatataatatttttggattgtgggaaataaaatggagagggatatgattagaaggaaatttttagaattttattaattttacgttttttaaattggtataattggtgataattttagagttatttgttatcgtattaaagtttgatagagaaggatgatttataggagtagttttgttgtgtttgaggattgtttgatatttgaaatgagtttcggattagtttttggttgaagtttatttaggtttttttcgcgaaggttaagttattagagttaattattatttttgttttattttgtttaaatatcgtcgtcggggttgataattgtatttagtgaatatttgtattggaattcggagtatttatttttttttatttgtagtttgaggaattttgattttttggtgatttttagaagtttttggacgtagttgttcgtgaggcggatttgttcgtcgtcggtttcggggttggacgatacgttcggagttttagggaggtcgcgaggagtttgtttttcggttaggaagtgatcgttgtttgcgtcgcggtttttaaggataatttttgggcggtaattatttttttttatttaggagattaatttttttgttgaggttttatttaaggttgtagtatttatttattgaggtttttaagaaatttgtttgttttaggaaattttttattgagatttgtttcgtattgttatttggtggtaagatataaaaatatattttttacggtgggattagattgcgcgtttgtttcgtttttatttcgtttttttttcggtggtggggtagagggatggtggaaagggaattaagagttagtttttagaagtgtaggtatttgggattgagattggagtggggttatatttttttttttgtttttagtattagttatagttttgttattgtgtttttagttttttttttttttgtagatattggttatttgtgaaattaattgtattttttttttgtattgttttttaggatatttggaattagcgtatagtttattgttagtaattggatagaatcgtatggtaggaatttagaagaggagtttaatttttgagtttatatttttttttttgggttttatttttttattttattttatatttagttttttgatgatgtttaggatatttttttagttattttaatttttttttttgtaagggataggagggataaagtaaggttatatatttagaaagagtttgtttattttttgtaagttttagtttttttttttataaagtgggtataagaatttttgttttggagggttttgtgtgtgttttaggagatgttggattaatattagtgtttattttattttttatttttttattttttaggttttttgttagttatgtgatgtaggttaggatgtaaaggagattaatagtatagattattttttttttagtgttatttgtgttttgtaggtttagtgggtgtttttattagagttttgtattttgagtttagtttttatttgttttttggaagatgttggttttagaattttttgttttttttttgtaggtattgtggtatttatagttgatttgtagagagtttagatgtattttataaataaggaatgtattgttttgtaggacggttgtggcgtggttgtgtgggggtgggtaggttggagtagataggaattacgagaggtagggaggattgtataggggttgttgattaggtggaagatgatgggagttttagaaggtgtcgtgggatagggttagggagagggttttatgcggttaggatttggatgtagattgtt

SEQ ID NO: 1813 - DNA, 2444 bp, Artificial Sequence
  chemically treated genomic DNA (Homo sapiens)
aataatttgtatttagattttggtcgtatagagttttttttttgattttgttttacgatattttttgaggtttttattattttttatttggttagtaatttttgtatagttttttttgtttttcgtggtttttgtttattttagtttgtttatttttatatagttacgttatagtcgttttgtagaatagtatattttttatttatgagatgtatttgggttttttgtaaattagttgtgaatgttataatgtttgtaggagggaggtagagaattttggagttaatattttttagaaggtaggtagggattgggtttagggtataaggttttagtaggggtatttattgggtttgtagagtataaatggtattggggaaaaagtgatttgtgttgttgattttttttgtattttagtttgtattatataattggtagagagtttggaggatggggaggtgggaaatagggtggatattaatattaatttagtattttttgaaatatatataaaattttttaaggtagggatttttgtgtttattttataggggaggaaattgagatttgtagaaggtaggtaagttttttttgaatgtataattttgttttgttttttttgttttttataaagaggagagttaaggtggttggaaggatgttttgaatattattagaaaattaaatataaaataaggtaggaaaatgaggtttaggggaaggaatgtggatttagagattaagttttttttttaaatttttgttatgcgattttatttagttgttaatagtgaattgtacgttggttttaggtgttttggaagataatgtaaagagggaatataattagttttataagtggttaatgtttgtaaagaggaaagaaattagaggtatagtgatagagttatggttggtattgaaaatagagaaggaggtgtagttttattttaattttaattttagatatttatatttttgggaattagtttttggttttttttttattatttttttattttattatcggggagagggcggggtgggggcggagtaggcgcgtaatttgattttatcgtggagggtgtgtttttatattttattattaggtggtagtgcggggtaggttttagtaggaggttttttaggataggtaggttttttaggaattttagtgagtgagtgttatagttttaggtggaattttaataaagaaattgattttttgggtggaggaagatggttgtcgtttaggggttgtttttaagggtcgcgacgtagatagcggttattttttggtcgaggggtaggtttttcgcggtttttttgggatttcgggcgtgtcgtttagtttcgaggtcggcgacgggtagattcgttttacggatagttgcgtttagaggtttttggaaattattaaaggattagaattttttaggttgtaggtggagggaggtagatgtttcggattttagtatagatgtttattggatatagttattaatttcgacgacggtatttgaatagggtggggtaagagtggtggttgattttgatagtttagttttcgcgaaaggggtttaggtggattttagttaagaattgattcgaagtttattttaagtgttaaataatttttaagtatagtaaggttgtttttgtgggttatttttttttgttaaattttgatgcgatgataggtgattttgagattgttattagttgtattaatttgaggaacgtggaattagtagaattttagaagtttttttttaattatgtttttttttattttattttttatagtttaggagtattgtgttatgttattattatttttagaacgggaagattttatttttggtttaatttttttttttaattttttttagtgttaaggttgagtttttagatgttgttattttagatttaattattagttgaaattttatataatttgtagagtttttatagttttaaaatttggaattaatttttttggttttaagagttgtttgtatatatgtggatagttatgtataaaagttttatttaaaaaaaaagaaagagaagaaattgattttttgttttgttagaatgaagagttttggatagagaattaggagtttagaatttaaattttagttttgtttttagggttttgtgtaaatcggagtatattaatttgtttttttagtgttggtttttttatttgagaaagggggagatttatggagggaggaggagattgagatttagtaatggaggacgattatggttaatgaagtttgggataggtagaagtggagagaaagaatttttaaattagaggagaaaaaaaaaaagagggggtaaagggtttatttttaggaaggtgagttttgttttgtgttttttggttggttcgggggagtaaattagttaggatttttttaaatggaaat

SEQ ID NO: 1814 - DNA, 2414 bp, Artificial Sequence
  chemically treated genomic DNA (Homo sapiens)
ttagttttattttggttatttgtaggattttgagtcgtagaggattaatttagtcggcgtgtagggggcgtggtttgtgttttattgtaggtattttttttgtttttttcgtagtattgatgataggtcggttgtgttgggtatcgagaatgtatcggttttgttttcgtagggtttatagattagggagggaggaagattataaataaatgaagtgagtaaggtatcgtgtatgtattttattagtgtttatagagtttatgttttgagttaggtattagtttagtaaataaatatcgttaacgtgttttagatatttgttttattttttagttttaatttttgttatttatgaagttttataataggtttagggggtggtttttttgtaattttattttataggagaggaaatagaggtttagagaggttaagttttttgttatgttgttaggtagtgacggagtttgtatttataatcggtatgttgttttttgttggatgttaggggggtttttaggggttgaagtttatgtggtttttgttttttggagtttaggttagtggggtttggaagaagaggggtagggtttttttatttgttatagtgaattttaggtgggtgagattagggaaggttttttggaggaggtgatgtttgagtcgggatttgaaggttaggaaggaattaattaggtttagagggagagagaatttattttttttatttatgttatttattttttgatattttttttaggaagttttttttgtttttttttagacggagtttttatattatagttgtattatttttgtttgtgttcgagtttttattagattgtggaatttttaaaaggtagtgtagggggttggtttttttgtgtttttagtattatttagtttcgggtacgggaattagaggttgagggacggtaggttgtgtgggttgaggtgggagggcggtatagtcgaggggttcgtttgttatattggttttaggtgtatagggtgagatatttaggaattttgttgtttaggagaattttaggttaatgatttgtcggtttttgattagtttttgatgttgttttgtgttaggtagcgcgttaggtagatgattttttttttgattttaggagaggttggagtaagcgtgtttttagttaggacgtgtaaatggtatgtagtggaggaagttagggagtatgaattgttgggatttagttgtttgttttggaagagggtattttttttttttgtttatgttaattttatttttagtttgtatttagaattttatcgttgtttatcggttgggtagatagaggttgttttgtttggttgttaatacgaaatggtattttgttcgaggtgttttttttttttcgtttttttttgtttttaaatttagagtaaaggtagtatgagttacgatttatcgatacggtgagggataagtatgtttcgttagggaggggttttgtgcggtttgaatcggggattgtagtaaacgatcgcgtagcggggatttaagtttttgatggtgttagaaaaatataataataatagaaataaatattaaatttataaaagtttagtgtagaaggtttagagtttaagagcgtttatgtacgtaggtcggttagttgggggattttgggtaagatatttttgaggataaagatatttttttttaattttagtttttttatttgtaaaatggataggataatatttatatttattttataggattattgtgttgataaataagtgagtattatatgtttagtatttattaaggtttagatgtaataaatggtaagtcgtattgttattatttagatgtttatgaaagtttttgtgtttgttattagttaattatggtgatttgaaatgagttttggaaatttaggatggtaaggaatgggtttagtttgtgttttggtgtattattaagatttttataaatggtatgggaaaattatttttgaagatttatgattataagttagtttttaaataagtttatagggataattgatatttttagttttgtgtgtaaaaattttaggttgagaatttagatgaaaatggttttttttagattttttataaataaatgtaaatttttttggagtaattaaggtgatattttaattataggagtattttatagttgagagttattaaatatacgaggaaatagggtattatgagtaagaattagtataaattttatttagttgaattagatttatagagtttttagatagtagaattattagatgaggaatgtaaaataagtttgtttattataattaaagatataaaaaagaggagagtttaaaatatgagttgggaataagagattttaaaaatggattaggtatggtggtttacgttagtaa

SEQ ID NO: 1815 - DNA, 2414 bp, Artificial Sequence
  chemically treated genomic DNA (Homo sapiens)
ttattggcgtgagttattatgtttggtttatttttagaattttttgtttttaatttatattttgaattttttttttttttgtgtttttaattgtagtaaatagatttattttatattttttatttgataattttgttatttggggattttgtggatttgatttagttaggtgaggtttgtgttggtttttatttatggtgttttgttttttcgtgtgtttagtgatttttagttgtaagatgtttttgtggttggaatgttattttaattgttttagggggatttgtatttgtttgtgagaagtttagagaaagttatttttatttaaatttttagtttgaggtttttgtatatagaattggaagtgttaattgtttttatgaatttgtttgagggttggtttgtggttataaatttttaggggtaatttttttatgttatttatgaaagttttggtaatatattagggtataaattagatttattttttgttattttaggtttttaaggtttattttaggttattatggttagttggtgatagatatagaggtttttatgagtatttgaatgatggtagtacggtttattatttattgtatttgaattttagtgggtgttgggtatatgatatttatttatttgttagtataataattttatgaagtaggtataagtattattttgtttattttatagatgaagaaattgaagttaaaaagggatatttttatttttaaggatattttgtttaagattttttagttggtcggtttgcgtatatgggcgtttttggattttgggttttttgtattgagtttttgtgggtttggtgtttatttttgttattgttatatttttttggtattattaggggtttgagttttcgttgcgcgatcgtttgttgtagttttcggtttagatcgtataaagtttttttttggcggagtatgtttgttttttatcgtgtcgatgagtcgtgatttatgttatttttgttttgaatttagaggtagggaaaggcgagggaggaggaatatttcgagtaaaatgttatttcgtgttggtagttaggtaaggtagtttttgtttgtttaatcgatagatagcggtggagttttgggtataagttaaggataaagttaatatgggtaggggggaaaaatgtttttttttagaatagatagttgggttttagtaatttatgttttttggttttttttattgtatgttatttgtacgttttggttggagatacgtttattttagttttttttggggttaaagagggggttatttgtttggcgcgttgtttgatatagagtaatattaggggttaattaggggtcggtaggttattggtttaaaatttttttgagtagtagggtttttgagtgttttattttgtgtatttggagttagtgtgataaacgggtttttcggttatgtcgtttttttattttagtttatatagtttgtcgttttttagtttttgattttcgtgttcggggttgggtggtgttggggatatagaggagttagttttttgtattgttttttgggagttttatagtttggtgggaattcgggtatagatagagatagtgtagttgtagtgtgggagtttcgtttggaagagggtaaggagggttttttggagggggtgttaaagaataggtagtatgagtagaaggagtagattttttttttttttgaatttggttaatttttttttgatttttagatttcggtttaaatattattttttttaggaagttttttttgattttatttatttggaatttattgtaatagatggaagggttttgtttttttttttttaggttttattagtttgagttttaggaggtagggattatatgagttttagtttttggagatttttttagtatttagtaggaggtagtatatcgattatgggtgtaggtttcgttattgtttaatagtatggtaaggagtttagtttttttgggtttttgtttttttttttgtaagatggggttataagagggttattttttaggtttattgtgagattttatgggtaatagaggttgaggttggaggataaggtaagtgtttgaaatacgttagcgatgtttatttattagattagtgtttggtttagagtatgggttttgtagatattggtagaatatatgtacggtgttttgtttattttatttatttatgatttttttttttttttggtttgtgggttttgcgagagtagggtcggtgtattttcggtgtttagtatagtcggtttgttattagtgttgcgggagggataggaggggtatttgtagtgaggtataggttacgttttttgtacgtcgattgggttaattttttacggtttagggttttgtaggtgattaaggtggagttgg

SEQ ID NO: 1816 - DNA, 3544 bp, Artificial Sequence
  chemically treated genomic DNA (Homo sapiens)
tttagtaattttttttatatgtttttttattaggtttaagatgaaagtttttgttttagcgttttttttttttttttttttattttttttttttttatttacgaagattttagggttttgcgagggtcggagttttttatgtatttttatattaagatagttgttaggatttgtttaataggaagtttttttttattagagtttagttttattttagggaatttatttttttttcggaaaaaggaaaattgaagttagatgttttttgggatcgttatttgaggtgggcgtggttattaggacgtttagagagtttagcgcggtgaggaaagcgacgaatttaggagttttggtttgggtttagttattttttattatttatttgatttttattaagttttttgatttttttaggttttagtttcgatattaataagatgaattaatagttgggtatggttcgcgtttgtaattttagtattttgggaggtcgacgtgggtgtatttgtttgagtttaggagttttagattagtttgggtaatatggtaaaattttatttcgttaggcgcggtggtttacgtttgtaattttagtattttgggatgttaaggtgggtggattatttgaggtcgtgagttcgaaattagtttggttaatatggtgaaattttattttttttaaaaatataaaaattagttgagtgcggtggtgtatatttgtaattttagttattcgggaggttgaggtaggagaattatttgaattcgggaggcggaggttataatgcgttaagattacgttattttattttagtttgggtaatatagaatgttttaaaaataataaataaataaatataagaattatttgttttgggaagtgtagttttttttagtttatttaggttaggagtaaagttagtttattaatttttgttagcgtttttttttttagaaattttttttttaataaaagatgagattttttttttttttttaaaaggatgatttgtgttttgtgttttgtttgtttgttttgtttataaaattgatgaaagttttattgtaaggtaaagttaatgttttttttttattttttaagaatttagaaatggaaatataattttgtatttagagagttaaaatagaaaataagtaatagatttaagtggagatatgtagattatataagagatcggattttttaggatttagttttgtcgttaaatttattaagggtattaatatatttaaggaaaaggtcgggtatggtggttcgtaatttttgggaggtcgaggtgggtggattatttgaggttaggagtgtaagattagtttagttaatatggtaaaattttgtttttattaataatataaaaattagttgggtgtggtggtgtacgtttgtaattttagttattttagaggttgaggtaggaggtttttttgaatttaggaggcggaggttgtagtaaattaagatggtgttattgtattttagtttgggtaataagagcgaaattttgttttaaaaaaaaaaaaaatatatttaaggaaaaaggtgggttagtttaggatgttaagtaaagggagagttgagatttataaattggaataatttgaataacgagtggattagttgaggttaggagtttaagattaatttggttaatatggtgaaattttatttattgaaaatataaaaaattagttaggtatggtggtgtgtatttgtagttttagttattcgggaggttgaggtacgagaatcgtttgaatttgggaggtggaggttgtagtgaggtaagattatattattatattttagtttgggcgatagaaattttgttaaaaaaaaaaaagaagaagaagaaagaaaagaaaagaggagaattttttgatgaagtataagtgtttggttcgaatgataatagtattttgatttttttgtttatatatttattttttatgaatttgtttagtgtgtattgattttgcggagttttattatttttgggtttataaatagtaaatttcggagcgtataaaagtttatagaatatgttaataaaattaaaatattgttattatgtgggtttttttataagtttaattgttagtttttaaggtatttgtgtattcgattaatatgtaaatgaacgagtagatttttttggatataatgtggagaagattttattaaaggttattttttttaagttattgataatttttaattagtttaaattcgtttgagtttattatataaaatatttaaggattttgtttatttttataatattttattttttttagtttaataaaaatatttttaggaaagttttttttaataaatttattgaaataaaattttagtagtatttgagtatttagggttgtttttttcgaaagattttttttttattaatacggagtttggtgttagtttattttagagtatttaattttagttattttttgtttttggttaaaatgtaagatttaaaaattagatttttttgatgatgttttttttttttggattttttttatttttttttattttattttttttaaatttttttttttaaaattaaatttttttttttttttttttttttttttttttttttttttgagacggagtttcgttttgttatttaggttgaagagtaatggcggtatttttgtttattgtaagtttttttttttgggtttaagtgattttttcgttttagtttttcgagtagttgattataggtgcgtattattatgttagttaattttttttttttttgagatagttttattttgttatttaggttagagtgtaatgatataatttttgtttattgtaatttttattttttaggtttaagtaatttttttgttttagttttttaagtagttagaagtataggtatgcgttatcgcgtttagttaatttttgtatttttagtagagatagggttttattatgttggttaggatggtttcgatttcgatttcgtgattcgtttgttttagtttttcgagtgttgagattataggtatgagttatttcgttcggttaatagttaatttttgtatttttagtagagatggaatttcgttatgttgattaggttggttttaaatttttggttttaagtgatttattagttttagttttttaaagtgttgggattataggtatgagttaatgtatttggttttttttttttttttaatttttttatattttttttttttgtgtgtaaaataagtttttttattttaaaaagaaatttgtggtttttgtggttttttttagttatttcgatgtttttttttttaaattatatttagagtttttaattagttaaatttggttttaatttattatttgtattttatttttttttttttttttttttttttttttttttttttgtgtgtgtgtgttttttgagataatatttaattttgttatttaggttggagtgtagtggtgcgattttggtttagtgtaatttttgttttttaggtttaagtgtttttttgt

SEQ ID NO: 1817 - DNA, 3544 bp, Artificial Sequence
  chemically treated genomic DNA (Homo sapiens)
gtaggagaatatttgaatttgggaagtagagattgtattgagttaagatcgtattattgtattttagtttgggtgatagagttagatgttgttttaaaaaatatatatatataaaaaaaaaaagaaagaaaggaaaagagaaagaaaaatgaaatataggtgatgaattggagttaggtttggttgattaaaggttttgagtgtgatttgagaaaaagaatatcgagatagttggagggaattataggggttataggtttttttttaggatggagagatttgttttgtatatagaaggaagaagtgtggagaggttaaaaagagaggggaggttaggtgtattggtttatgtttataattttagtattttgggaggttaaggttggtggattatttgaggttaggagtttgaaattagtttggttaatatggcgaaattttatttttattaaaaatataaaaattagttgttggtcgggcgaggtggtttatgtttgtaattttagtattcgggaggttgaggtaggcggattacgaggtcgagatcgagattattttggttaatatggtgaaattttgtttttattaaaaatataaaaattagttgggcgcgatggcgtatgtttgtatttttagttatttgggaggttgaggtaggagaattgtttgaatttgggaggtggaggttgtagtgagtagagattgtgttattgtattttagtttgagtgatagagtgagattgttttaaaaaaaaaaaaaattagttggtatggtggtgcgtatttgtaattagttattcgggaggttgaggcgggagaattatttgaatttagggggaggagtttgtagtgagtagagatatcgttattgttttttagtttggatgatagagcgagatttcgttttaaaaaaaaaaaaaaaaaaaaaagaaaaaagaaaaaaaaatttgattttaaggaaggaagtttggagagagtgaaatggaaaggagtagaaagagtttaaaagaagggagtattattaaaaaaatttgatttttgggttttgtattttggttagaagtaaaggataattgaggttaggtattttgagatggattgatattaggtttcgtgttggtaggggagggatttttcgaggagagtagttttaggtgtttaaatattgttagagttttattttagtgagtttattggagagaatttttttgaggatgtttttgttgggttgagggagatggggtattgtgggagtgggtaggatttttgggtgttttatgtggtgagtttagacgggtttgagttggttaaaggttattagtggtttggggaaagtgatttttggtagagttttttttatattgtatttaagagagtttgttcgtttatttatatattgatcggatatataaatgttttggggattgatagttaagtttgtggaaaggtttatatggtggtagtattttagttttgttagtatattttgtaggtttttatacgtttcgaagtttattgtttgtagatttagaagtgataggatttcgtaggattaatatatattgaataaatttataagggatagatgtgtaaataagaaagttagaatgttgttattattcggattagatatttatgttttattaggaaatttttttttttttttttttttttttttttttttttttttttttgatagaatttttgtcgtttaggttggagtgtagtggtatgattttgttttattgtaatttttattttttaggtttaagcgattttcgtgttttagtttttcgagtagttgggattatagatgtatattattatgtttggttaattttttgtatttttagtaaatggggttttattatgttggttaggttagttttgaatttttgattttagttgatttattcgttatttaagttattttagtttgtgggttttaattttttttttgtttggtattttggattgatttatttttttttttagatatgttttttttttttttgaggtagagtttcgtttttgttgtttaggttggagtgtaatggtattattttggtttattgtaattttcgttttttgggtttaagggaattttttgttttagtttttggaatagttgggattataggcgtgtattattatatttagttaatttttgtattattagtagagatagggttttattatgttggttaggttggttttgtatttttgattttaggtgatttatttatttcggttttttaaagattacgagttattatgttcggttttttttttagatatgttaatatttttggtgagtttagcggtaaggttggattttggagagttcgattttttgtgtgatttgtatgtttttatttggatttgttgtttgttttttattttaattttttgagtgtagagttatatttttatttttgagtttttgagaagtgggaggggaatattaattttgttttgtagtggagtttttattagttttgtggatagagtagatagataagatataggatataaattatttttttaaaagaaaagagagggttttattttttattgagaaaagaatttttgaaaagggaggcgttggtaaaaattgatgagttgattttgtttttggtttaggtaggttggaagaaattgtattttttagagtaggtgatttttgtgtttgtttgtttgttgtttttgagatattttgtgttgtttaggttggagtaaagtggcgtgattttggcgtattgtaattttcgtttttcggatttaagtgatttttttgttttagtttttcgagtagttgggattataggtgtatattatcgtatttagttaatttttgtatttttagaagagatgagattttattatattggttaggttggtttcgaatttacgattttaagtgatttatttattttggtattttaaagtgttgggattataggcgtgagttatcgcgtttggcgagatggggttttattatattgtttaggttggtttggaatttttgagtttaggtaaatatatttacgtcggttttttaaagtattaggattatagacgcgagttatgtttagttattaatttattttattgatgtcgaaattaaagtttggaaaggttaaagagtttgatgaaggttaaataggtagtaaggggtggttggatttagattagggtttttaagttcgtcgttttttttatcgcgttgggttttttgagcgttttaatagttacgtttattttaaatggcgattttagagagtatttggttttaattttttttttttcggaggggagatggattttttggaatggaattgggttttggtaggggagaattttttgttgggtaaattttgataattgttttggtgtgggagtgtatagggaatttcgattttcgtagaattttgggattttcgtgggtggaggggaagaggatagaggaggggagggaggagacgttgagatagaggtttttattttgagtttggtggggaggtatgtgggagaagttgttgag

SEQ ID NO: 1818 - DNA, 2382 bp, Artificial Sequence
  chemically treated genomic DNA (Homo sapiens)
ggatttatttattgtttgtaatttttcgggttgaagagattatttttcgggagttaattaatttattttttggagcgcgcgtttttttttgtttttaggagtcggttttttaaaattttttgaggttcgcgtatgtttttttcgatttttcgtgtttttattttttatagaaatttacgtatttacgttttttttttttttcgagtttgtagaggatttcgttttgttttttttatatttagggttgttttttttgtcgttaatataaatttgttgataggttacgtttgggaagcgggtggggtgtttcggagcggtgttgaggcgttgtaggttcggtttttggttgcgggggagttgtattttgaagtttcgtcggaattcgcgtttggggttagtagggggtattagagttaatagggattgtatgtaaaatttatttttttttaggttttttagggggatggttaggtttttgtagagatggggaggatttttttttggtaaggggagagggacgggttaggagttaagcggaaggatttcgtgtttaaggttttttaagggacgggataggcgaggaatttttttgagttttttgaattgttttattagttaggtttgggaagtatttcgtttttataaattttgtttttttgaaaggggtcgggggggggattttaatattttttgttataggttatgatgggtatggtggttaagagtaataggtcgcgtggtgaggttggttttttgtggttttgttttgttatttttcgaggtatttttatgttagtgaatagagttgcgggtttttagttgtatagatgaatgtacgaataaaatataggtttatataaaggaagttattgtattgatttagattcgatttgggattgtcgtataaaatagggttgataaaaatcgtcgtgtttttattttggaaatagagatttagtttttttttttttgtttgaggtatttagtaaaggtttgtttttgagtggttgtggatgtttaaggatttacgatttttgattttataaagtttagggtgaaaataaaaaataaaataaggagattattgttttaaagtggtcgttgtagttaattattttaagaaagtaaataggttggtattgaaagttatataggcgggcggttttttgggagggttgtttagttttttttttttgagatttgagtagggagtagttagaggagtttgaagggatggtgtttagggtatgggaataggttgtatatatttttacggagtacggtgtttgtttagtttgagaagggaaagaaacgggagtagagggttgatgagaaggtagtagatggatagtgcgggattgaaaaggggatttatttgaagattggttattattatttatttttattatttgattgttgttgttttattgagatcgatgcgtggagaataagttggggagtggaataaatggtagggaggggagagaagtgagtgaatatgattttggtttagttttataggatagagcgtggttatgaagtttatagaggaggataggtagggaggaattatggtatggttaggttgtagggtaagaggtagagaggagagaggattgtggaggatgtttgcggagtgtcgattgttagtcgaggttggttttttatttatttattttttttttttgagacggagtttcgtttttgtttaggttggagtgtagtggcgcgatttcggtttattgtaagtttcgtttttcgggtttatgttattttttcgttttagttttttaagtattgggattataggtgttcgttattatgtttggttaatttttttgtttttaatagagatagggttttacgtgttagttaggatggttttgattttttgaatttatgattcgtttatttcggttttttaaagtgttgggattgtaggtattagttattgtgtttggttaaggttggtttttttttttatggcgatgggtgtttgaaagttgtatatattaaaataaatttattatttgttgatttaaagtaaaattttgagggtatgaaagggaagggtttatgtttatatggttgagataaaagttgttttaggaagttgggtgtggtggtttatttttgtaattttagtattttgggaggttaaggttggaggattttttgaggttaggaattgaagattagtttgagtgatatagtaagattttatttatatttttaaaaagggttggttgtttcgggatttttcgaaatagttttgtaagatatttttgttttggaattataataatttagataagatgtttttgaaagaatatttgtttaggtatagcgtttttattaatgaattgatgttaattgtggttt

SEQ ID NO: 1819 - DNA, 2382 bp, Artificial Sequence
  chemically treated genomic DNA (Homo sapiens)
aaattatagttggtattagtttattggtggagacgttgtgtttaggtaggtgtttttttaaaagtattttatttaaattgttgtgattttaaaataggaatgttttgtagggttatttcgaaaagtttcgagatagttaattttttttaaaaatatagatggggttttgttatattatttaggttagtttttaatttttggttttaggggattttttaattttggttttttaaagtgttgggattataggggtgagttattatatttagttttttgagatagtttttattttagttatgtaagtatgagttttttttttttatatttttagggttttattttgggttaataaatagtgagtttattttggtatgtgtaatttttaaatatttatcgttataaaagaaaggattagttttggttaggtatagtggttgatgtttgtaattttagtattttgggaggtcgaggtgggcggattatgagtttaggagattaagattattttggttaatacgtgaaattttgtttttattaaaaataaaaaaattagttaggtatggtagcgggtatttgtagttttagtatttgggaggttgaggcgagagaatggtatgaattcgggaggcggagtttgtagtgagtcgagatcgcgttattgtattttagtttgggtaagagcgagatttcgttttaaaaaaaaaaaataaataaataaaggattagtttcgattgatagtcggtatttcgtaggtattttttataatttttttttttttttgttttttgttttataatttggttatgttatgatttttttttatttgtttttttttgtggattttatgattacgttttgttttatgaggttggattagggttatgtttatttattttttttttttttttgttatttgttttattttttaatttgttttttacgtatcgattttaatggagtaatagtaattagatgatgaaaataaataatggtggttagtttttaaatggattttttttttaatttcgtattatttatttgttgtttttttattagttttttgttttcgtttttttttttttttaaattggataagtatcgtatttcgtgaagatgtgtgtagtttgtttttatgttttgaatattatttttttaagtttttttggttgttttttgtttaggttttagaaaaggagagttgggtaatttttttagggagtcgttcgtttgtgtaatttttagtattagtttgtttgtttttttgagataattagttataacggttattttaaaataatggtttttttattttgttttttgtttttattttaaattttataaagttagaaatcgtaagtttttgagtatttatagttatttaaggataaatttttgttgaatgttttaagtaaagagggggaggttgagtttttgtttttagggtgaaaatacgacggtttttattagttttgttttatgcgataattttaggtcgaatttggattaatgtaatgattttttttgtatggatttatgttttgttcgtgtatttatttgtgtagttgggaattcgtagttttgtttattggtatggggatgtttcggggaatggtagggtagagttataaaaagttagttttattacgcggtttgttgtttttagttattatgtttattatagtttgtggtaggagatgttggggtttttttttcgattttttttaggaaaatagagtttgtggaggcggagtattttttaggtttgattgataaaataatttaaaagatttaaagagatttttcgtttgtttcgttttttgaagggttttgaatacggggttttttcgtttggtttttagttcgtttttttttttttattaggaaaggattttttttatttttgtagaagtttgattatttttttagagggtttgggaggaagtgggttttgtatatagtttttgttgattttagtgttttttgttggttttagacgcgagtttcggcgaggttttagggtatagttttttcgtagttagaagtcgggtttgtagcgttttagtatcgtttcgggatattttattcgttttttaggcgtgatttgttaataggtttgtattggcgataaaaggagtagttttgaatgtagggaaagtagggcggagttttttgtaggttcgggggaggggaggggcgtgaatgcgtggatttttgtggagagtggaaatacggggagtcgaggggagtatgcgcgggttttagaaagttttgggaaatcgatttttgggagtagggaggaacgcgcgttttagagagtaagttaattgattttcggggggtggtttttttagttcggggggttatagatagtaggtaaattt

SEQ ID NO: 1820 - DNA, 2303 bp, Artificial Sequence
  chemically treated genomic DNA (Homo sapiens)
tataatttattttttgtggattgggagatttagtattataaagttgtcgattttttttaaattgttttatagatttaatgtaaatttagtaaaaaatttaataagaggttgggcgcggtggtttaagtttgtaattttagtattttgggaggttgaggtaggtagattataaggttaggagatcgagattattttggttaatatggtgaaatttcgtttttattaaaaaaaaaaaaaaaaaaaaaaatgagttaggcgtggtggcgggtgtttgtagttttagttatttaggaggttgaggtagggaatggtgttaatttaggaggtagagtttgtagtgagtcgagatcgagatattgtattttagtttgggcgatagagcgagattttgttttaaaaaaaaaaaaaaatttagtaaggggtgtgtgtgtgtgtttgtgtgtgtgtgtgtgtgtgtgtgtatgtaagttatagatagaatattttttttttttttttgagatagagttttattttgtcgtttaggttggagtgtagtggttcgattttggtttattgtaattttcgttttttaggtttaagtgatttttttgtttttgttttttgtgtagttgggattataggtgtgtattattatatttggttaatttttgtatttttagtagatatagggttttattatgttggttaggttagtttttaatttttggtcgtaagtaatttgtttattttagttttttaaagtgttgggattataggcgtgagttatcgagtttagttagtatatagaatattattttttatttaagtatattaatttagaagagttttttttaaaatatagtatattatttttatttataatatttaaagataattaaagttaaattatgttgttttaagatattatatatttagaaaaatatttataaaaagtaagagaaatatataaattaggtttatttggagagaagggagtgaagtattgcgttgatacggggataaatatgttggttgggtagataggtagtttttatgtttttggttgacgtagatgttacgtattattttatgtgttattatattttttagtaaatacgtaatataagagaataattaattattattaagcgtttttattttgagataggaagatgtagaggaaagattttgatgtgtgtgttagttataaggatgtatattagtgattgatatgatttggtgtaaattttgggtagagatttatatttaagttttttatttttatttgtcgaggcgtaagggtttagagggggttttatggggtgggcgggagtggtaagggtcgaggtgtagttatagtttggttttgtgtatattttttttttttttttggttttatgtgtatattttttttttgttttttgttttttgtgtatattttttgtattttttttttcgttttagtttgtgtttgtagtgttatagggtggttgtagtttttgttttttatagttttttaaggttagagggttgggaatttttgggatgtggttgggatgaggattttgtttttttttaggtatttttaggtaaggggtatagagatatagttagtttagtagttgagttttttttattaggttaggtgggaaattgaagtatgaatataattttagattggaaataaaaagtcgttatgtattgtgtgtttattgaatgttaagttttatgttttattttttaatgttatttttaatgagatgtttttatttagtttattatatgatagtagataggtatttatgatgcgtttattgtatgttgggtatttttttgggttatgaggatttagggaggtttttgttttggtagaagttaaattcgataggagatagagattaggggtttatatattaggaggaagaatttagtgtagagagtgttagtaggaagttataggggtagggaaggcgtttttgggagggtgggtggttgcgttttgaggttgagtagggggagttggtttcgggataggatgtgcgtaggcgtggagtaggaagtttttggaatgatgggtaagagggagtaggttattgggggtaggtttaaatattgggggttgtattgggatagtagaggtttcggataggttcgtttagtatgtagatttttttttttggttttttttttaggatgatagtggaggtttatttttaggtggtggtgagggtaattttgatatagagattttagtttagttggtaggggaaggggagtttttaaggatttttgtatgttggggcgtgtttcgttaggcggtt

SEQ ID NO: 1821 - DNA, 2303 bp, Artificial Sequence
  chemically treated genomic DNA (Homo sapiens)
ggtcgtttggcgggatacgttttaatatataggggtttttgggggtttttttttttttgttagttgggttggggtttttgtgttaggattgtttttattattatttggggatggatttttattgttattttagggaaggggttagggaggggagtttatatgttgagcgggtttgttcgaggtttttgttattttaatgtagtttttagtatttagatttgtttttagtgatttgtttttttttgtttattattttaggaattttttgttttacgtttgcgtatattttgtttcgaggttagttttttttgtttagttttaggacgtagttatttatttttttaggagcgttttttttgtttttgtggttttttgttggtattttttgtattgggtttttttttttggtgtgtgggtttttagtttttgttttttgtcgggtttgatttttattagagtagggatttttttgagtttttatggtttagaaaagtgtttagtatgtagtaggcgtattataaatatttgtttattattatgtggtgaattgagtgaagatattttattaaagatgatattaaagaatagggtatagggtttggtatttagtaggtatatagtatatgacggttttttatttttagtttggggttgtgtttatgttttagttttttatttggtttgataggaggggtttagttgttgggttggttgtgtttttgtgttttttgtttggaaatgtttgaggaggggtagggtttttattttagttatattttaggggtttttagttttttgattttgaggagttgtgggaggtaaaggttgtagttattttgtagtattgtaaatataggttggggcgggaaggggggtatagagggtgtgtataaggggtagggggtagggagagggtgtgtatatgggattagggggagggagggggtgtgtatagagttaggttgtggttgtatttcgatttttattattttcgtttattttatggaattttttttgagtttttacgtttcggtaggtgggggtgaggagtttaagtataggtttttatttaagatttgtattaagttatgttagttattggtgtatatttttgtaattgatatatatattaaggttttttttttatatttttttgttttaagatgagaacgtttgatagtggttaattatttttttatgttacgtgtttattggagagtgtgataatatatgaaatagtacgtaatatttacgttagttaaaagtataaggattgtttgtttatttaattagtatatttattttcgtattagcgtaatgttttatttttttttttttagatgggtttgatttgtatgttttttttgttttttatagatgtttttttaagtatatggtattttgaaatagtataatttggttttgattgtttttaagtgttatagataaaaatggtatattgtattttaaaaaaaatttttttagattaatatatttaagtaaaaaatggtattttgtgtattagttgggttcggtggtttacgtttataattttaatattttgggaggttgaagtgggtagattatttgcggttaggagttggagattagtttggttaatatggtgagattttgtgtttattaaaaatataaaaattagttagatgtggtggtgtatatttgtaattttagttatataggaggtagggataggagaattatttgaatttgggaggcggaggttgtagtgagttaagatcgagttattgtattttagtttgggcgatagagtgagattttgttttaaaaagaaaaaaaaagtattttgtttatggtttgtatatatatatatatatatatatatataggtatatatatatattttttgttgaatttttttttttttttgagatagagtttcgttttgtcgtttaggttggagtgtagtgtttcgatttcggtttattgtaagttttgttttttgggttgatattattttttgttttagttttttgagtagttgggattataggtattcgttattacgtttggtttatttttttttttttttttttttttagtagagacgggattttattatgttagttaggatggtttcgattttttgattttgtgatttgtttgttttagttttttaaagtgttgggattataggtttgagttatcgcgtttagttttttgttgaattttttattggatttgtattaaatttgtagaataatttggggagaatcgataattttataatattgaattttttaatttataaagagtagattatg

SEQ ID NO: 1822 - DNA, 2496 bp, Artificial Sequence
  chemically treated genomic DNA (Homo sapiens)
agtttattgtagtttcgattttttgggtttaagtaattttgggattataggtatgttttattaggttgagttaatttttttttttttttttttggtagagatggggttttattatgatgtttaggatggtttttagtttttggttttaagggatttttttattttgattttttaaagtgttgggattataggtatgagtttttttgttttttttttgttgttttttttttatttttgttgatttatttttattttttaaatgtaaaattgatttaaggtgtatttagagatgtgtatagatttttgtgatggagggaatcgtatagttatggtgaggagtttattataatttttaaacgtttttttaagaagtaggtattaatattttgttttatttttttggaggtagttttgggttgagtattggatttttgggttttattaattttagtgtttttaggagattaagcgcggtcgggggtgagtttttgttttcgcgttttttattacgttttaatatttattttttgttttattttttagtttttcgggttttggtttgtatttgtgaatcgaaggggttatattaggcgttatattagggtttttggatagtttttaggtttggatttcgttttttaggatattatttttattggttaatttattttgtttcgcgagtgtttagtgagtgtttggtacgtaatagagtttttataaatagttgtagaaattagcgttattttatagtatggaaattgaggttttaagtgggagtggtttgtttttaaggttttattggtgagagacgttgtggaagggttgttttggtttgggtatatagtaggcgttttgatgcgggttggagaaggttttgttcggtgggattgcgttttggggtatcgcgtacgggtcggggaagttcggggtagggtcgtatgtaaatagcgcgcgaggaggtcgcggattggttagtttaggcgggggcggggcgcgtcgagggtttagagttggtaggtgttttggtagggataggtttggtgttcgcgtttgttcgttggatcgttcgtttcgcgttttggcggtttttttcgggcgatgttttcgttttgggttttgttggttttcggttgtttgcggttcggttcgggtaggcggtgaagggtaggagggggttgagtttagaaagagcgggtagttttgttttggggcgttcgtcgtttggattttgatttttggcgttggggatttagatattattgttatgaataatagtgatagttaacgtttacgggttttttttgttgggaattcgagggtttatagatggttgtagttttgcgatgtgtgttgtaagagattaatatgtaggggggttgcggtaggatagagaagggattagttttagttttatggtgacgtttggacgggggtagatagagagatatttcggtcgaggaagtagtatgggtaagtttatggaggggagataatattgggttgttttgggaattgttagtttatgggattagttggagtttggggtgaggggagtttgtgggggaaggggtgaggttggagatcgaataaagtaaagtttagaattttaggattttattgtttttttagagaggttggatttcgttagggggcgttgggggattatgggagggttatagttagagaatgaggtagttagatttgtatgtggggggagggtttaggtgaggaaggtgggacggaggagggttgggtcgatggtatggagagatgtttaggaggggtagtggagtttttggtaattgagtgtttgtagtagggagagaaggtagtagtttggttcgatcgttttatttttgagtaggatgattgggtagggggtagtgtttgagatagtttatgcggtggtttagggggagggtgaagtttagggtttggtatataatacgtgtttagtaattgtaagtagagtgggtgtggatagttttgtcggaggttagtttttatttttattgttttttttagttgtgaatttgtagttttaattggttagtgtgattttcgttattaataattttatatttattattgtggttttggaaaagtttttttgtatgtttgatagtaaagaggtttttattggtatttacgaggtttatttgtatgttttggtcgatttaggtaagggttttgtttttttttggttattttaaaaggggttttgatttgtttgtagggaggagggaaggaggtagatagaggaattttttatgtttgtagtcgttttattaaataggtattgtagttatagatttgtttttgttttgtagggatatttagttagtgagggaagtaataatattattagttattgaatatttatattatattaggtattttgtatattatagagttagtatttataattagtttgtaaggtagttattattaatttttattatagagtagggaagtaaggtttagagaggtggaata

SEQ ID NO: 1823 - DNA, 2496 bp, Artificial Sequence
  chemically treated genomic DNA (Homo sapiens)
tattttatttttttgagttttgtttttttgttttgtaatggggattggtaatagttattttataagttggttgtagatattagttttatggtgtgtaaagtgtttggtatggtgtaggtgtttagtgattggtggtgttattattttttttattaattggatgtttttgtaaggtaaggataggtttgtggttgtagtatttgtttaatgagacgattataggtatggagggtttttttatttgttttttttttttttttttgtagataggttagagttttttttggagtagttagagggaagtaggatttttatttgagtcgattaggatatataggtagatttcgtgggtgttagtgagggtttttttgttgttaaatatgtagagaggtttttttaaggttatagtggtaagtgtggggttgttggtggcgaaagttatattggttagttggggttgtaggtttatagttggaggaggtagtgaggatgggaattgattttcggtagaattgtttatatttattttgtttgtagttattgagtacgtgttgtgtgttaggttttgggttttattttttttttgggttatcgtataagttgttttagatattgttttttgtttagttattttgtttagaaatggagcggtcgggttaaattgttgttttttttttttgttgtagatatttagttgttaagaattttattgttttttttaagtatttttttatgttatcggtttagttttttttcgttttattttttttatttgggttttttttttatatgtaagtttgattgttttattttttggttatggtttttttatggttttttagcgttttttgacgaagtttagtttttttggaaaggtagtgaggttttgaagttttgggttttgttttgttcggtttttagttttatttttttttttataggttttttttattttaggttttagttggttttatggattggtagtttttaggatagtttaatattgttttttttttatgaatttgtttatgttgttttttcggtcgaaatatttttttatttgttttcgtttaggcgttattatggggttggggttagttttttttttgttttatcgtagtttttttgtatgttggttttttgtaatatatatcgtagggttgtagttatttgtgagttttcggatttttaatagaggaggttcgtaaacgttggttattattattatttataatagtaatatttgggtttttagcgttaggaattagggtttaggcggcgggcgttttagggtagagttgttcgttttttttgggtttagtttttttttgttttttatcgtttattcgagtcgaatcgtaggtagtcgagggttagtagggtttagagcggaggtatcgttcgggaggagtcgttagagcgcggggcgggcggtttagcgagtaggcgcgggtattagatttgtttttgttagggtatttgttagttttgggttttcggcgcgtttcgttttcgtttgggttggttaattcgcggttttttcgcgcgttatttgtatacggttttgtttcgggttttttcgattcgtgcgcggtgttttagggcgtaattttatcgggtaggattttttttagttcgtattaaagcgtttattgtgtgtttaggttagggtagtttttttatagcgttttttattaatgggattttgagggtaagttatttttatttggagttttagtttttatattgtaaaatgacgttaatttttataattatttatggaggttttattacgtgttaaatatttattgggtattcgcgaaataaaatgggttgattagtaaaggtgatattttggaaaacgaagtttaggtttgggagttatttagagattttagtatgacgtttagtatgattttttcggtttataggtataagttaaggttcgggaggttggggggtggggtagggggtaagtattggagcgtggtggggggcgcggggatagggatttattttcggtcgcgtttggttttttggagatattgaggttggtggaatttaggagtttagtgtttagtttagggttgtttttaaagggatggagtagggtgttaatgtttattttttaaaggggcgtttgaaaattatgatggattttttattatgattgtgcggttttttttattataagaatttgtgtatatttttggatgtattttaaattaattttatatttaagaaataaaagtaagttaataaggataggaaaaaaataatagaagaggggtaaggaggtttatgtttgtaattttaatattttgggaggttaagataggaggattttttgaggttaggagttagagattattttgggtattatagtgagattttatttttattaaaaaaaaaaaaaaaaaaattagtttagtttagtggggtatgtttgtagttttaggattgtttgagtttaggaggtcgaggttatagtgaatt

SEQ ID NO: 1824 - DNA, 2499 bp, Artificial Sequence
  chemically treated genomic DNA (Homo sapiens)
attgtatttagttttttttttaatttttttttttttttttttttttttttttgggatagtagggttttgttttattattaaggttggaatgtagtggtgcgattttcgtttattgtagttttggttttttaggtttaaatgatttatttattttatttttttgagtagttgggaatataagtgtgtaatatttatatttggttattttttgtattttttttgtagagatagagttttattatgttggttaggttggtttggaattttttattttaggtgatttgtttatttcggttttttaaagggttgggattataggtatgatttattatatttggtttttttttttttttaaaattgcggtaattattttttttttgttgaatttattaatgagaaaaagttaatggggttaggtatggtggtttatatttgtaattttagtattttgagaggttgaggtaggtaaattgttcgagtttaggagttttagattagtttggataatgtggtaaaattttatttttataaaaaattttaaaaattagttaggtttggtggtgtacgtttgtagttttaattatttaggtagttaaggttgtagtgaattatgatcgtattattgtattttagtttaggtggtagagtgagatgttgttttaatttaaaaaaaaaaaaaaaaaaaaaaaggttgggtatagtggtttatatttgtaattttaatattttgggaggtcgaggttagtggattataaggttaggagatcgagattattttggttaatacggtgaaattttgtttttattaaaaaaaaaatatagaaaattagtcgggtatggtggtaggtgtttgtagttttagttattcgggaggttgaggtaggagaatggtgtgaattcgggaggcggagtttgtagtgagtcgaggtcgtgttattgtattttagtttggtttatagagtaagattttattttagaaaaaaaaaaaaaaatgtaattaattgtaaggtttggggtgatagttttttggttattttttttagtttttttgtgtttttatagttagagatgattaaagtttatttttaagaaaatagtaagttacgtataattgaagtttatgggggtaggatgttgttttttttatcggggtaatttaagtatttgagtgtttgatattatttattatttaggggattcgagttgaattttaaagattggaattaaagatgatagagtgcgtggttggagagagggggaagtttatagagtttaggtaaatttttgaattatatttttattacgtttataatgtattgtattgaagtatatcggaagttaaagattaaaaaggaattagatttttagttttgttatttaaagtagaaattgagggttttatttatcgtatagattttagtttaagtgttatgtttttagttttatagttttattagtagtttaagtaaaatggtttggatattaaagatggtttttgggttagagtattatttattttttttgtttataaattattttgattttttttgattttttttgttttttatttttttatttagtttttttttttttttttttttttttgagatagagttttgttttgttatttaggttggagtgttggagtgtagtggtgtgattttagtttattgtaatttcggttttttgagcgtaggtaatttttttattttagtttttagagtagttgggattataggtatatattattacgtttagttaatttttgtattttttgtagagatggggtttagttatgttgtttagtttgtttttaaattattgggtttaagtaatttgtttattttaattttttaaagtgttggtattataggtatgagttattgcgttcggtttatttggttttattaaatattttattttttgtaaatgtagacgtttttttagttttgattattttttttaaagtaatgattttttatttggttagatgaatgtttttagtaaaggaaaagattagaatgtgaaaattgtattgtaatagaatataaagttcgtttaattttattttttattagatttggggtggtggtagtagtaggcgttagggtttttaggtttgtttattagttatttttaaggttcgttagtatacgggttaggaggagtatatattttggaattagaaagtttaggattgaatttagttttgtttttagttaaggttttgttatttattattatttttttgatttaggattttataaaattttgttattcgtaaaattggggatgataagttttattttgaatgttgttgtgaggaataaatgaggtaatgtttatgtagtatttagtatagatttttgtagataaatatttaataaatgttaattattatttattatttagttattagaaaagtataatgatttggtatttttaagttttttcgtttttaaaaaaaaaaaagaaaagaaaaaagaaaaagatgtgtgg

SEQ ID NO: 1825 - DNA, 2499 bp, Artificial Sequence
  chemically treated genomic DNA (Homo sapiens)
ttatatattttttttttttttttttttttttttttttttggaagcggaaggatttaaagatattagattattgtgtttttttgatgattaggtagtggatgatagttaatatttattgagtgtttatttgtaggaatttgtgttaggtgttgtatagatattattttatttattttttataataatatttaaggtagaatttattatttttagttttacggatgataaggttttgtgaggttttaggttaagggagtgatagtgagtgataaagttttgattgaaagtagggttgggtttaattttgggttttttgattttagagtgtgtgttttttttaattcgtgtgttaacgggttttagggatgattaatgggtaggtttgagagttttgacgtttgttgttgttattattttaggtttgatgggaggtggggttggacgggttttatgttttattgtagtataatttttatattttggtttttttttttgttagaagtatttatttagttaggtggggggttattattttagaaaaaataattagagttgagaaaacgtttgtatttgtagagaatgaagtatttaataagattagatgggtcgggcgtagtggtttatgtttgtaatattaatattttgggaggttgaggtgggtagattgtttgagtttagtagtttgagagtagattgggtaatatagttaaattttatttttataaaaagtataaaaattagttgggcgtggtggtgtgtatttgtggttttagttattttggaggttgaggtgggaggattgtttgcgtttaggaggtcgaggttgtagtgagttgagattatattattgtattttagtattttagtttgggtgatagagtaagattttgttttaaaaaaaaaaaaaaaaaaaaaaagattagatggggagatgagggatagagagaattaaagagaattaaagtggtttgtggatagaggaaatgagtgatattttgatttagaggttatttttagtgtttaggttattttgtttgagttgttggtgaaattgtgaaattggaggtatggtatttgggttaaagtttgtgcggtgaataaggtttttagtttttgttttaggtggtagagttgaaaatttgatttttttttggtttttagttttcggtgtattttaatgtagtatattgtgggcgtggtggggatgtggtttagaaatttatttaaattttgtggatttttttttttttttagttacgtattttgttatttttggttttagtttttagaatttagttcggattttttgggtgatgggtggtgttagatatttaggtgtttggattgtttcggtggagagaatagtattttgtttttatgggttttagttgtacgtgatttgttgtttttttggaggtgggttttagttatttttagttataaagatataaaaaaattgggaagaatgattaggaaattgttattttaagttttgtagttgattgtatttttttttttttttttgagatggagttttgttttgtgggttaggttggagtgtagtggtacgatttcggtttattgtaagtttcgtttttcgggtttatattatttttttgttttagtttttcgagtagttgggattataggtatttgttattatgttcggttaattttttgtattttttttttagtagagataaggttttatcgtgttagttaggatggtttcgattttttgattttgtgatttattggtttcggttttttaaagtgttgggattataggtgtgagttattgtgtttagtttttttttttttttttttttttttaaattgagatagtattttattttgttatttaggttggagtgtagtggtgcgattatggtttattgtaattttgattgtttgagtagttgagattataggcgtgtattattaagtttggttaatttttaaaattttttgtagagatggggttttgttatattgtttaggttggtttagagtttttgggttcgaataatttgtttgttttagttttttaaagtgttgggattataggtgtgagttattatgtttggttttattgatttttttttattggtgagtttaatagaggagagatgattgtcgtagttttaaaaaagaaaagaggttaggtgtggtgggttatgtttgtaattttagttttttgagaggtcgaggtgggtagattatttgaggtgaggagttttagattagtttggttaatatggtgaaattttgtttttataaaaaaaatataaaaaatagttaggtgtgggtgttgtatatttgtatttttagttatttaggaggatgaggtaggtggattatttgagtttgggaggttaaggttgtagtgagcggagatcgtattattgtattttagttttggtgatagagtaagattttattgttttaaaaaaaaaaaaaaaaaaaaaaaaaaaaattaaagaaaaggttgggtgtaat

SEQ ID NO: 1826 - DNA, 2499 bp, Artificial Sequence
  chemically treated genomic DNA (Homo sapiens)
ttatatggatataggaaggggaatattatattttggggattgtggtggggtcgggggaggggggagggatagtattgggagatatatttaatgttagatgatatattagtgggtgtagcgtattagtatggtatatgtatatatatgtaattaatttgtataatgtgtatatgtattttaaaatttagagtataataaaaaaaaaaaaaaaaaagaaaattggatatttgaatataataatgtagtaattttggagatgagattttttttttttttagggtttgttgttttggggttttgttatgttttatattgttgtaggttgtttttatgttgaggattaatttgagttgtaagtttgaggtttttttaggtttgaagttgtttttttttttgggtatatatttttttttttaaggatgtgtggtaattttaattttttttgtgtatgttattgtttttgagtgttttagtttttaatgtttggtttttaaaaaaggaaaagagaataacgaaggggaagggaaatggggttttggttttttttattttttagaagttgttttagtttggtaagggtttgtagtagtggagtggggagttgtgagtaataatggttgtcggtttttgtgtttgtttttttataattaaaagtagtaattaataattagaacgtagatgttaatatttggaggatagagtgtttatcgtttatgattgtttttataagttttagtttaagaagttagaagtggtgtttaagtttgtttgtttgatagaaattgtgaatttatattggtttgtttattttgaggttgtgttgttagagtttttttagtataataaagagaggtgtatataaaggaataggaatagtaggaggtgggggtaaaaatattaggtgtgatttatatgttaagtcgattcgtattgtgttttataggaagtttagaagatgtttttgtaagaaattaaggattcgtttgttggggagggttgttggtatgtttgaaaagtattgtgacggttgaattttgtgggtttggggagattgtagattttttgattttaaggggaatgatgtgattttagagttgtaaagaataagtgatagtggaggcgtttatgttttgtgattgtattagagataaggaagatataattagaataatggggagtaggaatggagcggttaatagaatatgtgattgttagggatttttgatgaaggttgatttttagggagtgaattagattagtgattaattatttgtttttatataattgggtaatgtggatggattttaataaagggattatttatagtatagtaggaaagttataaagaaattagatagaagagtgtaagtagtaaggggttaagtagttatttgattagagatagtgttagtttgttaagaaggtattagatagaagttgtgatttttagtaaagggatatagtttgtttgtgttgattttgtaggggtagaggtgggggatatatatattttttttttatttattttttgttattttttttattagttgaattttaataaaagtatgagggtaagggagatttttgaagtatttaatttaggtgagttttttaaggaataaagtagaatgtagaaaaattaagagtgggtttagggaataaaatagagatatgtattagagtatgatgatgtgtttgggaaagaatatataaatatttttaaaattattagataataaatttgagatgatattaatataggtaaattttatttaatggtaatatattttaagaaatgtattattaggtgattttgtggttgtgtagatattaaagagtgtattttatataaatttagatagcgtagtttattatatatttaggttatatcgtatagtttattgtttttgggttatatatttgtgtagtatgttattgtgttgaatatagtaggttaatggtttttaatatttaagttatggattagtatcggttcgtgttttgttaggaattgggtataaagtaggagatgagtggttggttagtcgagtattattgtttgagtttcgttttttgttagattagtagtagtattagatttttataggagtataaattttattgtgaattgtttatataagggatttaggttatgttttttttatgagaatttaattaggttgggtgttgtggtttacgtttgtaattttaatattttgggaggtcgaggtaggtggattataaggttaagataattttggttaatatggaaatttcgtttttattaaaaatataaaaattagttgggtgtggtggcgtatgtttgtagttttagttattcgggggattgagataggagaattatttgaattcgggaggtagaggttgtagtgagtcgagattgtgttattgtattttagtttggtaatagtgggagatttagtttaaaaaagaaaaaaaaaagaaaaaaaagaatttaattaatgtttgatgatttga

SEQ ID NO: 1827 - DNA, 2499 bp, Artificial Sequence
  chemically treated genomic DNA (Homo sapiens)
ttagattattaggtattagttagatttttttttttttttttttttttttttttagattgagttttttattgttgttaggttggagtgtagtggtataatttcggtttattgtaatttttgtttttcgggtttaagtgatttttttgttttagtttttcgagtagttgggattataggtatgcgttattatatttagttaatttttgtatttttagtagagacggggtttttatgttggttaggattgttttgattttgtgatttatttgtttcgattttttagagtgttgggattataggcgtgagttatagtatttagtttagttagatttttataaggagaatataatttagattttttgtatgggtagtttataatagggtttgtgtttttgtgaaggtttaatgttgttgttgatttgataggaggcggagtttaggtagtaatgttcggttggttagttatttattttttgttttgtgtttagtttttaataggatacgaatcggtgttggtttatggtttgggtgttggggattattggtttattgtatttagtatagtgatatgttgtataggtgtgtagtttaggagtaataggttgtacgatatagtttaggtatgtagtaggttacgttgtttaggtttgtataaagtatattttttggtgtttgtatagttataaaattatttaatgatgtattttttggaatatattattattaaatgagatttatttgtattagtgttattttaggtttattgtttagtaattttaaaagtatttgtatatttttttttagatatattattatattttggtgtatatttttattttattttttagatttatttttaatttttttgtattttgttttgttttttaggaggtttatttgaattggatattttagagattttttttatttttatgtttttattggggtttagttaatggagggggtggtagaagataggtgagagaagagtgtgtgtattttttatttttgtttttgtagggttagtataggtagattgtgtttttttgttgaagattatagtttttgtttggtgtttttttggtaagttggtattgtttttagttaggtgattgtttggttttttattatttatatttttttgtttggtttttttgtgatttttttgttgtgttgtaagtagtttttttattagaatttatttatattatttagttatataaagataaatagttggttattgatttagtttattttttgagaattagtttttattaaagatttttaatagttatatattttgttggtcgttttatttttgttttttattattttagttgtgttttttttgtttttagtgtagttataaagtataagcgtttttattgttatttgttttttgtaattttaggattatattattttttttgaaattagagaatttgtaatttttttaagtttataaaatttagtcgttatagtattttttaagtatgttagtagttttttttaataaacgaatttttaattttttatagaaatattttttgggttttttgtgggatatagtgcgggtcggtttggtatgtggattatatttgatatttttatttttattttttattatttttatttttttgtatgtatttttttttattatgttaggaaagttttggtaatataattttaaaataagtaggttagtgtggatttatagtttttgttagataaataaatttgagtattatttttaattttttgggttaagatttgtgggaataattatgggcgataagtattttgttttttaagtgttagtatttgcgttttggttgttgattgttatttttgattatggaagggtaaatatagaggtcggtagttattattgtttataattttttattttattgttgtaagtttttattagattgaagtaatttttaggagatagaaaaggttagaattttattttttttttttttcgttgtttttttttttttttttgggagttaaatattaaagattaggatatttaaaagtaatggtatatatagaggaaattaaagttattatatatttttggagagaggagtgtgtgtttagggaaaggagtagttttagatttgagaagattttaagtttataatttaggttgatttttagtatggagataatttataataatgtaaaatataataaaattttaaaatagtaaattttgaggaagaggagagttttatttttagagttattgtattattatatttaagtgtttagtttttttttttttttttttttttattatattttaagttttagggtatatgtgtatattgtgtaggttagttatatatgtatatatgtgttatgttggtgcgttgtatttattaatgtgttatttagtattaggtatattttttaatgttattttttttttttttttcgattttattatagtttttagagtgtgatatttttttttttgtgtttatgtga

SEQ ID NO: 1828 - DNA, 2279 bp, Artificial Sequence
  chemically treated genomic DNA (Homo sapiens)
taattttagtattttgggaggtcgaggtaggagggttgtttgaggttagagtttaagattagtttggataatatagtaagatttttttttaaaaaatgtttttaaaaattagttgggtaggttaggtacggtggtttacgtttgtaattttagtattttgggaggttaaggtgggtggattataaggttaggagatggagattattttggttaatatggtgaaatttcgtttttattaaaaatataaaaaaaaattagttaggcgtggtggcgtacgtttgtagttttagttatttcggaggttgaggtaggagaatggcgtgaattcggaaggtggagtttatagtgagtcgaaatcgcgttattgtattttagtttggacgatagagtaagattttgttttaaaaaaaaaaaaaaaaaaattagttgggtatagtggtatgtatttgtagttttagttatttagaaggattttttgagtttaggagtttatagttgtagtgagttgtgattattttattgtattttagtttgggtgatagaaagattatgtcgttgaaaataaaattacgggtggggggtggtgttttgtgtatttaggggagtttaggtgtgaaaaattgcgttttgaaaaagtaggtttttgtgtgttggttagaatggggggatgaggaaattgaggggtagttttttttatattattatttgttttggagtagattggaagagttagtagaatgaggggtaataagtatggattggagtgatttgggtgagttgaggtaggggttgaagtttttatatggaacgtggtagggatgagtaggttatttggaatttagatttaaaagtattagttatttagatattgatttgagatttttgtagagggggaaacggttggggttttagttatttggagtgttttaattttttagtagagtttggtcgtgagatttagtttttttgttttatttggcggggtgatgtgtttattttaaagttttattggatataggtaggtaaatttttatcgggtatttgatttttgtattaggttttagcgtggacgttgttaagttagtatgtggtttcgtatatgtggagttttatagttattttgaagtaagttttgggatttcgaatttgatttcgaagtttttgttgggttgattttttattcggtgttgatttgattttatacgggagttagtgtagttatgggttcggaaagtatttagataaaaggtgttttatttagtgatgaagaatgtgttgatgttttaagatcgtttttagataaatagtaaaatcgttggttaaaagttggtttaatttattttattttgttgttgtttgttttgttttagacgtttcgtagtttgaagttgtggttttagtttttttttttagtgataagtggaaaagagggatgaggaaggggttttgttggttcgattaaaaataaaattaagaatttatgagtgtatttttttttttgggtatttggatatttttgttagaatatttagtagacgttgataattttaagttaatgtaaaagttaagtttggagggttatggggtgggagattagggtgaggaagttgttaaaggaggttaaggggatggtacggtttttatttaatagtgatagtagtattttagagttagagggtttttatttattgtttagtttatatgtatgattttaaaaaaggaagttgaggtaggaggattgtttgagtttaggagttggagattagtttaggtattttagcgagttaacgtttttgttaaaattaataaatgaagttaagaaaggtgaggtatgggcggttttagtgatttggattaatttatagagaggtagtaatggggagggttagagtttcgtttttgagggattatattatagtttattttttttatttaaaggttaaaggaattgagcgttaataattaatatagcgattttggtatttggagttttttcgatgttttatggattaaggagattagatttttttatatagtttgttgagggatttggtgggtgttttttgtttttggggtttttttattttggttgttatgtttaatttagatttagtttttttttggaattttttttttaatacgtatagagatagaattcggttcggattttgtagttagtagttgtgtgtaattatttgggatagtgttgtaggttagtagtcggtaatgttagatatcgggttggggtcgtttagtaggtttaagttttggttgttagt

SEQ ID NO: 1829 - DNA, 2279 bp, Artificial Sequence
  chemically treated genomic DNA (Homo sapiens)
gttggtagttagggtttagatttgttgagcgattttaattcggtgtttagtattgtcggttgttgatttgtagtattgttttaggtgattgtatataattattggttgtaaagttcgggtcgggttttgtttttgtgcgtgttgaaaggagaattttaggaagaggttgggtttgggttgagtatagtagttaaagtaggaagattttaagagtaaggggtatttattaagttttttaataagttgtatggaggaatttggtttttttaatttatgggatatcgagggggttttaggtattaagatcgttatgttggttattaacgtttagtttttttggtttttgggtgggggaagtgagttgtggtgtaattttttagaagcgaggttttggttttttttattgttatttttttgtgagttagtttaggttattgaggtcgtttatgttttattttttttgattttatttattaattttaatagagacgttgattcgttaaggtgtttaggttagtttttaatttttgggtttaagtaatttttttgttttagtttttttttttaaaattatgtatgtgaattagataatggataaagattttttagttttaaaatgttattgttattattagatgaaggtcgtgttatttttttggttttttttaataatttttttattttagttttttattttatgattttttagatttggtttttatattagtttggaattgttagcgtttattaaatgttttagtagaggtgtttaagtgtttaagggagagaatatatttatgggtttttagttttgtttttggtcgggttagtaaagttttttttttattttttttttttatttattattagagaaagagattaaaattatagttttaggttgcgaaacgtttaaaataaaataaataataataaaataaggtgggttagattagtttttaattaacggttttgttgtttatttgaagacgattttaagatattaatatattttttattattgggtggagtattttttatttgagtgtttttcgagtttatgattatattgattttcgtgtaaggttaagttaatatcgagtagggagttagtttagtaagaatttcggggttagattcggggttttagggtttgttttagagtaattgtaagattttatatgtgcgaagttatatgttggtttagtaacgtttacgttaaaatttggtgtaagaattaagtgttcggtgagggtttgtttgtttgtgtttagtgagattttgaagtggatatattatttcgttaggtgagatagagagattaggttttacggttagattttgttggggaattaggatattttaagtggttgaaattttagtcgtttttttttttgtagagattttaaattaatgtttgggtgattgatgtttttaagtttggattttagatggtttgtttatttttgttacgttttatatgagggttttagtttttgttttagtttatttagattattttaatttatatttgttgttttttattttgttgatttttttagtttgttttaaggtaaatgatggtgtggggaggattgttttttaatttttttatttttttattttaattagtatataggaatttgtttttttaaaacgtagttttttatatttgagtttttttaagtatataaagtattattttttattcgtgattttatttttagcgatatgatttttttgttatttaggttgaagtgtagtggagtgattatagtttattgtagttgtgaatttttgggtttaagggatttttttaagtagttgggattataggtgtatgttattatgtttagttaatttttttttttttttttttgagatagagttttgttttgtcgtttaggttggagtgtagtggcgcgatttcggtttattgtaagttttatttttcgggtttacgttatttttttgttttagttttcggagtagttgggattataggcgtgcgttattacgtttggttaatttttttttgtatttttagtagagacggagttttattatgttagttaggatggtttttattttttgattttgtgatttatttattttggttttttaaagtgttgggattataggcgtgagttatcgtgtttggtttgtttagttaatttttaaaaatattttttgagaaaaagttttgttatgttgtttaggttgattttaaattttggttttaagtaatttttttgtttcggttttttaaagtgttgggatta

SEQ ID NO: 1830 - DNA, 2443 bp, Artificial Sequence
  chemically treated genomic DNA (Homo sapiens)
cgaatttttgaatttaaggaatttatttgttttagttttttaaagtgttgggattataggcgtgagttattatgttttgttatttttagttttttgatttgaaatgttttttcgtaaataagtattaattattttatcgtaggtttgaggagaaaaaggtgaatgagtttttttttagttttgaagttaattagtttaatgaattggtaatgataatatatttttatttttttgggttatttttattagttttatatattgttgagagagtcgaaagtgttgagttaagttagggaaggtaagagtaggtaggtgattgttaagatatttttgttttatttgtttgatatttgatattttgtagggacgaaaggttatatttatggatggtgaaggtagtggaaattgtattgatttgggagttagaaattttaagtttaagttttagttttgttattaatatgttgtgattttaagaaagttatttttttttttgggttttagtttttttatttatgtaagtaagggttgagttggttaatttattaagattttttataggttaggtatggtggtttatgtttgtaaatttagtatttcgggaggttgaggtaggtggatcgtttgaggttaggagtttaagattagtttggttaatatggtgaaattttatttttattaaaaatatgaaaaattagttaggtgtggtgatgggtgtaatttttgttttttagttatttaggaggttgagataggagaattatttgaattcgggaggtagatgttgtagtgagttgagattgcgttattgtattttagtttgggtgatagagcgagatttcgttttaaaaaaaaaagattttttatagtgtagtttatggtttttttaatttatttatgttatgtagttaatagttattttagtaaggtagtttgtgatttgtttttttatttttaggtttggtaatttttatatttaaaatgttttaagataatttttggtttagggtagttgaaatggatttttaatttggagttagagtttttattatttttatagtatttatgagggttaacgttttatttttttagtatagaatatggatttttagtttttaattacgagattgggtttagggcggttattttgaagttttttataattttttttttatggttttgggtagggatttatttttggtttttttgaaattataatataaattaagtagggaatatcgaagtttttagatattagagattttaggttgattgataggttttagaaagtgagggaaggagagaggattggagttgggattttattttagttttagttttatagatagtagttatgtagagggtgtttgtagagttatatttcgggtttgtggttgtggggtaagaaagatagatgtttggttgtttggttggggattatagttaaagggaggtgtttttattggggttttattttgtttataaatattagagatatgtttttatttttttttttattttttagatttttagaaggaaagaaagaaaattaatattttttgggtcgttatttgtgataagcgttgtgttaggtatttttacgtattatatatttatttaatttttagagtaatgttgggaagtgggtgttattgtcgttttttatagtgagtaaataggtttagagatttaggattttgtttaaggttataaagttagtaagtgtaatttttaagtttggtttttttttaatatattatattgttttgtattttaagatttggttgattgtttgataagtatgtagtaggaatttttatgttttagtatttttttataaatttgagtttttttttttaaggttttataaatgtaattgggaattttttttttagattttaagattatatatttttttgggttttaattttaggtgattgttttttaatttaaaatattttaggtttttattaagtttttataagtgaatttttggggaattgtgataaagtattagttagggtgagggtttagaatgaggggtgttttttttgagttttggattaaatttagtttgttgtgagttagtagggagatattggaggagatagatttagtgggtgagagggaattttttttaggggaggggtttggatttttttaaggaagaaggaggtttggtgaataagaggttttagggttggggaaaatttcggaagtgataggggtttttagatagttaaagcgtttttataagttatgagagagtttggggtgattttggataattttaattggttagagaaagggagaaaggatattttttggagtagggttatggtagggttttaggagtttttattggtgattgggatggaaagtatatattaggagggagttttgttagttttgtgtataatattggttttacgtgataggatag

SEQ ID NO: 1831 - DNA, 2443 bp, Artificial Sequence
  chemically treated genomic DNA (Homo sapiens)
ttgttttgttacgtgagattagtgttgtgtatagaattgataagatttttttttgatgtgtgttttttattttaattattagtaggagtttttggggttttgttatgattttattttagagaatattttttttttttttttttgattaattgagattgtttaaggttattttagatttttttatgatttatggaagcgttttaattgtttaagaatttttgttattttcgggattttttttagttttaaagttttttatttattaggttttttttttttttggagaaatttaggttttttttttaaggggagtttttttttatttattggatttgttttttttagtatttttttattggtttatagtaggttaggtttagtttaggatttagagagagtattttttattttgaatttttattttgattgatgttttgttatagttttttagggatttatttgtgagaatttagtggggatttggagtgttttgaattgaggagtagttatttgggattaggatttagggaggtgtgtggttttgagatttaggaaaggagtttttagttgtatttatgggattttggaaggaagagtttagatttgtgggagaatgttagggtatgagagtttttattatatgtttattaggtaattaattagattttggggtgtagagtaatgtgatatattaggaaaaggttaaatttaggaattatatttgttagttttgtgattttgggtaagattttgaatttttgagtttgtttatttattgtaaagggcgatagtaatatttattttttaatattattttgggggttaaatgagtatatgatacgtgaaggtgtttggtatagcgtttgttataagtagcggtttagaaaatgttagttttttttttttttttttaagggtttgagaaatgaagagaaaaatgagggtatatttttggtatttgtgggtagagtgaggttttagtggaagtatttttttttggttgtagtttttaattaggtagttagatatttgttttttttattttataattataaattcgggatgtggttttgtagatattttttatatggttgttgtttgtagggttggggttgaggtgggattttagttttagtttttttttttttttttattttttggagtttgttagttaatttaaaatttttggtatttgaaagtttcgatgttttttatttaatttatattgtggttttaaaaaagttaagagtaagtttttgtttaaggttatagaggggaagttatggaaagttttagggtgatcgttttgaatttagtttcgtggttgaaggttaggagtttatgttttatgttagagaagtgaaacgttagtttttatgggtattgtggagatggtggggattttgattttagattaaaggtttattttagttattttgggttaaaggttgttttaagatattttggatgtggaagttgttaggtttgggggtaagaaagtaggttataggttattttattgaggtgattattagttatatggtatgagtagattaaaaaaattatagattgtattgtaagggattttttttttttgagacggagtttcgttttgttatttaggttggagtgtagtggcgtagttttaatttattgtaatatttgtttttcgggtttaagtgatttttttgttttagttttttgagtagttgggaggtagagattgtatttattattatatttggttaattttttatatttttagtagagatggagttttattatgttggttaggttggttttgaatttttgattttaggcgatttatttgttttagtttttcgaagtgttgggtttataggtatgagttattatgtttggtttgtaagggattttaatagattgattagtttagtttttatttatatagatgaggaaattgaggtttagagagaagagtaatttttttaagattatagtatattagtggtagaattaggatttggatttagggtttttgatttttaggttagtatagtttttattgtttttattatttataaatatggtttttcgtttttgtaggatattaggtgttagataggtagaatagaagtgttttagtagttatttgtttgtttttattttttttgatttagtttagtattttcgatttttttagtagtatatgaggttaatagaagtggtttagaaggataagaatatgttgttattattagtttattagattgattagttttaggattgggaagaggtttatttatttttttttttttaggtttgcggtggagtaattaatatttatttgcggggagatattttaagttaggaagttgaaagtggtagggtatggtggtttacgtttataattttagtattttgggaggttgaggtaggtggattttttgagtttaggaattcg

SEQ ID NO: 1832 - DNA, 2480 bp, Artificial Sequence
  chemically treated genomic DNA (Homo sapiens)
aggtgtgtagagttttgatttttggtttcggaaaaaaggttagtatagttcggaatgggattattttagaattatatttttttttttttttgtattatttattattaggggttttttaggtttatcgagaaatttggttttgtagatttttgtgttacggttttattatttttgttggatagtttaggtttaggggttgttataagatttagtttagtttttggggttatattggtggtgtcgtgtttggtgcggaaaattttaaggttagggtttataatttttgttttttatgttttattaggttttttttataggttttgtttttttttttattttatggggttggggattttttttggttaaagtttagtagattggatagattttttagaaagtaatggtaggagacgtacgggacgtttgatttatttgtttttttttatttacgtgtgtagtttttttggttttgggtaaggttaaagtcgggtttgtagtcgtaggttattttatttttgggcgtttttcggtagatgtgggtatagttatggtttttgtttatgtagtttatattttttgggaagagagatagataagagacgggttgaagattaggtagagagggagagagaaaattttaggttgaaaggggatagttaatgatatgtaataattaaatgggttgttattgtatgtattatgtatatatacgtatttgcgtatatatatatatgcgtgtgtgtagtagttatttatatggatattttttagggagaaagtaagggtacggtgtttgggtttagatttaggttttgttttgtgagttgtattgtaaatggtatttcgtgatttacggagattaagtttttgttttaggttagattgtggggtatggtttgtagaattatttttgtgttagggtgatttgtttttttttttcgagttatttatggttttagggtattttttattcgtttagtagattggattttttttttttgtttgtttggagtggtttatattttttttcgttgattttagttgatgtttatttttttggtgatttgtgaggcgtttttagaatttatgaggttaggggttaagtgagaggttgtaggttataagtttattaagaggttaaggtagatgaaagggaagcgtttttgtttgttaatttattagttttgtgatttgttttttatttttatttataggaagtttaggtaggagtgaagtcggttcggggagcggtagtgaaggttgtagacggcgaatacgtatagggtaatttttttttttcgggatatatcggttttttgttttaagggaggattggtttaattttgatttcgtttattttaaatacgggtatgtagtaatatagaatagatttaagaatataaatattttgttagttgtaataaagataaaaacgtttaaagttaaaaattaaataaataaatggaaatgaggaagtttgtattttgttcggtattgtaatttttggttttatttgattttgcgatttatatttttttattttgatttttttattaattaattaaattgttggaatgacgtagagtttaattaagtaacgagttagtacggaaagcgtttttatgttgttgttttgtatagaagttgtaagtttatacggaaagatttttttcgttggttcgattttaaaatagtattagcgtttgagttatatagatagtggcgtgcggttaacgtttaatagtcggtaggggtggaggttgatttgtagtatttattaatttacgtgggataaatacgttagttacggttaattttaaggtattagggagatgtcgttaagggtagagttgggaataaatgtgtatagttggtttttataagttgagataagttagttatagtacgttttttttttagaaaggtcgttgtaaagttaggtagatgtaggtgtgaatttggttttttttttggttgtggtttgggagataattgttttttttttttgagtttaattttagaaggggtaggattatttttgttttatagaggagttgtgtaaattaaatttagttatagataggaaatgttaggtaataagagacgaggtttgtttgtgggggtattggtttttgaggtcggtgttttttttgtaggtttggagatagcgtggtttttttttggggtttggttggatcgggtggttagaggcggttttcggtagagaaatttttttaggttattgagatatatttagttttttattaggttttttgggagttttttgttttggtaagggtttggttagtgggtggtggttagtaagttatttttttgatcgttattgatagttgttgtcggcggtgggttgagtttagggtcgttttttttatttttgtttatttggtttttatggttttttgttgttttagtttttttatagttgtatatattttacggttcgttattttataatgttt

SEQ ID NO: 1833 - DNA, 2480 bp, Artificial Sequence
  chemically treated genomic DNA (Homo sapiens)
aggtattgtgggatggcgaatcgtggagtgtgtatagttgtgaagaagttggaatagtagggagttatggaagttaaatgaatagggatgaagggggcgattttggatttagtttatcgtcgataatagttgttagtaacggttagggagatggtttgttggttattatttattggttaaatttttattagggtaggaggtttttagaggatttgatgagggattgaatatgttttagtagtttgggaaggtttttttatcgagagtcgtttttggttattcggtttagttaggttttagggaggagttacgttgtttttagatttgtaggagagatatcggttttaagagttagtgtttttatagatagatttcgttttttattgtttggtattttttgtttgtaattggatttaatttgtatagtttttttgtgagatagaggtgattttgttttttttaagattaggtttagaaaagggaagtagttgttttttaggttatagttaggaaggaagttagatttatatttatatttgtttgattttataacgatttttttaagaaagggacgtgttatggttggtttgttttagtttgtgagagttaattgtgtatatttgtttttagttttatttttggcgatatttttttggtattttgaaattagtcgtggttggcgtatttattttacgtaaattggtaaatattgtaaattagtttttatttttgtcggttgttaagcgttgatcgtacgttattatttgtgtgatttaggcgttgatgttgttttggaatcgagttagcggaaagggttttttcgtgtgaatttgtagtttttgtgtagggtagtagtatgaaagcgtttttcgtgttaattcgttgtttagttagattttgcgttattttaataatttgattgattagtgagaaaattaaggtgaggaaatatgagtcgtaaaattaggtgaaattaggagttatagtgtcgggtaaaatgtaggtttttttatttttatttgtttgtttgatttttaattttagacgtttttgtttttattataattagtagggtgtttgtgtttttaaatttattttgtgttgttgtatattcgtatttaaagtggacggggttaggattgagttagtttttttttggaataagaggtcggtgtgtttcgggggaaggaggttgttttgtgcgtgttcgtcgtttgtagtttttattgtcgtttttcgagtcggttttatttttgtttgagttttttgtgggtggaggtggaaggtaggttatagagttggtgggttggtagatagaggcgttttttttttatttgttttggttttttgatggatttgtgatttataattttttatttgatttttgattttataaattttagaaacgttttataaattattaggaagataaatattaattgaggttaacggaagggggtatgagttattttaggtagatagagaggggagatttagtttgttgggcgggtggggggtattttagaattatgggtggttcgggagaggggagtaaattattttgatataaaagtagttttatagattatgttttataatttgatttagagtaagagtttggttttcgtgggttacgaggtgttatttatagtgtaatttatagagtaaagtttgaatttagatttaggtatcgtgtttttgttttttttttaagggatatttatgtagatggttgttgtatatacgtatatgtgtgtgtgcgtaagtgcgtgtgtgtgtatgatatatgtaatgatagtttatttgattgttatatattattggttatttttttttagtttgaaattttttttttttttttttgtttggtttttaattcgttttttgtttgtttttttttttagagggtatgaattgtatgaataaagattatggttgtgtttatatttgtcgggagacgtttaaaggtggggtggtttgcgattgtaggttcggttttgattttgtttaaaattagaaggattgtatacgtaggtagagggagataaatgggttaaacgtttcgtgcgttttttgttattattttttggagggtttgtttagtttgttggattttggttagggagggtttttagttttatggggtggagagaagggtagggtttgtggaaggggtttgatagggtataagggataagggttgtaaattttagttttggggtttttcgtattaagtacgatattattagtgtagttttaggagttgggttggattttatggtagtttttgagtttaagttgtttagtaggaatggtggggtcgtggtatagaggtttataggattaggtttttcgatgggtttgggaagtttttggtaatgagtagtataaagaaggaaaagagtatggttttgaagtggttttatttcgggttgtgttgatttttttttcgggattaaagattagaattttgtatattt

SEQ ID NO: 1834 - DNA, 2487 bp, Artificial Sequence
  chemically treated genomic DNA (Homo sapiens)
ttaaaagagttttgcggaggttaggagtggtttttgatgtttatttgaagtttttagacgttgttaggagggggggtttttttgggtttttaatattttttcgtttgtcgttgttagcgtatttttgtagtttagcgtgtatttattttacgtacgtttcgtgttgtgtttttgggttttgtttatggttttaataaattttttgtttggtgtgatattggttgtttttagagggtgttaagatatggggttaggtgtttaggggttgtttattgtggtagggatagagtttttagtggcgggagtgttgtggtaattttatttttttagtttttttcgaaattgtgtcgggggtttttgcggtgttgttttggggttttatttgaggtgtcgtatttagaagtatttttgggaattttttttagatatattcgattggttatagaggaattcgaggttgtgtaatggggtgttttttttacgtgtacggattgggggttagtacggtttaggttagtgtgtagtgggggtatgaattttttgaagaataatttggtcgggtacggtggtttacgtttgtaattttaatattttgggaggtcgagtcggggcgtattatttgaggttaggagtttgagattagtttggttaatatggtgaaattttatttttataaaaaatataaaaattagttaggtgttttggcgtatatttgtaattttagttatttaggaggttaaggtatgagaatcgtttgaatttgggaggcggaggttgtagtgagttaagattgtattattgtattttagtttgggcgatagagggagatttcgttttagaaaaaggaaaagaaaaataatttatttagattttaaaatggatatttaaaaaattttttagagaaagttagaagaaaataggtgatttttttattatgtgtttaggtgattgtagatgttcggtaatgtttttttttaggtttttttgggtgagttcgttttttaggtaggggttagtatggtcggggtttttttgtttgagtttaggattcgtgtaatattaggaagataatagttgaaggttttttagtgagttaagggaagtatatataaatttattatataaatattagaaagtgttgttcgtaaaaaatacgtttttatagagttaataagtagagaaatagttgtttagtgttaggaagtgtattatgatttagaggtttagttcgtgtgtagcgtatagatttgaggttttagagagatcgaggacgtagattagtggtacgacggaaacgtagaacgtttatgagaaaatttttttattaattgagataaagttgtaaagaggtagatagttttattgggtgtgtacgtttgaaatttgtgttttttgggttagggtattcggggtgtggtttttagttttttgtagttgttgtttggaaatcgttgttatttatttattttttttttttgtttttttatttaggtgagaattttttaagttttgtttttcggcgttttcgtttcgtttttgttcggtttggtttcgtttttgttcggtttcgttttttaacgtgtttttaggtttttttttttttagtcggtttttaggacggttgttggacgtgttcgtgagtttttcgtttgtttgttttttatttttttgtagttttttttttaattttatggtttttttgagtttggtcgttttttacgttttatgttgggtttggtcggttttggggtttatttttttggttttattttttttatagtttcgagggtttttttgtgtttaggtttttggtagtcgttttttgtgtagattattgggtagatttagttgatttttaggggtattttttcggtttattattgggtcggtgttttgtagaatgagttgtgagagttattgtggttggttagagggtgttatttatagttattttagatttataggagttttcgtttcgatttttgtatttatttgtgttttgttttatgtttttttttagttatttgagttgtaggttttggttattttagattttttttttttgttatttttatttttattttagtatttttacgtttgttttaggttttattttttttttttttgtttggattaaattattttgatttttttgggttttcgtgtaatagtttgtttcggtcgttgttttattgtatttgtaaatttatttgtatttatatttaggttagggtttttaaatagaagttttagtagatttttttttttggttagttttttgttgaattaggaagtaggtttttgttgaattttagtatgattcgtttttatttttgtattttatttttgttttgggagtttttgggtttttgggcgtatttgttgtttttttttgtttgttattgggtgatttttcgtttttgtgggcgttttcgggttttggtttcgggttttttgaggatttgtttttttggtagcggttgttga

SEQ ID NO: 1835 - DNA, 2487 bp, Artificial Sequence
  chemically treated genomic DNA (Homo sapiens)
ttagtagtcgttattaggagagtaagtttttagaaggttcgagattagggttcgggagcgtttataaggacgggaggttatttagtgataaatagggaagggtagtaggtgcgtttaggaatttagaggtttttagagtagaagtgggatgtaggggtgggggcgggttatgttgaggtttaatagggatttgttttttggtttaatagggagttggttagagagagggatttgttgaggtttttgtttaaaaattttggtttgggtgtgggtgtaagtggatttgtaggtgtagtgaggtagcggtcggagtaggttgttgtacgaagatttaggaaagttagggtggtttgatttaggtagaagagggggaaatggagtttggggtagacgtaaaggtgttggggtgaggataagggtgataggagggaggagtttggggtgattaaggtttgtagtttaggtgattgggaaaaaatataaaatagaatatagatgaatgtaggggtcgggacgaaggtttttgtgagtttgaagtgattgtgagtggtattttttggttagttatagtggtttttatagtttattttgtagagtatcggtttagtgatgagtcgaggaagtgtttttggaggttagttggatttgtttagtggtttgtatagggggcggttgttaggggtttgagtatagggaaattttcgaaattgtgggagggatgaagttagagaggtagattttagaatcgattaagtttagtatggggcgtggagggcggttaagtttaagaagattatgagattggagaaggagttgtagagaggtggaaggtagataggcgaaggatttacgagtacgtttaatagtcgttttaagggtcggttggagggaaagagatttgaagatacgttggggggcggggtcgggtaggggcggggttaggtcgggtaggggcgggacgggggcgtcggagggtagggtttggagaatttttatttgagtggaagagtagagggaggaggtgggtgggtggtagcggtttttaggtagtagttataggggattgagggttatatttcgaatgttttagtttagggggtataagttttaaacgtatatatttagtggggttatttgtttttttatagttttattttaattagtaggaaagtttttttataaacgttttgcgttttcgtcgtgttattggtttgcgttttcggtttttttggggttttaggtttgtgcgttgtatacgggttgaatttttggattatgatgtattttttaatattgggtagttatttttttgtttgttggttttgtgaagacgtgttttttacggatagtattttttaatgtttatgtagtaagtttgtgtatattttttttagtttattaaggaatttttaattgttgtttttttggtgttgtacgaattttgggtttagatagagggatttcggttatgttgatttttgtttgggaggcgggtttatttaggagggtttgggagggaatattgtcgggtatttgtagttatttaagtatatagtgaaaaagttatttatttttttttggttttttttggagaattttttaaatatttattttaagatttaagtagattgtttttttttttttttttttgagacggagtttttttttgtcgtttaggttggagtgtagtggtgtaattttggtttattgtaattttcgttttttaggtttaagcgatttttatgttttagttttttgagtagttgggattataggtgtgcgttaggatatttagttaatttttgtattttttgtggagatggggttttattatgttggttaagttggttttaaatttttgattttaggtgatacgtttcggttcggttttttaaagtgttgggattataagcgtgagttatcgtgttcggttagattgttttttaaggagtttatgtttttattatatattgatttgagtcgtgttggtttttagttcgtgtacgtggaaaggatattttattgtatagtttcggatttttttgtggttaatcgagtgtatttagggagaatttttaagggtgtttttagatacggtattttagataaggttttagagtagtatcgtagggattttcggtataatttcggaaagagttaaaagggtgagattgttataatattttcgttattggggattttgtttttattataatgggtagtttttgggtatttggttttatgttttagtattttttagaaatagttaatgttatattaagtagagagtttattgaggttatgggtagggtttaggaatatagtacggggcgtgcgtggggtggatgtacgttggattgtaggggtgcgttagtagcggtaagcggaggggtattgggggtttaggagggtttttttttttagtagcgtttaggggttttaggtgagtattaagaattatttttagttttcgtagggtttttttgg

SEQ ID NO: 1836 - DNA, 2429 bp, Artificial Sequence
  chemically treated genomic DNA (Homo sapiens)
aaaatataaaaattagttgggtgtgatggtacgtatttttagttttagttatttgagaggttgaggtaggagaatcgtttgaattagggaggaggaggttgtagtgagttgagatcgcgtcgttgtattttagtttaggtgatagatcgagattttgttttaaaaaaaaaaaattagtcgggtgtggtggtatgtagttgtaattttagttatttgggaggttgaggtgggaggatggtttgagtttaggagttcgaggttgtagtgagttatgattatacgattgtatttgggcgatagagtggaggtgatgtgtttttttaaatagttatgagaataacgtttttttttttgttttggtttaggaattttattattatgttacgttgttttgttgcgttgtgttggtgtcgtaggtcggtggtaggatatttgtttattttataggttttgtttttagttttgaagtatggtttttttcgattgttgtttatacggttttttgttgttagtttgggttatatatttgggtttttttatttttgtgggtttggtgaggtttggttatgtgtttgtgttatgttagttgtttttaagatgatgtttttagtaggattatatgtgaatatagtgattattatggttaggaggaagttggttgtttattattagtttgtttagggattttttgtattttggcggggattagtagattttgttatgagagagtagaaggtagtatgttgatttttaggagtgtttatagcgtggttgggtagagtagagttataaatgaatagatttagtgtcgaggttattttgatttttttaggggttgttaggtcgtgggtgtagggtttagtaggtttatttgattttagtattttacgtgtgtttgttcggggtggttagtttattgtttttttatttttagtttaattagtaggtgttttattatgagtttttttaggtttattttgtttatttttgttatgtgatttgggatttttgagatgagattatagttgtagagtatatagtatagggaggagtttattagtatttttttatttgtggtgttttggtttagttttttttcggttggggttggattcgttttggtagttaggttttgcgttatttgttttattcgttttgtaatttatttgtttaattgttatttcggtggtcgtgaggttagttgatagaatggagaggggtaagtatttttcgtttggagaggatgggcgtgtggttatttgattgtttttgtaagtttggtggttgtgtgtaggttgttttggtggttttagttttttggggtaggcggggttttgtgtaggatgtagagattgggcgtggttttttgtagatgtttagatgtttttgggttgtggtttttgagatttagggtaaggttgttgattggattttagatttttttgtttgtttttttttttagttgttttttgtggtttggttttggtcgtttgggttttagggttaattttgtatggttttgattattttggtttttttggattgttaaggatatgttgagagttggttgggtttggtttaagtgttgagtttagggtaggggtggggataggtagggcggagttttatttggaaagttaggtacgattttttttgggatattaatttttttgtagagttggttaattcgggtaattttgagggcgagttttgtgtggtataagagatgttttgaggagtttagttttatttggtgtgatgggatttgtggaagttgtgggaagtggttttggttattcgtgtgtttatatgttttgcgtttagattaagatatggtgattaaaaggataaggattatatttatggtttttttttagagtttggtaagttagtaggtatgagagggtgttggaatgttgtggtgggtttgtgtggggattttgtaggatttagggaatttgtagggtttggtttagggagtatataggggtttaggtaaaggtaaggttataggtcgggggaggtgaagttggtagggggagggggagatttgttggttagagttgggttgggggtcggtgggtagtgggtttggttcgagtagggggcgagggattggagagaaaggtagtttttgatggttttttttttaggggttggtttttttttggttttttttttttaatgatcgcgttttcgtcgaggttatagtttttggttttgcgtttatatttttagtgttaggttgttcggagatttgtttatggtttttttttggattatggagttttttttgttattggtgtttggagggttggtttgttgtttttgtattttggttagttaggatggtggggttttgtagttgaattgggggtgtttttttgtttgtttgttttacgtgtattagtggttagaattgtttttat

SEQ ID NO: 1837 - DNA, 2429 bp, Artificial Sequence
  chemically treated genomic DNA (Homo sapiens)
atgagggtagttttggttattgatatacgtaggatagataggtagaaaggtatttttagtttagttgtaggattttattattttagttggttagggtgtaggggtagtagattagttttttaggtattagtggtagggagggttttatggtttaagggaaggttataaatagattttcggatagtttggtattggaggtgtgggcgtagagttaagggttgtggtttcgacgaagacgcggttattgggagggaaggattagaggaaagttagtttttggggaggggattattaggaattgtttttttttttaatttttcgttttttgttcgagttaggtttattgtttatcggtttttaatttagttttagttagtaggtttttttttttttttgttagttttatttttttcgatttgtgattttgtttttgtttgggtttttgtgtgttttttaagttaagttttgtaggttttttaggttttataaggtttttatataggtttattatagtattttaatatttttttatgtttgttgatttgttaggttttgggagggagttatggatatagtttttgtttttttggttattatattttgatttgggcgtagggtatgtgggtatacgggtggttaggattattttttataatttttataggttttattatattaggtgaggttgggttttttagggtattttttgtgttatatagagttcgtttttaaggttgttcgaattggttaattttataggagggttggtgttttagggagaatcgtgtttggttttttaggtgaggtttcgttttgtttgtttttatttttgttttgggtttagtatttgggttaagtttaattaatttttagtatgtttttggtagtttaagaaggttagagtggttaaagttatgtagggttggttttgaggtttaggcggttagaattagattataaagagtagttggaggaagaggtaggtaggagggtttggggtttagttagtagttttgttttgggttttagaggttatagtttagaagtatttgaatatttgtaggaagttacgtttagtttttgtattttgtataggatttcgtttgttttaaggggttaagattattagggtagtttgtatataattattaggtttgtagaagtagttagatggttatacgtttattttttttaggcggaaaatgtttatttttttttattttgttaattggttttacggttatcgggatagtagttgggtaagtaggttatagggcgggtggggtaggtgacgtaaaatttggttgttagggcgggtttaattttaatcggaaggaggttgggttagggtattataggtgggaagatgttgatgagtttttttttgtgttgtgtgttttgtagttgtgattttattttaagagttttaggttatatggtagggatgggtaaggtgagtttggaggggtttatggtggggtatttgttggttgggttagaggtgaagaagtagtgagttggttatttcgagtaggtatacgtgggatgttgggattaagtgggtttgttggattttgtatttacggtttggtagtttttgagagagttaggatggtttcggtattggatttgtttatttgtagttttgttttgtttagttacgttgtggatatttttggaagttagtatgttgttttttgtttttttatagtaggatttgttgattttcgttagggtgtaagaggtttttgggtaagttggtgatgggtagttagtttttttttggttatggtggttattgtgtttatatgtggttttattagaaatattattttgaaagtaattggtatgatataggtatatggttaggttttattaggtttatagggatggaagagtttagatatgtagtttaggttgataataggaggtcgtgtgggtagtagtcgagaggagttatattttaagattgaaagtagagtttgtgaggtgggtaaatgttttgttatcgatttacgatattagtatagcgtagtagggtaacgtggtatggtggtgaggtttttgagttaggataagaaaagaagcgttgtttttatggttatttgaggaagtatattatttttattttgtcgtttaggtgtagtcgtgtgattatagtttattgtagtttcgaatttttgggtttaagttatttttttattttagttttttaagtagttaagattatagttgtatattattatattcggttaattttttttttttgagatagagtttcgatttgttatttaggttggagtgtagcggcgcgattttagtttattgtagtttttttttttttggtttaagcgatttttttgttttagttttttaaatagttgggattagaggtgcgtgttattatatttagttaatttttgtatttt

SEQ ID NO: 1838 - DNA, 2267 bp, Artificial Sequence
  chemically treated genomic DNA (Homo sapiens)
ttaagggtttttatttgtttttttagttttagttttttttttgaagaaagaggtaagatgttagtggaaaataatttttattgagattttattaattgtaaaatttgtttttggtattaagttttttttttttttgtaattcggtttttttttagtggtttttgtggggagagaggtagtggttagaggtagaagatgataggtgatagtagatgtttattttagaggagattaagattttgggttagtttttatagttataagagaggtttaaggtattaagattatttttatttcggttggagttaaaggtaggcggttgtttaagttattatatttagcgaggggggtaggtagaggtgtttattatgaatgttttttttttttttatggtttggaagcggttatggttaaatttggaggtggtgttaatgaatttaaggttaattttttttagagttcgtcgtttcgtttgtattagtaaggattatgggttaagaggggaagggatttaggattacgaggagttaggttttttttagtattgtttatagcgtttttgtatttgggaagttatacgattaatttagttttttttattattcggtagatgaggatatatttaaagtagtaaatagtttagtaaggttagattgggaatttttttattttaggattttaaagttagtgtgaaaggattgttaatatttttttttttttttttttttttattatagggttattagcgtttgtggttttggattttttttttataagagtttttttatgataagttaggatttgttttattttgcggagggtgagtattcgttttttggtttttattatatagttttttagtatgataaagttattggttattttattatagtggataaagttattttggaaaacgagtatcggattagtataggtttaggaggggattgtcgtgtagatgatttttttaggtttaggttttttttgattatagggttgtttttagaaggaaggtaataaggaacggtttcgtagtttgtttcgggcgttgtgtttagcgtatattttaggttttattattgaatagttgagtttgagattttattttttattagttaatttcgacgagtggatttagatgataatatgttatttataagggatatagttaggtgttgtgttggttttagttaacgattttgttagtagtttttaggaagtagtttatttttaaaagtacgaggtttgggatggttttatagagtagaatatttattatttattagagggttgatgtttttgttagataggttatagttagtggaggtattgtttttgattagtttgtcgtttttgataaggtagttttggttaattttataaatttgaatgaataagaagggtgtaaggttggggtattagggataaataatttagatatgttagtgtgttgatttgtaaagtacgttagaaggtagttgaggttttagttttagttatagcgtattttaaggttagagtaaaaagttggttggttttttaggtttttttttgtaaggcggttgggttaaaattaaagattttgttgtataatataggtttgttatttttttggtggtggtattagggattaataagattagtatttttagttatattagttagttttattatagttattttataggatggtattttataaattattaagatgggttagaattgattatgagaagtaagttattgatgtttacgtgatgtataagttatagttagtgaagtagtattgataggtatagaaattttattttttattacgggggtttttttttatttttagggagttatttttagaattttatttttttgttgattttagtgcggtgatggtagtttttttgtttagcgcgtgttatagagaaggttatacgagtaggatgttatgttttaatataggttattttgcgtaggtttcggtgggttttgcggggtagttttttggtgtgttaacgattggtgatttttggaatggatatatattattttattttagcgtttagtattttttattgatttttttttgttatttagtaattattaattatggttgggttatttgagggagtgataagattattttatgtgtattatttataggttttttttgttaagttggataggttttgggggtgttattttgaatttaattttgaatgggtgttttttaaggtatttattagtttaagtttttttatttatagggattg

SEQ ID NO: 1839 - DNA, 2267 bp, Artificial Sequence
  chemically treated genomic DNA (Homo sapiens)
tagtttttgtgaatgggggagtttaaattaatggatgttttaaaaagtatttatttagaattgagtttagggtgatatttttagagtttatttagtttgataggggagatttgtgggtaatgtatatgaaataattttattatttttttagatgatttagttatggttggtaattgttgagtagtaggaaggggttagtgggaggtgttgggcgttgaggtgaagtaatgtgtatttattttaggggttattagtcgttggtatattaagaagttgtttcgtaagatttatcgaggtttgcgtaaggtggtttgtattggggtatggtattttgttcgtgtagttttttttgtggtacgcgttgggtagaaaggttattattatcgtattgagattaataagaaggtgaggttttgagagtggttttttgggggtgggaagaggttttcgtgatggggagtggggtttttgtgtttgttagtgttgttttattgattgtagtttatgtattacgtggatattagtggtttgttttttatggttagttttggtttattttgatgatttgtaaggtgttattttgtagagtggttgtggtggggttgattggtgtggttggggatattagttttattggtttttgatgttattattaggggggtgataggtttgtgttgtatagtaggatttttagttttagtttagtcgttttatagaaaggaatttggagggttagttagttttttgttttgattttgggatacgttgtgattgggattgaggttttagttgttttttagcgtgttttgtaggttagtatattggtatgtttgggttatttgtttttaatgttttagttttatattttttttgtttatttagatttataagattggttagggttattttattaaggacggtaagttgattaagaataatgtttttattgattatgatttatttgataagagtattaattttttggtaagtaatgggtgttttgttttgtgaggttattttaggtttcgtgtttttggggataggttgttttttaggggttgttagtaggatcgttaattgaagttaatataatatttagttgtgttttttgtaagtggtatgttgttatttgagtttattcgtcggggttggttggtgagaagtggggttttaggtttagttgtttagtgatgaggtttggaatgtgcgttgggtatagcgttcgagatagattgcggaatcgttttttgttgttttttttttgagaatagttttgtggttagggagggtttgaatttggaggggttatttgtacgataatttttttttgggtttgtgttgattcgatgttcgttttttagggtggttttgtttattatggtgaagtgattaatgattttgttatgttgaaaggttgtgtggtgggaattaagaagcgggtgtttatttttcgtaaggtgaggtaggttttgatttgttatgggggggtttttgtagagggaggatttaaggttatagacgttggtggttttgtggtgggagaggaaaggaaggagagggtgttggtagtttttttatattggttttgaagttttgagatgaggaaatttttagtttggttttgttgggttgtttgttgttttgagtgtgtttttatttgtcggatggtgggggaggttgaattgatcgtgtggttttttagatgtaggggcgttgtgaatagtgttgaggaaagtttggtttttcgtaattttaaattttttttttttttggtttatagtttttgttggtgtagacgaagcggcgggttttggagaagattgattttaagtttattgatattatttttaagtttggttatggtcgtttttagattatggaggagaagaaagtatttatggtgagtatttttgtttgtttttttcgttgggtgtggtggtttgggtagtcgtttgtttttggttttagtcggggtaggggtggttttgatgttttaggttttttttgtggttgtggagattggtttagagttttggttttttttagagtgggtatttgttgttatttgttattttttatttttgattattgtttttttttttatagggattattgaagaaagatcgaattgtaaaggaagaaggagtttaatgttaggaatagattttgtagttggtggggttttaataaaagttattttttattgatattttgtttttttttttaggagagaggttgggattggggaggtagatgggggtttttga

SEQ ID NO: 1840 - DNA, 2426 bp, Artificial Sequence
  chemically treated genomic DNA (Homo sapiens)
gttttggttaattttataaatttgaatgaataagaagggtgtaaggttggggtattagggataaataatttagatatgttagtgtgttgatttgtaaagtacgttagaaggtagttgaggttttagttttagttatagcgtattttaaggttagagtaaaaagttggttggttttttaggtttttttttgtaaggcggttgggttaaaattaaagattttgttgtataatataggtttgttatttttttggtggtggtattagggattaataagattagtatttttagttatattagttagttttattatagttattttataggatggtattttataaattattaagatgggttagaattgattatgagaagtaagttattgatgtttacgtgatgtataagttatagttagtgaagtagtattgataggtatagaaattttattttttattacgggggtttttttttatttttagggagttatttttagaattttatttttttgttgattttagtgcggtgatggtagtttttttgtttagcgcgtgttatagagaaggttatacgagtaggatgttatgttttaatataggttattttgcgtaggtttcggtgggttttgcggggtagttttttggtgtgttaacgattggtgatttttggaatggatatatattattttattttagcgtttagtattttttattgatttttttttgttatttagtaattattaattatggttgggttatttgagggagtgataagattattttatgtgtattatttataggttttttttgttaagttggataggttttgggggtgttattttgaatttaattttgaatgggtgttttttaaggtatttattagtttaagtttttttatttatagggattgattaatataattttaagtttttttttgtagttattagtaggttataaagagtaaagggtttaggaacgtgttaagaagttgttttttggtttttcgttattttagttatttttgattataaggttgtttttagaaggaaggtagtagagaatggttttatattgttcgattcgggcgttgtatttagcgtttattttgagttttattaacgaatagttgggtttgaaattattttttttttaggtttgtatagtaatttaagttatcgtaaagtttatttttgtagtttttgtttttggttatttcgatgacgtcgattattttattttgtttaaatatttggtttataggtatttgttgtttaagtttttcgcgggtttagtttagtttttcggttatagtgttttcgtttatttggatttttattaggtgggtttttttttggcgtagaggaagtaggcgtatttaggagaaggtagatatagtttagttttagttgttagcgttttttttatagtagaggaattgtagttttatgcggtttgattgatgttaagtatacggtaaaaagttagtaattttgaataagttattgaattttattaagaggaaggaatttttatttttgttaatagtaataatttaattttggatattggtgtttgagttattgttaggatgagcggataagatttatattataggtaaataattagattttagtttttattagtttaatgtttttgtggttgttttttgggttagttttttttggggtattgtagtggttttattttagttatttatatttgttttagtgataagtttgtttttgagagagtataagttttaagtaagaaaatgtattatcgggagcggtggtttatatttgtaattttagtattttgggaggtcgaggtaggtggattatttgaggttaggagtttaaaattagtttgattaatatggagaaatttcgtttttattaaaaatataaaattagtagggcgtggtggcgtatgtttgtaattttagttatttaggaggttgaggtaggagaatagtttgaatttagaaagtggaggttgtagtgagttgagatagggttattgtattttagtttgggtaataagaacgaaattttgtttttaaaaaaaaaaaaatgtatttaagtataaagtttttatttaaggatagtttggtaatgttttgataaaattttaacggtggatatgtatttttattcgtggtggtttttattatatggggttgtatttagtatttgagattagttaggataattagtaataggatagtaagaggtatttattttaattaagttaataaaaagtttgtttagtttattaattaggtttttaggagagtagttagtattttataatcgatttttaggtaggtattttagtgttattggtgagttattagttgaattttaaaggggaatggtttttttgttaagggttagtaaggatatagtgttttttgttggtaagggagaagtt

SEQ ID NO: 1841 - DNA, 2426 bp, Artificial Sequence
  chemically treated genomic DNA (Homo sapiens)
ggttttttttttgttagtagagggtattgtgtttttattggtttttagtaagggaattatttttttttaaaatttaattggtgatttattagtaatattgaaatgtttgtttgaaagtcggttgtgaggtattggttgtttttttggaaatttagttgatgagttgagtaggttttttattgatttggttagagtgggtgttttttgttgttttgttattggttattttggttgattttaagtgttgagtgtaattttatgtggtgagggttattacggatgagagtgtatgtttatcgttgaaattttgttaggatattgttaggttgtttttgagtgaaagttttatgtttaaatgtatttttttttttttagagatagaatttcgtttttgttgtttaggttagagtgtaatagttttattttagtttattgtaatttttattttttaggtttaagttatttttttgttttagttttttgagtagttgggattataggtatgcgttattacgttttattaattttgtatttttagtagagacggggtttttttatgttggttaggttggttttgaatttttgattttaggtgatttatttgtttcggttttttaaagtgttgggattataggtgtgagttatcgttttcggtgatgtatttttttatttagagtttgtgtttttttaaaagtaggtttgttattagggtaagtgtaggtggttgaggtaaaattattgtagtattttaaaaggaattgatttaaaggatagttataggaatattgggttggtaggggttgggatttggttgtttgtttgtggtgtgggttttgttcgtttattttgatagtaatttaggtattagtatttaaagttaagttgttgttgttggtaaaaatgaaagttttttttttttggtgaggtttagtgatttgtttagagttattggttttttgtcgtgtgtttgatattaattaggtcgtatggagttgtagtttttttgttgtgggaggagcgttggtagttggagttgagttgtgtttatttttttttagatgcgtttgttttttttgcgttagaagaaggtttatttgatggagatttaggtgaacggaggtattgtggtcgagaagttggattgggttcgcgagaggtttgagtagtaggtatttgtgaattaagtgtttgggtaggatgagatgatcgacgttatcggggtgattaagggtaaaggttataaaggtgagttttgcggtggtttgagttgttgtgtaaatttgggggagaagtggttttaggtttagttgttcgttgatgaggtttagagtgagcgttgggtatagcgttcgaatcggatagtgtagaattattttttattgttttttttttgagaatagttttgtggttagaagtggttgggatagcggagggttaggggataattttttaatacgtttttggattttttgttttttgtagtttattgataattgtaaaggggagtttggaattatgttagttagtttttgtgaatgggggagtttaaattaatggatgttttaaaaagtatttatttagaattgagtttagggtgatatttttagagtttatttagtttgataggggagatttgtgggtaatgtatatgaaataattttattatttttttagatgatttagttatggttggtaattgttgagtagtaggaaggggttagtgggaggtgttgggcgttgaggtgaagtaatgtgtatttattttaggggttattagtcgttggtatattaagaagttgtttcgtaagatttatcgaggtttgcgtaaggtggtttgtattggggtatggtattttgttcgtgtagttttttttgtggtacgcgttgggtagaaaggttattattatcgtattgagattaataagaaggtgaggttttgagagtggttttttgggggtgggaagaggttttcgtgatggggagtggggtttttgtgtttgttagtgttgttttattgattgtagtttatgtattacgtggatattagtggtttgttttttatggttagttttggtttattttgatgatttgtaaggtgttattttgtagagtggttgtggtggggttgattggtgtggttggggatattagttttattggtttttgatgttattattaggggggtgataggtttgtgttgtatagtaggatttttagttttagtttagtcgttttatagaaaggaatttggagggttagttagttttttgttttgattttgggatacgttgtgattgggattgaggttttagttgttttttagcgtgttttgtaggttagtatattggtatgtttgggttatttgtttttaatgttttagttttatattttttttgtttatttagatttataagattggttagggt

SEQ ID NO: 1842 - DNA, 2306 bp, Artificial Sequence
  chemically treated genomic DNA (Homo sapiens)
tagtggtttatgtttgtaattttagtattttgggaggttgaggcgggcggattacgaggttaggagattaatattattttggttaatacggtgaaattttttgtttattaaaaatataaaaaattagtcgggcgtagtggcgggcgtttgtagttttagttattcgggaggttgaggtaggagaatggcgtgaatttaggaggcggagtttgtagtgagtcgagatcgcgttattgtattttagtttgggggatagagtgagattttattttaaaaaaaaaaaaaaaaaaaaaaaaaaaagtttggtagggagtaggatatttggattttattttgttgtttttttggttgtgtgatatttaggttacgttgtttttttgggtttcggtttttttatttgtttaagaggggttgatagtcgtatttgtttttttagtttttttttaggaaggtggtagttataattagtatttgttgaggttgattttgtattaggtttaggataggcggggtttagggaggttcgtttttcgttacgtttttttgttaggggagtttcgaggtttttttagtgttatttttatgttatattttgttttagttttgtgcgttttaagttagggtattgagtgtgttagtattcgtagggataggtattggattttgggtggatttgagggtttgtgattatttttttagttgtttttttttagaggttattttttttaaggaaggaaagaattttttcgttattttttgtagtgcggttagtttaggttagtttgtatagtagggttagaattagggtttttggggagggatgtttgtttgtttagtgggaggagacggtacgttcgtgaagtcgttatttagttagtttgggggttacgagtgttgtttttggtggcgttgtgcggggagggagggggtcgagtagggtgggtattcgtatgtttgtgttttgttggttttcgatagatgatagttttttttttagggtttttagtgtagagttttttggggatattatggttatttttgtttagatgagagggagtcggttgtttgtgatagcgtcgtaaaatgtcgttagggttttttttttttttttttttttttttttttcgtttttttttggttggtggttttttgtaggttttcgtttttgttggtgttggttataatgtttttatttttagggtttcggcgttttagttttttgcgtttatcgcgtttgttcgttagaatttttgtgtttttggtgcgtgtggtttgtcgagtttcgagtttttgttttttttagtttttttttttttcgcgtttttaggaggtgtttttggaagttacggagttttatcggtattaagatcgattgttttttggggtgaggtagtaggttgtatagtttggggttttgttttgttatgggataattatataatttattgttttttttgaagtggttgtaatatttgcggtggatagagcgtttggaattttggttgggagcgggtagggttaggtttgggggtagttttggtagtagtcgggggtaggggtcgtttatattgagaagtttgataggtttaggtgttatttgttgtgtgattttggataggtttttgatttttttgggttttagtttttttttttgtaaaatggaggtaaatgaggatggaaggagatgtagtgtggagtatcgagggtagaggagagttgagtcgattttattttttgttttagtcgtattgagagaggcgatttacgtagttgtttgtttgatttttgttttttaatattttttaatatttttttcgttattaggtttaggtttatgggtggttttgagtcgtattttttattgagtattaggagaaggtatcgtggggttaggggtggtcgagacgtttggaggttatagggttgcgagtattggcgttgtttattattttaggtttttagtacgtgttttagtttggttagtttagtggtagggtttttgtttgtggaggaagggaggttaaggtattttttttgagtaggaagtgagaggaatagttttgtatatattgggttttatatggtataatttgaaggtagatagtggtttttttgtatttggggaaattgaggtttagagagttagggattttttaagattagttagtagtagttgtttttttttggggtgttattttttttgttttttttgttttgcgtttgtttagtttttttgttttggtgattgaggatcgttaggtaggggttggtgttgggcggggggcggcgggttttttcgtagtgta

SEQ ID NO: 1843 - DNA, 2306 bp, Artificial Sequence
  chemically treated genomic DNA (Homo sapiens)
tgtattgcgggagggttcgtcgtttttcgtttagtattagtttttgtttggcggtttttagttattagagtaggagggttgggtaggcgtagggtaggagggataggggagatggtattttaggaaggggtagttgttgttggttggttttgggaagtttttggttttttgggttttagtttttttaggtatagaggagttattgtttgtttttagattgtgttatgtgggatttagtgtatgtagagttgttttttttattttttgtttaggaaaggtgttttggtttttttttttttataggtagaggttttgttattgagttggttaggttggggtacgtgttgggaatttggggtgatgggtaacgttaatattcgtagttttgtgatttttaaacgtttcggttatttttggttttacggtgtttttttttggtgtttagtggagggtacggtttagggttatttatgagtttgggtttgatggcggggggagtgttggggagtgttgggagatagaggttagataaatagttgcgtggatcgttttttttagtgcggttggggtagagggtggggtcggtttagtttttttttgttttcgatgttttatattgtatttttttttatttttatttgtttttattttatagaggaggaaattgagatttagagagattaggggtttgtttaaggttatatagtaagtggtatttaggtttgttagattttttagtgtaggcggtttttgttttcgattgttgttaaggttgtttttaaatttggttttgttcgtttttagttagggttttagacgttttgtttatcgtagatattatagttattttaggaaagatagtagattgtatagttattttatagtagggtagagttttaaattatataatttattattttattttaaagggtagtcggttttggtgtcgatgggatttcgtggtttttagaggtattttttggggacgcgggaggaaagagggttgaggagaataggggttcgaggttcggtaggttatacgtattaagggtatagggattttggcgggtaggcgcggtgggcgtagggggttgggacgtcgaaattttgggagtggggatattgtggttagtattagtagggacgggagtttgtaggaaattattaattagagagggacgaggaagagagaaaggaggagggagggaaagttttggcggtattttgcgacgttgttataggtagtcggtttttttttatttggataggagtggttataatgtttttaaggaattttgtattggagattttaggaggagggttgttatttgtcgaaggttagtaagatataggtatgcgagtgtttattttgttcggtttttttttttttcgtatagcgttattagaagtagtattcgtggtttttaggttggttgagtagcggttttacgggcgtgtcgtttttttttattgggtaggtaggtatttttttttaggggttttggttttggttttgttgtgtaggttggtttgagttgatcgtattgtaggaggtggcgggaaggttttttttttttttgagggaagtggtttttaggggagagtagttgggggggtagttatagatttttaggtttatttagggtttagtgtttgtttttgcgggtgttggtatatttagtgttttagtttgggacgtatagggttgggatagagtgtagtatgaggatgatattgagagggtttcggggtttttttagtaggggaacgtggcgagagacgggtttttttaagtttcgtttattttgggtttggtgtagggttagttttaataaatgttaattgtggttattatttttttggggaaaagttgagggggtagatacgattgttaattttttttaaataggtgaggagatcgaggtttagagaggtaacgtgatttggatgttatatagttaagggggtagtagagtgaggtttaaatgttttgttttttgttaagtttttttttttttttttttttttttttttgagatggagttttattttgttttttaggttggagtgtagtggcgcgatttcggtttattgtaagtttcgttttttgggtttacgttatttttttgttttagtttttcgagtagttgggattataggcgttcgttattacgttcggttgattttttgtatttttagtagatagggggttttatcgtgttagttaggatggtgttgattttttgatttcgtgattcgttcgttttagttttttaaagtgttgggattataggtatgagttattg

SEQ ID NO: 1844 - DNA, 2473 bp, Artificial Sequence
  chemically treated genomic DNA (Homo sapiens)
tagtttcgatgtttgagtatttttaatgtttgatcggattttttattttttatttttttttgggtgatgtcggttattttggtttgtttttagttagaatttagtttggttagtttagatagagtgatttatttttttagttattttttatttattaattttatttggagttttgtttttgaatttttatatttttttgtgtttgaaatggagtataattttttttttttgttgtaaaattttattgtaggggtttttgtgagtagagattgttttatcgtttggaataagttttagaagaattttatttttaatatgggaagtggattagagggtagagtttttagggtttttttttttagttggtagtttatagttttatttttagttttagaggtataggttttttattgtcgggttaggaatgggaatagtaggggtttcggagtgggtagggggttttcgggtaggaggtgtatagagggtatgggttggttatttcgggtttggtaatggttatttgttttttgtatatgatggttttatagggtatttttatgtttattatgttataaacgatgttttaaggatttgaatcgggggtggaattgatatttttggatttttaagtttaggtgtattttaaaattgtcgagataggatggttgaggttttagaattttaaggcgtaatattatttatttagtttaagttgtggttttaaatttttatttgaaaattttggttttgtttatgtgggttagattatgttgggtaggaggatttggtttttgaggatttagttgtttagagtggtttagatttaaagttaaaaggatgttttttttattttttttttgggttttgttttttttttaattttggagtgtgtggttagatgttagttagatgaggtttcgtatttttggatagttttttgatttttttttttttttattacgaggcggtttttgttattgggttttaggataaagtttcggggtagtttggatggtgttttgattttaatttttttagggggtttttagttaagggttttttttgtatggaatttttaaagttagtaagaaatagaagttttttgaatattgttaacgttttgaatatttagtatttacgaaatttaagcgaattagttaaaaataaaaacgtggtgatgattatttgttgtgggtttaatttaatttgaggatttatttaaaataaaattttggggaatgaaaatagaagttagtagtatatttttagggttagtagggagtatatttgtttagtatttgagtttttgttaggtgttagattttgtttttgatagttgtgttgggcgtgcgtatataagtttcgggcggaggttagggttgtatttagcgtatatgagatgttacgtgggattggaaatgttttttgcgtttttttgagttatatgaaattattgagaagtttttgatttgggggttattagaggaatttggtttattttgtttggaatatagagggaaggttggttacggggaaaatttagaggcggtaatttcgtgtttttaatagatagtatgagttattatgagaaggggaaaggggatttggtttttagatatatattaaggattttaatgtggatagtggtaaggtgttgtttttgattttttattcgtcgtttatttaatttggtattttagggttgtatcggtcgagttattattaaggtttatttttcgtttggtttaggatttttttggagatgagggtagataagtggatggtattttttgttttaaggtttcggggttttatgaagtagtcgtttttattgaatagttttagtagttgtagtgtttttttttgtattttttagaatttgttgttttgaagtttcgtttgttattattgtgtttattttttttagttagttatatagaataaatttatttttttgttttcggaaaaggggttaggtttttggatgtttgaaaatagttgttttgttttttttgatttttttttcgttatcgtcgtaatttaaggcgaggagttgttatttataaggtatttattgtttgtcgagggttttatttaggttaggacgcggttatttttatttagagatgaagaaattggggttcggcgaggttaattgtttgtttagggttatatagggaataggagacgttggatgtaaatttagtttcgtttggttttgaaggttgtttttttttcggttttgtagagcgttagttttttttttataagttggatgttttcggtttaatattttatagagaaaaggtttttaatgttttttttgttattagcgtttttttgtaaaagagtattttgaatgtttacgttagttatagaggcgttttttttattttttggtaggtgggttttttttattttttttttttgtatcgattggtatgtatttaggttaggtagtagaatgtttggt

SEQ ID NO: 1845 - DNA, 2473 bp, Artificial Sequence
  chemically treated genomic DNA (Homo sapiens)
gttaggtattttgttatttgatttgaatatatattaatcgatatagaaaaggaaggtgagaggagtttatttgttagagggtgggaggggcgtttttgtggttggcgtgggtatttaggatgtttttttgtagagaagcgttgatggtaggggaggtattggaggttttttttttgtggggtgttgggtcgggggtatttagtttatagaagagaggttggcgttttgtagggtcggggagaaggtagtttttagaattagacggggttgagtttatatttagcgttttttgttttttgtgtgattttgggtaagtagttaatttcgtcgaattttagtttttttatttttaaatgggaataatcgcgttttgatttaaataaaattttcgataaatagtaggtgttttgtaagtggtagtttttcgttttaggttgcggcggtggcgggggaggggttagagaggatagggtagttatttttaaatatttaaggatttgatttttttttcgaggataagggaatagatttgttttgtgtgattgattgaagggaatagatatagtggtgatagacggagttttaggataataggttttgaggaatataggaaggaatattgtagttgttggagttgtttaataggaacggttgttttatgaggtttcggagttttggagtagagggtgttatttatttgtttgtttttatttttaagggagttttggattaggcgagaggtgggttttggtgatgattcggtcggtatagttttggggtgttaggttgagtgggcgacgggtggagggttagggatagtattttgttattgtttatattgaagtttttggtgtgtgtttggaagttaagtttttttttttttttttatggtgatttatgttgtttgttgagagtacgaagttgtcgtttttggatttttttcgtaattagttttttttttgtgttttagataaggtgggttaggtttttttaatggtttttagattaagaattttttagtagttttatgtaatttaagggagcgtaggaggtatttttagttttacgtagtattttatatgcgttaagtgtagttttggttttcgttcggggtttgtgtgcgtacgtttagtatagttgttaggaatagggtttggtatttggtaaggatttaggtgttgggtaaatgtgttttttattagttttggaggtgtgttattgatttttgtttttattttttaaggttttattttaagtaaatttttaaattggattaaatttatagtaaatgattattattacgtttttatttttaattagttcgtttgggtttcgtggatgttggatatttaggacgttagtaatgtttaggaagtttttattttttattggttttgggggttttatgtagggaagatttttgattaggagttttttggggggattggggttagaatattatttaggttgtttcgaggttttgttttgggatttagtgataaaggtcgtttcgtggtggaaggaaaaggggattaaaggattgtttagaaatgcgggattttatttggttggtatttggttatatattttagagttggggaggaggtagggtttaagggagaggtgggagaggtatttttttggttttgggtttgggttattttggatagttgggtttttagaaattaagtttttttgtttaatatggtttgatttatatgaatagggttagggtttttaagtaggagtttggggttatagtttgggttggatagatagtgttgcgttttagggttttagggttttagttattttgtttcgatagttttgagatatatttgagtttggaggtttagagatgttagttttattttcggtttagatttttagggtatcgtttatagtatgatgaatatgaggatgttttgtgaggttattatgtgtagggagtaggtggttattgttaggttcggggtggttaatttatgttttttgtgtattttttgttcgagggttttttgtttatttcggagtttttgttgtttttatttttggttcggtagtggggagtttgtgtttttggagttgagagtgggattatgggttgttagttgaggagaagagttttgggggttttgttttttggtttattttttatgttaagaataaaatttttttgaggtttattttagacggtaaagtagtttttatttataggggtttttgtaatgaggttttgtaataggggagaaagattgtgttttattttaaatataaggaaatgtggggatttagaagtaaggttttaggtggaattggtggatggaagatggttaagagggtgggttattttgtttaagttgattaggttggattttggttagaggtaggttagggtgatcgatattatttagaggaaggtaggggatgaggaattcggttaggtattgagggtgtttagatatcgaaattg

SEQ ID NO: 1846 - DNA, 2498 bp, Artificial Sequence
  chemically treated genomic DNA (Homo sapiens)
taaaacgtaagggagggtatgggtattttttattttttataaataggattttgttttttataatttttttatcgttttatttttatttgattaaattttaaatgaatatttgaggtagataattataagagatttttttcgaaagtaaaatcgagatgaaattttcggttaaatgggtttgtttattatagcgtggatttggagagagacgtaagtaagaagaaaagttttggttgggtgtagtattttacgtttgtaattttagtattttgggaggttgaggagggaggatcgtttgagattaggagtttaagagtagtttgggtaatatagtaagattttatttttatgaaaatataaaatattagttaggtgtggtggtatatatttgtagttttagatattttggaggttgaggtgggaggatcgcgtgagtttaggagttggaggttgtagtgagttatgatggtgtttttgtattttagtttaagtgatagagttagattttgtttttaaaaaaaaaaaaaaagagagagagaaaaaaaaaataaaagtttagtttagtattgtggtttatgtttgtaattttagtattttggaaggttaaggtgggtagattatttgaggttaggagtttaagattagtttggttaatatggtgaaatcgtgtttttattaaaaatatatatatatatatatataaaatattagttgggcgtggtggcgtatgtttgtaatgttagttattagggaggttgaggtaagagaatcgtttgaatttagaaggcggaggatgtaatgagtcgagattacgttattgtattttagtttgggttatataagtgagattgtatttttaaaaaaaaaaaagaaagaaagaaaagaaaaattttatagggtatattatttttattttgagttagtgatttaggttgatgataaagtagtgggaatagttattagggatttttatttattaggtatagtttttaagggttatatatggtttgtttggtaattgttcgtggagaattcgttattatatatatgtagagtagaaggtgtgattaatgcgtttttaaatattattagtattgttgtcgtgattttgaggagttttttaatattaacgagggattgatttttttagttttatataaatagggaatttaagaagtgggtatatggggttagggtatttaaaattttaaggagttttagaaaatgtataatttttgttttagatttatttttttattggttggcgttgtaatatatttagtcgttgagggaatttttgttagttgtcgcggttatttttttttttttgaacggtatttaagattatttttttaaatttcgtaggtaaattttttattgtttattggagaatgagttattttatagggggacgtttatttttttttattttatgtaacgtgttatttttttttttttataggttttcgatgttttttgtgtaggaggagaagtatttgtatttatgttaaggtttagtgacgtttgtaatgtgttagacgttgggcggagtgttttttattatttgttttaattttcgttacgatttcgtttaatttaaaagatagatgaggaaattgaggttcggggtagtaaggagattagtttagtggaaggttataggtttggttttttgtattgttttttttttcgaggtttgggacgtaaaatttgattttaatgtttagttattaggtgattaatggaggaaatgtgagtattttcgtgtagtttattatagttaggtgggttttgatgtttgtaataagttttattcgggtaggatagtggttgaagtttagattatagcggtttaggtaaatgtaatttacgaaagtagaagttggttaagattagtgtttttaaggataagggaggaagaaatgaggtgggcggggttgggataaggaatttttatataggggtattttttttttttttatttatttttgtagagatgggggtgaagatttttgatttcgaattagttttatttgggtttatttcggtttttttgtaggaaatttttattattttttttatattttaggggttaaaggtagtagggtgttagggtgattatgatgaatgttgtttttggatggggtttttattttttaggtttgggattaggataggatgtatttttgtaataaagtatttgtgttttttggtatttagtaggtattagttatatcggtaggcgttttttttttattggggttttaggagatgttagaattgagttattggatagaatagttgattgaggattagtgaggtagtacggttttgttttaattatatttcggtttttaggttaggggttcgaattattgtttcgttatttgtggggaataaatgggaagatttaaatagttaacggtatgatttggtgacggttatgaggaggtaagatatagagttggtttttatttttagtatttgttggtaggaaa

SEQ ID NO: 1847 - DNA, 2498 bp, Artificial Sequence
  chemically treated genomic DNA (Homo sapiens)
ttttttattaatagatgttggagataaaaattaattttgtgttttgtttttttatggtcgttattaggttatgtcgttggttgtttaggtttttttatttgttttttataggtgacgggatagtggttcgaatttttagtttgggggtcgggatgtgattggggtaaggtcgtgttgttttattgatttttagttagttattttatttagtggtttaattttggtattttttaggattttagtgaggaggaagcgtttgtcggtatagttggtatttgttgagtgttagggagtataggtgttttgttgtaggagtgtattttattttggttttaggtttagggggtgaggattttatttagagatagtatttattatggttattttggtattttgttgtttttggtttttgaggtgtaggaggggtgatgaggattttttgtagagggatcgggatggatttagatggggttggttcggggttagggatttttatttttatttttgtaggggtgggtagggaaggaagggatgtttttgtatgggaattttttgttttagtttcgtttattttattttttttttttttatttttgagaatattggttttagttagtttttgttttcgtaggttgtatttgtttgggtcgttgtggtttgggttttagttattgttttattcgagtgaggtttgttatagatattagggtttatttgattgtggtgggttatacgaggatgtttatattttttttattagttatttgatggttaggtattggagttagattttacgttttagatttcggggaggaggatagtgtaggaagttaggtttgtggttttttattggattgatttttttattgtttcgggttttagtttttttatttgttttttgggttaaacggggtcgtggcgaggattaagatagataatgaaaagtatttcgtttagcgtttggtatattgtagacgttattaagttttggtataaatatagatgtttttttttttgtataggaagtatcgggaatttgtgaggggagggggatgatacgttgtatgaagtggagaggagtgggcgtttttttgtgggatggtttattttttagtgggtagtgagagatttgtttgcggaatttaggagggtggttttgggtgtcgtttaggaaagagaaagtggtcgcggtagttggtagaaatttttttaacggttagatgtgttataacgttaattagtgagaaaatgaatttgagataaaaattgtgtattttttggaattttttagagttttaaatattttggttttatatatttattttttagattttttgtttgtgtagggttggaaaaattagtttttcgttagtgttgggaaattttttaaaattacggtaataatgttaataatatttaagagcgtattaattatattttttattttgtatatatatggtgacgggttttttacgggtagttattagataaattatgtgtagtttttaaaagttgtgtttggtgggtaggaatttttggtagttgtttttattgttttgttattagtttgggttattgatttaggataaaaatgatgtattttgtagaatttttttttttttttttttttttttttttttggagatgtagttttatttgtgtggtttaggttggagtgtagtggcgtgatttcggtttattgtatttttcgttttttgggtttaagcggtttttttgttttagtttttttggtagttagtattataggtatgcgttattacgtttagttaatattttgtgtgtgtgtgtgtgtgtatttttagtagagatacggttttattatgttggttaggttggttttgaatttttgattttaagtgatttgtttattttggttttttaaagtgttgggattataggtatgagttatagtgttgggttggatttttattttttttttttttttttttttttttttttttttagaaataaggtttagttttgttatttaggttggagtgtaggggtattattatagtttattgtagtttttaatttttgggtttacgcgatttttttattttagtttttagggtatttaggattataggtgtgtgttattatatttggttaatgttttatgtttttatagagatggggttttgttgtgttgtttaggttgtttttgaatttttggttttaaacgattttttttttttagttttttaaagtgttaggattataggcgtgagatgttgtatttagttagaatttttttttttgtttgcgtttttttttaaatttacgttatggtgagtaaatttatttgatcggaggttttatttcgattttgttttcggaagaaattttttgtgattgtttgttttaagtgtttatttagggtttaattaaataaaggtggggcggtaaagggattgtagggagtaaaattttatttgtagagagtggggaatatttatgtttttttttgcgtttta

SEQ ID NO: 1848 - DNA, 2460 bp, Artificial Sequence
  chemically treated genomic DNA (Homo sapiens)
atttttgaggtagtatttattggttttatcgatttttggtagtttagagtgagggtgaagagatgtttgggtttacgttttaattttattaattatatagtatttttgggtaagttatttatttataagttttagttttttattgtaaaatgtgattataatagaatttgttttaaggagtgagtttgatgattttttttttgtgtgaaatgtttagtgtttaatatagagtaagatgtttataatgattgtcgtttgttgtttcgcgtattgttttgatttgtgagtgttgttgattgtgggtgagcggttggtgaggttgggttttggatggtttttggatgtttttttttttttttatttttaggttcgtggagttatcgtagcgtttttattatttgtggttttattttttttagttgtagtttttagtagttagttatagtttgaaaatattaaagagaaaattttagaaataatttataatttgatattgtatgttattttgagtagggtgatgaaattatgtagcgatgatcgtgatttatttttttgtttagcgttttcgcgttgtaggcgttttcgttcgtgagttattttgtagtttttttggtgattagagagaaaaagtttaatttatagagggtttcgtattattcgcggttttaggaatttacggggggtgtcggagggtaggggttattgtaattttttgtttttcgtgaggtttgtattaggtagttttttgtcggtggtttggttcgggtttttgagattgtttttgaaagggaaagggattttgggtttttgggaattgtttaggaggtagggtagagggatttttagaagttgtagtaagtagttgtattattagttacgaggttgagaattaaggggaggaaggtgagttgttagttgtatggggttatatttgggtggggggatagagatagagtagtatagtttttgttagtaaggttgttaacgaagatttaggtagagagtaatttggggtgagtttataaggtggcggttagttatttatttttttatatttcgtggttatttttaggtgagttgagcgaagtttttggtttcgttatattttttaaggtaaaggtagttttcgttattatttttttgtttttatttgtttagaaatttttagtaggtatttttttttttttttaggaggaatggaatgggattttttgttttgttatcgtaggatttcggcgaggtttgtttaggggttttggtgagagaaaagcgtgataggaagcgtatgttagtaggtatttggagatgtatttttggtgatatgtataggtacggtagtcgttttatttattataggttttcgttcgggatagcggggtatacgtataatatagacgaggtttagagatgtagagatttttaataaattttttttatgttagggagataggagatttagttgggaatgagtttatattatgaagttttttttttaggagtttatatcggagtttaggagttttgttttattttagggttttcgtatttattattttttggcgggagtgagtgttttagtatagggttttataggtaggatttttgatattttttaaattttagagaggttttttcgattttatttatatgattttattttagtgatttgttttatttttttatagtcgtttttatttttaaattgtttttttttttgataggattttgttttgttatttagtttggagtgtagtggtgtaattatgtatggtttattgtagttttgattttttaggtttaagcggatttttttattttagttttttaagtagttgggattataggtacgcgttattatatttagttaatttttaaattttttgtagagataggttttattaggttgttttaaatttttgggtttaagttattttttcgtattagttttttaaagtgttgagattatagacgtgagttattatatacggtaggtaaggaagggttgaggggttgttaatagtaaaggtttagtttttagttaagttaggttgttcgtgagaaaggttttttgtgtatttgggtatatgtggataggtacgggtgtgatgttagtttttatttgtagtttgtaggtgtgtttgtggtattgggtgtttatgtgtgtgttttgagtttgggggaagatagatagattatttttaggggtttttgttttttgcgttttgttattttggttatatttagaattcggtatagagttttggataagtagttaggttcggttaggatattttagattagtaaatttttttttttttgggttggtaggtagcggggttttaggtttagtttaagggatggggaagggaggggataggttgggatttttgtttagttagtatttttattaggacgagatttaattatggagattgataagaggtagtatttaggagatta

SEQ ID NO: 1849 - DNA, 2460 bp, Artificial Sequence
  chemically treated genomic DNA (Homo sapiens)
tggttttttgggtgttgttttttgttagtttttatggttagatttcgttttggtggggatgttgattgggtaggggttttagtttgtttttttttttttttattttttaggttgggtttggagtttcgttgtttattagtttagaaaggaaagggtttgttggtttgagatgttttggtcgagtttggttgtttgtttagggttttgtatcgagttttgggtatggttaggatgataggacgtaaagaataaaggtttttaggggtagtttgtttgtttttttttaggtttaggatatatatataggtatttagtattatagatatatttgtaggttgtaagtggaggttggtattatattcgtatttatttatatgtgtttaagtgtatagaaagttttttttacgggtagtttggtttgattgggggttgagtttttgttgttgatagttttttagtttttttttgtttgtcgtgtgtggtggtttacgtttgtaattttagtattttgggagattgatacgggaggatggtttgagtttaggagtttgagataatttagtgagatttgtttttataaaagatttaaaagttagttgggtatggtggcgcgtgtttatagttttagttatttgggaggttgaggtgggaggattcgtttgagtttgggaggttaaggttgtagtgagttatgtatgattgtattattgtattttaggttgggtgatagagtaagattttgttaagaaaaaaggtagtttagaagtgaagacggttgtgaggaaataaaataggttattgggatggagttatgtgggtggggtcggggaggtttttttgagatttgaaaggtattaagggttttgtttgtggagttttgtgttggaatatttattttcgttagggaatggtgagtgcgaaggttttggggtgggataaggtttttgggtttcggtatgagtttttgagggaggggttttatgatatgggtttatttttagttggattttttgtttttttagtatggagaaggtttgttgggggtttttgtatttttgggtttcgtttgtattgtgcgtgtgtttcgttgtttcgagcggaggtttgtggtgggtggggcggttgtcgtgtttgtgtatgttattaagggtatatttttaagtgtttgttggtatgcgttttttgttacgttttttttttattagaatttttagataggtttcgtcggaattttgcggtgatagaataagaagttttattttattttttttgaaaaaaagaaaaaatatttgttgggaatttttgagtaagtgggaatagggaggtggtggcgggagttgtttttgttttaaaaggtgtgacggagttagggatttcgtttagtttatttggggatggttacggggtgtagaggggtgagtggttggtcgttattttgtgggtttattttaaattgttttttgtttagattttcgttgatagttttgttggtaggggttgtgttgttttgtttttgtttttttatttagatgtagttttatgtagttggtagtttatttttttttttttggtttttaatttcgtagttgataatgtagttatttgttgtaatttttgggggtttttttgttttgttttttgggtagtttttaggagtttaaagttttttttttttttaggagtagttttaggagttcgggttaggttatcgataggagattgtttgatgtaaattttacgggaggtaggaaattatagtagtttttatttttcgatatttttcgtggatttttgaaatcgcggatagtacggaattttttgtggattaggttttttttttttgattattaagagggttataaagtgatttacgggcgggaacgtttgtagcgcggagacgttggatagaggaatgagttacgattatcgttgtatgattttattattttgtttagaatggtatgtaatgttaaattatgaattatttttgaaattttttttttaatatttttaggttgtggttgattgttggaaattgtaattaaggaaagtgaaattatagataatgggggcgttgcggtaattttacgggtttgagagtgagggaggaagggagtatttaggaattatttagagtttaattttattagtcgtttatttataattagtagtatttataggttaaggtagtgcgcgggatagtaggcggtaattattgtgagtattttgttttgtattaggtattgagtattttatatagagaaaaagttattaggtttattttttgaggtaggttttgttatgattatattttatagtaagaaattggggtttgtggatgaataatttgtttagggatgttgtatgattggtggggttgggacgtgagtttaggtatttttttatttttattttaggttattaggggtcggtaaagttaatgaatgttgttttaagggt

SEQ ID NO: 1850 - DNA, 2300 bp, Artificial Sequence
  chemically treated genomic DNA (Homo sapiens)
tttttgttatggggttatggttggtagaggtagtttttttgaatttagggtttgttaggttgatggaggaagttattgtaggataagggggtgatgtattattatggggtagggttatatgattttaaagttgtatttagttttattttagtggtttataggtgggttgtagtaggataatgtttaattttgttaggttagggagggtaaaattttatgtaggttaggttaggttaggaaggagaatagagttatatttattaagggtaggaggatttaggggagtttataaaggttagatgggtgtaggaggtatagttagttatgttttgtagggtgagtagagtatggataggttagagggttatgaggttaggttttggaggttagtagaaggtatgttggggttttttgttttttatatgtatgtttgagttatagtttttagagttatagttttaaatagacggttttgtttttagtggtggtgatttgagtgttaggatgtcgttttgtttatttgtttgtattttaggttgtaagagtgtaggtatcgttgtgatataggttttcgaggttattaggtaagtattagggtttaggttgggtattaggttagaggataagattgggtttttggtttggtaatatttttttttattgttttttttgtagttgattttttagatttaaatatgaggtttttttttaggtttggtttttttttattaattttagttggttagggttttgattttgtaatcgtttgtggttttttagtttttcgttttgttttgttttttatttttgagagttgtaggtttttggtttaggaataaatttacgatgtagtttttgttttatttgttggtttattagtattatattgttagtattatattgttttatgttgggttttttgattttttttatagtttttttgttttataaagattataggatgggtatttattattttttaagttttattttttattagggtggagtttatgtgtagtgaaggtttagtttgcgttagggacgttgggatggagtgaggcggtaagtttaggtgttttttacgttttgaagttttttgtttgagttcggaagtgaggtatgtggttggtgttttttgtaggtttttttgatttttgttagatagggtttagttaagaaataagattaggaaattaggcgtttatatagagattttgttattatttgaggtttattattttttcggtgtttattaaatattagttagtgtggtttttatggtttgttttaaggaatagaggaaattaggaagtttgagtttgaaatgtttgtaaagtaaggggagttttgggtataagtaggggtttgagttgagggaagggtttatattcgggagatgtttgtttgttttgatgaggttgtcgtagtggcggaattttgataagagtgtattgtgaggtatcgtgtttatttttagttgttttgtgagataagtatttgagtttttatgatttttaagttaggaataggaggtttaaagaggtgtttagggtttttaaggtttattgagaggtattagtagggaagtagtttagatattatggaaggggtttttagtgtattgggatagtttgatttattttaggatttacgggggttatagttaggagtgttttatggcgttggataagaagagtggttgttttggttttggagagagggggtttacgtggtttatcggttttttttattgttgttagttgagttttttttatatataggtgttttgtagaggattagtttggtttagatttgaggttttagatgattagtatacgtgaattgttttcgtattagtgaggtggtttttttgtttttttttttatttaaattttattgtttgtttaggaggtgatgggttaagttgggtattaaaattattttaattgttatttttaagtgatttattagggtttagagaggtagatttaggtttagtatttattttgtgtttgtttttttatttttgaatttttaggtttatattttgttggtggttagattacgttttttttaatttcggaggaagttttttattttaaaaggattttgttatttttgtttggttttatttttgtagttttaggatttttattttaagttttattatttggtatgagagttgatgtggatttagggcgcgtttagtaagtgtttgtttagtaaattaataatacgtgttaatggttatatttgttatttaattgatgtaaaatttggggttagaagtatagttttta

SEQ ID NO: 1851 - DNA, 2300 bp, Artificial Sequence
  chemically treated genomic DNA (Homo sapiens)
tgggggttatgtttttgattttaaattttgtattagttaaataatagatatgattattagtacgtattattaatttattgagtaaatatttgttgagcgcgttttgagtttatattagtttttatgttaggtgatggagtttgaggtgggagttttggggttgtaggaatagagttaggtagggatggtagggtttttttggggtagggggtttttttcggggttgggaagggcgtgatttggttattagtagggtatggatttgggggtttaagggtgaggggataagtatagagtgggtgttaggtttgggtttgtttttttgagttttgatgggttatttggggatgatagttgagatggttttaatatttagtttagtttattattttttgggtaggtagtggaatttaggtaagaggaggagtaggagggttattttattgatgcggaaatagtttacgtgtattggttatttgaagttttagatttaaattagattggttttttgtagggtatttgtgtgtagggagagtttagttggtagtagtgggaggggtcgatagattacgtggattttttttttttaaggttaaggtagttattttttttgtttaacgttatgaaatatttttgattgtggttttcgtgagttttggggtgagttaagttgttttaatgtattaggagttttttttatggtgtttaaattgtttttttgttgatgttttttagtggattttggggattttggatatttttttgagttttttgtttttgatttagaggttatggaaatttaggtatttattttataaggtagttggaggtgggtacggtgttttatagtatatttttattaggatttcgttattgcggtagttttattaggatagataaatatttttcgagtgtgggttttttttttagtttaggtttttgtttgtgtttaggattttttttgttttgtaggtattttaggtttaggttttttggttttttttattttttgagataaattatgggaattatattgattaatatttagtgggtatcgaggagatgatgggttttaaataataataaaatttttgtgtagacgtttggttttttggttttgttttttggttgggttttgtttggtaggagttaggaaagtttgtaggaggtattaattatatattttattttcgggtttagataggaagttttagagcgtgggaagtatttgagtttgtcgttttattttattttagcgtttttgacgtaggttgagtttttattgtatatgggttttattttagtaggaggtgaagtttaggagatggtgggtgtttattttgtaatttttatagaataggaaggttataaagaaggttagagggtttagtatgggatagtgtggtgttggtagtgtggtgttgatggattagtaagtgaggtaggagttgtatcgtgggtttgtttttagattagaggtttgtagtttttagagatgggggataagatagagcgggaggttgaagaattatagacggttataaagttaggattttgattagttgaagttgatgagaggaggttaaatttagagaagagttttatatttgggtttgaaagattaattgtagaggaggtagtggggaaaggtgttgttaggttagaagtttagttttgttttttgatttagtgtttagtttgggttttggtgtttgtttggtgatttcgggagtttgtgttatagcggtgtttgtatttttgtagtttggagtgtagataggtgggtaaagcggtattttgatatttaaattattattattgaaaatagagtcgtttatttgaagttgtagttttggaaattgtgatttaagtatgtatatgggaagtaagaagttttagtatgttttttgttggtttttagggtttggttttatagttttttgatttgtttatgttttgtttattttgtaaaatatgattggttgtgttttttgtatttatttggtttttgtgggtttttttgggtttttttgtttttggtggatgtggttttgtttttttttttggtttggtttggtttgtatggggttttgttttttttggtttggtagggttaaatattgttttgttgtagtttatttgtgggttattggggtagagttggatgtagttttggagttatgtggttttgttttatggtagtgtattatttttttgttttgtagtgattttttttattagtttgatagattttggatttagaggagttgtttttgttaattatgattttatggtaaggg

SEQ ID NO: 1852 - DNA, 2300 bp, Artificial Sequence
  chemically treated genomic DNA (Homo sapiens)
ggtgtaaggttggggtattagggataaataatttagatatgttagtgtgttgatttgtaaagtacgttagaaggtagttgaggttttagttttagttatagcgtattttaaggttagagtaaaaagttggttggttttttaggtttttttttgtaaggcggttgggttaaaattaaagattttgttgtataatataggtttgttatttttttggtggtggtattagggattaataagattagtatttttagttatattagttagttttattatagttattttataggatggtattttataaattattaagatgggttagaattgattatgagaagtaagttattgatgtttacgtgatgtataagttatagttagtgaagtagtattgataggtatagaaattttattttttattacgggggtttttttttatttttagggagttatttttagaattttatttttttgttgattttagtgcggtgatggtagtttttttgtttagcgcgtgttatagagaaggttatacgagtaggatgttatgttttaatataggttattttgcgtaggtttcggtgggttttgcggggtagttttttggtgtgttaacgattggtgatttttggaatggatatatattattttattttagcgtttagtattttttattgatttttttttgttatttagtaattattaattatggttgggttatttgagggagtgataagattattttatgtgtattatttataggttttttttgttaagttggataggttttgggggtgttattttgaatttaattttgaatgggtgttttttaaggtatttattagtttaagtttttttatttatagggattgattaatataattttaagtttttttttgtagttattagtaggttataaagagtaaagggtttaggaacgtgttaagaagttgttttttggtttttcgttattttagttatttttgattataaggttgtttttagaaggaaggtagtagagaatggttttatattgttcgattcgggcgttgtatttagcgtttattttgagttttattaacgaatagttgggtttgaaattattttttttttaggtttgtatagtaatttaagttatcgtaaagtttatttttgtagtttttgtttttggttatttcgatgacgtcgattattttattttgtttaaatatttggtttataggtatttgttgtttaagtttttcgcgggtttagtttagtttttcggttatagtgttttcgtttatttggatttttattaggtgggtttttttttggcgtagaggaagtaggcgtatttaggagaaggtagatatagtttagttttagttgttagcgttttttttatagtagaggaattgtagttttatgcggtttgattgatgttaagtatacggtaaaaagttagtaattttgaataagttattgaattttattaagaggaaggaatttttatttttgttaatagtaataatttaattttggatattggtgtttgagttattgttaggatgagcggataagatttatattataggtaaataattagattttagtttttattagtttaatgtttttgtggttgttttttgggttagttttttttggggtattgtagtggttttattttagttatttatatttgttttagtgataagtttgtttttgagagagtataagttttaagtaagaaaatgtattatcgggagcggtggtttatatttgtaattttagtattttgggaggtcgaggtaggtggattatttgaggttaggagtttaaaattagtttgattaatatggagaaatttcgtttttattaaaaatataaaattagtagggcgtggtggcgtatgtttgtaattttagttatttaggaggttgaggtaggagaatagtttgaatttagaaagtggaggttgtagtgagttgagatagggttattgtattttagtttgggtaataagaacgaaattttgtttttaaaaaaaaaaaaatgtatttaagtataaagtttttatttaaggatagtttggtaatgttttgataaaattttaacggtggatatgtatttttattcgtggtggtttttattatatggggttgtatttagtatttgagattagttaggataattagtaataggatagtaagaggtatttattttaattaagttaataaaaagtttgtttagtttattaattaggtttttaggagagtagttagtattttataatcgatttttaggtaggtattttagtgttattg

SEQ ID NO: 1853 - DNA, 2300 bp, Artificial Sequence
  chemically treated genomic DNA (Homo sapiens)
tagtaatattgaaatgtttgtttgaaagtcggttgtgaggtattggttgtttttttggaaatttagttgatgagttgagtaggttttttattgatttggttagagtgggtgttttttgttgttttgttattggttattttggttgattttaagtgttgagtgtaattttatgtggtgagggttattacggatgagagtgtatgtttatcgttgaaattttgttaggatattgttaggttgtttttgagtgaaagttttatgtttaaatgtatttttttttttttagagatagaatttcgtttttgttgtttaggttagagtgtaatagttttattttagtttattgtaatttttattttttaggtttaagttatttttttgttttagttttttgagtagttgggattataggtatgcgttattacgttttattaattttgtatttttagtagagacggggtttttttatgttggttaggttggttttgaatttttgattttaggtgatttatttgtttcggttttttaaagtgttgggattataggtgtgagttatcgttttcggtgatgtatttttttatttagagtttgtgtttttttaaaagtaggtttgttattagggtaagtgtaggtggttgaggtaaaattattgtagtattttaaaaggaattgatttaaaggatagttataggaatattgggttggtaggggttgggatttggttgtttgtttgtggtgtgggttttgttcgtttattttgatagtaatttaggtattagtatttaaagttaagttgttgttgttggtaaaaatgaaagttttttttttttggtgaggtttagtgatttgtttagagttattggttttttgtcgtgtgtttgatattaattaggtcgtatggagttgtagtttttttgttgtgggaggagcgttggtagttggagttgagttgtgtttatttttttttagatgcgtttgttttttttgcgttagaagaaggtttatttgatggagatttaggtgaacggaggtattgtggtcgagaagttggattgggttcgcgagaggtttgagtagtaggtatttgtgaattaagtgtttgggtaggatgagatgatcgacgttatcggggtgattaagggtaaaggttataaaggtgagttttgcggtggtttgagttgttgtgtaaatttgggggagaagtggttttaggtttagttgttcgttgatgaggtttagagtgagcgttgggtatagcgttcgaatcggatagtgtagaattattttttattgttttttttttgagaatagttttgtggttagaagtggttgggatagcggagggttaggggataattttttaatacgtttttggattttttgttttttgtagtttattgataattgtaaaggggagtttggaattatgttagttagtttttgtgaatgggggagtttaaattaatggatgttttaaaaagtatttatttagaattgagtttagggtgatatttttagagtttatttagtttgataggggagatttgtgggtaatgtatatgaaataattttattatttttttagatgatttagttatggttggtaattgttgagtagtaggaaggggttagtgggaggtgttgggcgttgaggtgaagtaatgtgtatttattttaggggttattagtcgttggtatattaagaagttgtttcgtaagatttatcgaggtttgcgtaaggtggtttgtattggggtatggtattttgttcgtgtagttttttttgtggtacgcgttgggtagaaaggttattattatcgtattgagattaataagaaggtgaggttttgagagtggttttttgggggtgggaagaggttttcgtgatggggagtggggtttttgtgtttgttagtgttgttttattgattgtagtttatgtattacgtggatattagtggtttgttttttatggttagttttggtttattttgatgatttgtaaggtgttattttgtagagtggttgtggtggggttgattggtgtggttggggatattagttttattggtttttgatgttattattaggggggtgataggtttgtgttgtatagtaggatttttagttttagtttagtcgttttatagaaaggaatttggagggttagttagttttttgttttgattttgggatacgttgtgattgggattgaggttttagttgttttttagcgtgttttgtaggttagtatattggtatgtttgggttatttgtttttaatgttttagttttatatt

SEQ ID NO: 1854 - DNA, 2487 bp, Artificial Sequence
  chemically treated genomic DNA (Homo sapiens)
ataaaaataaaaataaatagaagatattgataatagttgattttattttttattttaaaagtggtgattttatataatttaatttaatattaaggtatttttgttatattgtattagtttttaaatattatattttttattttatttttatttttaagttattattattataataattaagagaaggtaaatataggttagagatttgatttttgttttttgtatgtatttatttttgtagatttataaataatttatattttgtagttttaaggtttttaattatattagattttgttttttattttatttagagttattgtttttgttgtttgttttttatatgtgataagttaattttttatgttattttttttataatttttatgtaaatttattatttttatttttatttattttttagagatgtatgattgtagaaaattttttttttttgaaatattgtttaatagagattaaatttaatatttagttttatttgtttatttttgaattataggttattgagaagttagaatagatagttatagaagtattttattaaatttatttttttattttttttaatatttgataaatatttattaagtatttattttgagtaagtattggagtaagtttttttataaatatgaagttgtgtaaataaggatgtatgtatttatgtaaatataagtttaatgttggatatatattgttttaagtgtttgatatgtattagtttatttatttttatttaaggggataagtgttattgttgtttttattttaaagatgaggaaattgaggttagagagattatacgaatttttaaaattttaatttttaattatagtatttagaatttatttggttgtagtggaggatttaatgttaaaaaagtaagtgttttttttagattatgaatataatgtgtgataaattagtagtttttttttttgttttaagatagtaaatatttatttaggttaatttgtgtttgttagagaataaagagtgggtttgttatattgtttttttttaagagggtttatttgttttcgtttttttggtatacgttaggggatatatattgtttagtatatttttgtagagttatattttattttatattttattataattttgttgaatgttaggtattattaagaaaatgtttatttatttttttttcgttatgtttaatgtgtgaattgataatatatttaaatttaaagaaaattaatagatattattttaattaatttgaaaagtttggtgatttatttttattttttttacggggtttttgttgggttgtttggtttttcggaattagtttttaggttttttgtagtcggggtgtagtttagtgttcgagttttttttttgttgtttattagatgagtgttgattttttttggtataggtatttgagttgtatttgaattgtagaatatgttgtttttattttgtgttgattgtgattttattttatgtgttttagaggtaggttaaataagtttgttttggaaaaaataatagggaagaagatgttgattttttaatttttagagtaagtttcgttattttggaggtaaagttataatatttaaatatggttcgatttatgttaggttttataaatatatatatatacgtggatgttgaaatcgtgtatgttttgatagttaaaaaaaaagttaaaacgatttattgttttattagtaggataagatttgataggttagtttattagaataaagaatataaaaaatgggtatttaatttttttatatagatatatatatatatatatatatatatatatatatatatatatatataatttgatgtaacgattttaagagagttggttgttttggtaatgaagaatcgtttgtatatttaaggatttttttgtttaaatttaagttagttatttgaatttttcgagtttttttgagtttagttttaggtttttatttttagatagaggtttgatatttatgttagtttttagtaaggtaggaagtttagaagtcggattaaaattttataagttagttagtttggatttgaattttagttttatggttttttagttgtgtgatttgggttagttgtttaattattttgaatttttatttttttatttgtataatgggaataataaaattaaaataaatttgtatgggtttattatgaaaattagattgattgatgatataatatatagtaagtatttagagttgtgtttgatttcgaatgtgagttatttgtaatagtgatttgaaatgggtttatattgtttggtaggaaattatttaatttttttttgtttttgattttaatttttgaagcgtttttattttatttttttttattttgtgtttgtggagaaggaggatgtttagttatttttggagtataattttttattaaaaattattattaagtttttttaagttttttttttgtagtaaa

SEQ ID NO: 1855 - DNA, 2487 bp, Artificial Sequence
  chemically treated genomic DNA (Homo sapiens)
tttattataaaagagaaatttgaagagatttaataatggtttttaataaaagattgtattttaaggatggttaaatattttttttttttataaatataaaataagaagaaatgagatgaaagcgttttaaagattaaagttaaaaataaaaaggaattgaatggttttttgttaggtagtgtaaatttattttaagttattattatagataatttatattcggaattaggtatagttttaaatgtttgttatgtattatgttattaattaatttaatttttataatgaatttatgtaagtttgttttaattttattatttttattgtataggtgaggaaatagaggtttaaggtggttaagtagttaatttaggttatatagttgagaaattatagagttgaaatttaaatttaggttggttggtttgtgaggttttggttcgatttttaagttttttgttttgttagaggttgatatagatgttagatttttgtttggggatggaggtttgaagttaagtttaagaaagttcgagaagtttaagtggttagtttaaatttaaataagaaaatttttgaatatataaacgattttttattgttagggtaattagtttttttgaggtcgttatattagattgtgtgtgtgtgtgtgtgtgtgtgtgtgtgtgtgtgtgtgtgtgtgtttgtgtagagaagttaaatatttattttttgtattttttattttggtgagttggtttattaggttttgttttgttaatgagatagtaagtcgttttgattttttttttggttgttagggtatgtacggttttagtatttacgtgtgtgtgtgtatttataagatttgatatgaatcgagttatatttagatattatgattttatttttagagtgacggaatttattttgggggttggagagttagtatttttttttttgttattttttttaaggtaagtttgtttagtttgtttttggggtatatgaagtggggttatagttagtatagaatgggggtagtatgttttgtaatttaaatgtaatttaaatgtttgtgttaaagaaagttaatatttatttgatgggtagtagagagggggttcgaatattgagttgtatttcggttgtaggaggtttggaggttggtttcggagaattaggtagtttagtaggagtttcgtgagaagggtgggaatgagttattagattttttaggttgattgaggtgatgtttgttgattttttttgaatttagatgtgttattagtttatatattgggtataacgggaagaagatgagtgaatatttttttgatagtgtttgatatttagtagggttgtgataagatgtggggtaagatatgattttgtaagaatatgttggatagtgtgtgttttttagcgtgtattaaaggagcggaggtagatggatttttttgggagaaaatagtgtgataagtttattttttgttttttgatagatataagttggtttgggtggatatttattattttagggtaaggggaagaattgttaatttgttatatattgtgtttatggtttgggaaaagtatttgtttttttgatattgggttttttattataattagatagattttgaatgttgtggttaagagttagggttttaggagttcgtataatttttttggttttagtttttttatttttaagatggaaataataatggtatttatttttttagataggaataaatagattaatatatattaggtatttaaaataatatatatttagtattaaatttgtatttatatgaatgtatgtatttttatttatataattttatatttatgggaggatttattttaatgtttgtttaagatagatgtttagtaaatatttgttaaatattgaaggagatagaagaatggatttagtggggtatttttatggttatttgttttgattttttagtaatttgtaatttaaggatagataggtaaaattgggtgttagatttaatttttattgagtaatattttaaaaaaggggagttttttgtaattatatatttttgaagaatagatggaaatggagatgatgagtttgtatgaagattgtgaaggaaatggtatgaagaattgatttgttatatgtgaaggataggtagtaaggataatgattttaaataaaataaaaaatagggtttaatataattagaaattttaaaattgtaaaatataagttatttgtgaatttataaaaataaatatatataaaaaataggagttaaatttttgatttgtatttatttttttttggttgttgtaataatgatagtttagaaatagaagtaaaatgaaaagtataatgtttaggagttggtatagtatgataagaatattttaatattagattaaattatataaaattattatttttggggtaaaaaatagggttagttattgttaatattttttatttatttttatttttat

SEQ ID NO: 1856 - DNA, 2435 bp, Artificial Sequence
  chemically treated genomic DNA (Homo sapiens)
tatgtaaaaatatgatgataaaatagtaaagtattgttgtgtgtttgagttgttggatagggatgatttagttaagaagatagcgagagaattttttagaaatatgtttttattatttgtatatagagatatgattgtttttttttaaagtattattatttgggagagggagttttggggggtgatgggaggttttgagttatagtttttatatattatatgggtaggaaggcgtaaggtgtattttggtgtatagatacggtgattgggtcgttaggtttttaagagaagagatgaacgagtttggggggtagatggaggtattagttgagggttagaggttggattttgggatttagaggggagggatagagttgaatgttttatttggggttattttggataatcgtgttttgggtaaagttaaggaaggcggtatagaagtttatgtatatagagggattttagtcgttacggttattttggagtaggtagaggaggaggtagaagatgggtagtgggggtggtgggaggagagaaggtaggttgttgttttggatgttagatttgtggttttggtgtttggggatacgggtgggagttgtaatatcgtttttttattttgatatatttaaatatttttatggtaggaaaggttttgagggaagagataaaatcgtttgggttacggaagttagtaataatattcgggatttttgggaggaatgattgagtttattattttaggagtttgtgtttgataggaaaagtaagggattagtgggatttttcgtgtattttttattttgtttttatttttttttttaagttttttttttagtttttaagtttaagttttcgttttgtttatttcgattttgaatttgtagaaatttttttattggttagggttgtgtatttttttggaggttttgagttttatatagtaggttgggggttgtgtggatggggtttgggggtttgtgtagtttattttttttgagaagagtagagggtggttttttaggcggttgcgtagtatagagtagaaggttacgttggtgttaatttttttagaggggtttggggagtttttaggtttgtttgtataaggagagaagtagtagtaggcgtggcgggtttttaatttttgggaaggggaagggggttatgaagtaggggtaatttatttgtatatatgtattgtttaaatttgtattttatgtatataagttttcggaggagcggtggtcgagtaagtttttgggttcgagcgttcggtgtttttattttatttaggtatagtgttttttggaatcgggaggttgttagttgttagtttttttgtcgtttatacggtgtcgttagtagttttgttaggtgttttcgttacgttattatggtttttgttagttagtttggatttttgagaggtaggagttataggttgaaggtttgatataagtattagtgagatgtttttttcgaagaatagttttgttttttttaaggattgatttttatttcggttttggtttttttaattttagagggtaggtacgggtttttagatatattgtttattacgttttgtttatttttttaatcggtttcggtgttttaggagttagtatagtaggtggtttagttttttttggattttttcgtttcggggttggtatcgattcgggtattcgtttttgaggttaaagttggggtttggatcgttagtggggggtgggttatagtagcgtagggttcgggtatttttatggtattggcgttgagtatttagggagaagtagtttagtttcgaagggcgtcggtagaaaggaaagggtttagagtagagggtagggtttgtgggtagagaaggtgttggacgaggtagtttgtttcgaggtttagttatttttgtttttttagttttttttttggtttttttgggatttatgaggttttaagataagtaggggtatagagtttttattttatagaggaggtttggagaaggatgattggtttaggattaagcgagttatttgatcgttaggttttggttttgaaatatttaggttttttagacgttatcgcggttaagtttttattttgtttttttttttgttttttatttattttttttttaggttttttaaatgtagtgaggttaggaaggacgtttgcgtttagattaagaatttagttattttaaagttttttaatttttattttcgtagagttatgacgttatggtaggtacgttagaggtcgaaggatgtaaaagtggttttttgttttcgatgatgtaattatttagcgatagtggcgggtaaatttttttcggggcgggggaggtgtgagttttacgaaggaggttgatattaacgtggttatcggcgtttttttacgtcgttaacgagttttcgggcgtgcgt

SEQ ID NO: 1857 - DNA, 2435 bp, Artificial Sequence
  chemically treated genomic DNA (Homo sapiens)
acgtacgttcggggattcgttggcggcgtggaggggcgtcggtggttacgttggtgttaatttttttcgtgaagtttatatttttttcgtttcgggaggggtttgttcgttattgtcgttgaatgattgtattatcgaaagtagaaaattatttttgtatttttcggtttttggcgtgtttgttatgacgttatagttttgcggaggtggaagttggggagttttgaggtaattggatttttgatttgagcgtagacgttttttttaattttattgtatttggaggatttggagggagggtgggtgaagggtaaggaaagaggtaggatgagagtttggtcgcggtggcgtttgaggggtttgaatgttttaaggttagagtttggcgattaggtggttcgtttagttttaaattagttatttttttttaggttttttttgtagaatggaaattttgtatttttgtttgttttaggattttatggattttagggggattaagagaggagttgagaagatagaggtagttgagtttcggaataaattatttcgtttagtattttttttgtttatagattttgttttttattttgggtttttttttttttatcggcgtttttcggaattgggttgtttttttttggatgtttaacgttagtattatggagatgttcgagttttgcgttattatagtttattttttattaacggtttaggttttaattttgattttagagacggatattcggatcgatattagtttcgggacgaggaggtttaggaaaggttggattatttgttgtgttggtttttggaatatcgaggtcggttggaggggtgagtaaagcgtggtaggtagtatatttggagattcgtatttattttttaaaattaggagagttaaagtcggggtgagaattagtttttagaagaaataagattatttttcgaggggagtattttattaatgtttgtgttagatttttagtttgtaatttttgttttttaggggtttaggttggttggtagaggttatagtgacgtggcgggggtatttgataaaattgttgacgatatcgtatgagcggtaggagggttggtagttggtagtttttcggttttagggaatattatatttgagtgaagtggagatatcgaacgttcgggtttagaggtttgttcggttatcgttttttcgggagtttatgtatatgggatataaatttgagtagtatatgtgtgtaggtgagttgtttttgttttatagttttttttttttttttagaggttgagagttcgttacgtttgttgttgtttttttttttgtgtagataaatttggaagttttttagatttttttggggaggttaatattaacgtggttttttgttttgtgttacgtagtcgtttgggaagttattttttgttttttttaggggaggtagattgtatagatttttaagttttatttatatagtttttaatttgttatgtggagtttaagatttttaaggagatgtatagttttggttaatggaggagtttttataggtttaggatcggggtgggtagggcgagagtttaggtttgaaggttgggaaagggatttggggaggagggtgaaggtagaatggagggtgtacgaggggttttattgattttttgttttttttgttagatataagtttttgaaatggtgggtttagttattttttttaggggtttcgaatgttgttgttggttttcgtaatttagacggttttgtttttttttttaagattttttttattatgaagatgtttgaatatgttagggtaagggaacgatgttgtagtttttattcgtatttttaaatattaagattataggtttagtatttagggtaatagtttgttttttttttttttattatttttattgtttattttttgtttttttttttgtttgttttagaatgatcgtgacggttggaatttttttgtgtgtatgaatttttgtgtcgttttttttagttttgtttagagtacggttgtttaggatgattttaggtgaggtatttagttttgttttttttttttggattttaggatttagtttttggtttttaattgatgtttttatttgttttttaggttcgtttatttttttttttgggagtttggcggtttagttatcgtgtttgtatattaagatgtattttacgtttttttgtttatatggtatgtggaagttatgatttaggattttttattattttttaagatttttttttttaaatagtaatgttttagagggaggtagttatatttttgtgtgtagataataaaagtatatttttaagaggttttttcgttgtttttttagttgagttatttttgtttagtaatttaagtatataatagtgttttgttgttttattattatgtttttatatg

SEQ ID NO: 1858 - DNA, 4136 bp, Artificial Sequence
  chemically treated genomic DNA (Homo sapiens)
ttttagagttttttttatggtttagtaaggtttgagggaagtttatttagatattagtaggttatgatttttgggtttttttttgttaaagtgttggtttaaggtttggttttagttgaatgtggttatatgtagggttagattttttttaagattttgggaatttaggtcgtttagatttttaggtagaaaagttagcgttttgatattttatttaaattttttttgcggttgtttttttagtttttttttattatttttttagtttttatgtttgttgttcgttttttttttttcgagttttaatatatagtgggtatttgaagattttttttttatttttttatttttattaatttattttttattcgaatttgggatttttattttcgtttttttttataatttaatttatttttttttgaaggaattattttggttttgatttttatttttattttttaatagtttgttttcgttttttgtacgttagtcggttttatttttttattattgtttttttagatattcgaggttttatttagttagttcgtgagttttaaggttgttttgatttttttatttgtttttttatttggtttttgtattttttttttttttggattttttgaatttttttaggattttcgtttagttttttttcgtttttaatcgatttttttcgaacgttttttattaatcgcgagagttttttattgcgttttggttatattttttacgtttcgttttcggtttcgtttttgtttttgatcgcgtttgcgtaaggcgggcgttttaaagttttattttattttgttgggaggagggggaaaggtgtacgtaggcgtagtggcgtttaaatttgggtttattaaatgcgtcggagtattttcgcgtttaggcggtttttttttattgcggtaattcgggaaaatttgtgaattaattagaaaaagtggaaggcgggagattttggggcgttgtttaatggcgcggaagagaataaatgagttggttaatcgggaacggtacgggggcgggttcgttcggcgcgaagttcgggttcgggaatttcgaaggaggggtaggcgttgttcgcgcgtagaggtcgcgttttttttggtttcggttttttggttgttaaatagatgtagtaacgtcggtttttgtcgaggagtttaaggggtttcgggattcgtcgtataggttggtattgtttgaagaggaggttattcggagattgcgtcgcgcgggtagattcgaaacggggttggggcggagtgggaaaaggtcgggtatgttttgtatgatcgcggggagtttttttttgtttttattttatttagagaagtcgggaagtaggggtttaggtttaatttgttggagtatttaaggattcgtttgtatttttttttgggggatgatagtggatttattgttttcggaggtttaattagttatgagtgagggattggttagaagatcggggcgtaggtaagtaggagtgttttattaggataagtaagtttgataggaagaagttgttttttttcgaattatatagaggtgatgtgttcgtattgtacgtagacgtgtgtataataggattttttttttcgcgtttcgttatttcgatatatataggagttgtttaaagtatttttgttttgtagattggaggttttttaaatattttgtgatttgaggatttagtttaagtgaggtgttataggacgtgtttttgagtttgtattgtacggagatttttttggaattttttatttgtaagtcggtttaattaattttgtattgagttttaggttgtttgtattttgaatttgggttatttaggtagtgtgtttaaagttgaaatcgtatatagtataatttaagtttgtattagattgggaagcgaatttaagttagcggtgcgtggtttaggagtgggaaaggaaatggatgtttgaagtggaagaggtggtgtagagggggtatcgtttatgttgttttgtttttaattgttgcgtatagggggcggtaggggcggtgatttttatattttttattttttcgtcggggttggttgtatttatcgtttgggttatagggtcgatttgtgtgatgtggttttgcggttttagtaggagtttggttttatttttgggatttacgtcgaattgtatgtcgagtttcggggtgatgattggagggttagtttggaagattatagtagttaaggtgagtattaagtagggtagttttgtttttgggtggttgaagcgttaggttggaatgagtaaggtttttataagattttgttgtttgttttttatatttttattagattggatggatagtcgtggtttagatttttatttttttattagaagtgtgtatagttagaagttttttgttagattgattttttttggtttcgtttagtttatataggatttgggatattattagaaagatattatagtggggatgttttgaggttattagaggttaagtttagatttgatttagtttttagttttgttgaggtattttgtttttgggttagggtagttttatgttgaataatgtttttaataatttgggtatgttttttttcgtgatttgaggtagttagttttagaaagtttagatttatatttgagttttgttattgttttttggtaaagttagttgtaggagtgttatggttattagattatagtagttaatatttatttagtgtttattgttatgagttaggttttattttaagtgtattgaatgtaggtggtattaatattatttttatttatagtaaaggaaaatgaggtataaagaggttaaggaatttgtttagggttgggtatggtggtttatatttataatttagtattttgggaggttaaggtagggtggattatttgagtttaggagttcgagattagtttgggtaatatggtgaaaatttgtttttattaaaaaattaattaattttttaaaaaaagtttgggcgcggtggtttacgtttgtaattttagtattttgggaggtcgagatgggtagattacgaggttaggagttcgagattattttgattaatatgttgaaattttatttgtgttgaaaaaaaaatataaaaattagttaggtgtggtggcgtgtatttgtaattttagttatttaggaggttgaagtagtagaattatttgaattcgggaggcggaggttgtagtgagttgagatcgtattattgtattttagtttgggcgatagagcgagattttattttaaataaataaataaattaaaagtttgtttagggttatataattggtaagtggtagagttaggatttgaacgagttggagttgggggagagtgagtatgtttgaaaattggattttagggcggggtacggtggtttacgtttgtaattttagtattttgggaggttgaggcgggtagattaggaggttaggagtatgagattagtttggttaatatggtaaaattttgtttttgttaaaaataaaaaaattagttagacgtggtggtatatgtttgtaattttagttatttaggaggttgaggtaggagaattgtttgaatttgggaggcggtttaagtttgggtaatagagtaaaattttattttaaaaaaaaaaaaaagaaagaaaaaaaaagaagaaagaaagaaaattggattttaggatagtgagggtagggattttttgtaggaaagtataagaaatatagatttgtttttagttgataaggagtgtattgtttggtatttgttatttgttgaggggtttaggatgtgagggagaatttgattatagttttatatttttttttagaaattatatagatttttttatttttgattttggttatttttgtttttgttttttatatttgtttggtgttttattattaataggtattttggttaataatgttcgatttttaagaggttataggttggaattgagtgatggagattttttgatttttggttttgaagggtttttaggaattagtttttcggagttttattttatgttttaataagtacgagttaagttttaggattttgttgttattattattttacggtttaggggagaagttcgg

SEQ ID NO: 1859 - DNA, 4136 bp, Artificial Sequence
  chemically treated genomic DNA (Homo sapiens)
tcgggttttttttttagatcgtgggatggtaatggtagtaaagttttgaggtttgattcgtatttgttggaatatgaagtagaatttcgaggggttggtttttgggggttttttagggttaaaggttaggaggtttttattatttaattttagtttgtgattttttgggagtcggatattattgattaaagtatttgttgatggtggggtattaggtaaatatggaggataaaaatagaaatgattagagttaggagtggagaaatttgtatgatttttggggaagaatatgaaattgtagttagatttttttttatattttaagttttttagtaggtgataggtattaggtagtatattttttgttagttaggaataagtttgtgttttttgtgtttttttataaaggatttttgtttttattgttttaaggtttaattttttttttttttttttttttttttttttttttttttttttttgagatggagttttgttttattgtttaagtttgaatcgttttttaggtttaagtaatttttttgttttagttttttgagtagttgggattataggtatgtgttattacgtttggttaatttttttatttttagtagagatagggttttattatgttggttaggttggttttatatttttgattttttgatttgttcgttttagttttttaaagtgttgggattataggcgtgagttatcgtgtttcgttttaaggtttagtttttaaatatgtttatttttttttagttttagttcgtttagattttagttttattatttattagttatgtgattttgggtaagtttttggtttgtttgtttgtttgagatggagtttcgttttgtcgtttaagttggagtgtagtggtgcgattttagtttattgtaattttcgtttttcgggtttaagtgattttgttgttttagttttttgagtagttggggttataggtgtacgttattatatttggttaatttttgtattttttttttagtatagatggggttttaatatgttggttaggatggtttcgaatttttgatttcgtgatttgtttatttcggttttttaaagtgttgggattataggcgtgagttatcgcgtttaggttttttttaaaaaattaattaattttttggtagagataggtttttattatgttgtttaggttggtttcgaatttttgagtttaagtgatttattttgttttagttttttaaagtgttggattataggtgtaaattattatgtttagttttggataagttttttaatttttttgtgttttatttttttttattgtaaatgaggataatattagtattatttatatttaatatatttaaaatagggtttggtttataatagtaagtattagatgaatgttggttattatagtttaataattataatatttttatagttgattttattaagaggtagtggtaaaatttaaatgtgaatttaggttttttgaggttaattgttttaagttacggagaaagatatgtttagattattaaaaatattatttaatatagaattgttttaatttaggaatagagtgttttagtaaagttggaaattgaattaagtttaaatttggtttttagtggttttagaatatttttattgtgatatttttttgatgatattttaggttttgtatgagttaaacgggattaaaaagggttagtttggtagagagtttttgattgtgtatatttttggtgggaagatgaaggtttggattacgattatttatttaatttgatgggagtatgggaggtaggtagtagggttttgtggagattttatttattttagtttggcgttttaattatttaggggtaaagttgttttgtttaatgtttattttggttgttgtggttttttaggttgattttttagttattatttcggggttcggtatgtagttcggcgtggattttagagatgaggttaggtttttgttggggtcgtagggttatattatataggtcggttttgtggtttaagcgataggtgtagttagtttcggcgggggggtggaaggtgtagagattatcgtttttgtcgttttttatgcgtagtagttggaagtagggtagtatgggcggtgttttttttgtattattttttttattttaggtatttatttttttttttatttttgggttacgtatcgttggtttaagttcgttttttagtttgatgtaaatttgagttgtgttgtatgcggttttaattttgagtatattatttgaatagtttaaatttagagtgtaagtagtttaggatttaatgtaaaattggttaagtcgatttgtaaatgaaaaattttaggaaggttttcgtgtaatgtaaatttaggaatacgttttatggtattttatttgagttggatttttagattataaaatatttggggagtttttaatttgtaaggtaaggatattttaggtagtttttgtgtgtgtcggggtggcggggcgcggggaaggaggttttgttatatatacgtttacgtgtaatacgaatatattatttttgtgtaattcggagaagagtagtttttttttgttaaatttgtttattttaatagagtatttttgtttgtttgcgtttcgattttttggttaattttttatttataattggttgaattttcgagggtaatgaatttattgttattttttaaaagaaagtgtaaacgagtttttaagtattttaataaattggatttaaatttttatttttcggtttttttaggtgggataaaaataggaaggagtttttcgcgattatgtaaggtatattcggtttttttttatttcgttttagtttcgtttcggatttattcgcgcggcgtagttttcgagtagttttttttttaagtagtgttagtttgtgcggcggatttcgggattttttgggtttttcggtaggagtcgacgttgttgtatttgtttgatagttaagaagtcggggttaggaggggcgcggtttttgcgcgcgggtagcgtttatttttttttcggaattttcgggttcgaatttcgcgtcgagcgagttcgttttcgtgtcgttttcgattggttagtttatttgttttttttcgcgttattggatagcgttttaagatttttcgttttttattttttttgattagtttataagttttttcgggttgtcgtagtgaggaggagtcgtttgggcgcggagatgtttcgacgtatttagtgggtttaaatttagacgttattgcgtttgcgtatatttttttttttttttttaatagagtgaaataggattttagggcgttcgttttgcgtaggcgcggttaggggtagaggcggggtcgggagcgaggcgtagggggtgtggttaaagcgtagtagggggttttcgcggttggtaagggacgttcgggaagagtcggttgggggcgggaaggggttgagcgggggttttgggagggtttaaggggtttaaaggggaagggggtataggggttaggtgaagggatagatgaagagattagaatagttttagagtttacgggttaattgggtgaagtttcgggtatttaggggagtagtggtgggagagtagagtcggttagcgtatagggggcgagggtaggttattgagagatgggggtgagggttaggattagaataatttttttagaaaaaggtagattaggttgtaaaaagggacgggagtagggattttagattcgggtaaaaaatagattaatgagggtgggagggtgggaggaagatttttaagtgtttattatgtgttaggattcgagaaagaggaggcgggtagtaggtatggaagttaaggggatagtagagagaagttgagagaatagtcgtaggaaagatttgaataagatgttaggacgttggtttttttgtttggggatttaggcggtttggatttttaaggttttggggagggtttagttttgtatgtggttatatttagttggggttaggttttgggttagtattttaatagggaaggatttaagagttatggtttgttggtgtttggatgggttttttttaggttttgttgagttatggagagaattttggag

SEQ ID NO: 1860 - DNA, 2460 bp, Artificial Sequence
  chemically treated genomic DNA (Homo sapiens)
cgcgggaattttcggatttatagcggggcgcggtcggggtaggtggggggtttaggcgaggaagttttttttgcgttttgggttgggcgaagggttttgcgatgcgacgggggtagttttagcgcgcgtttagtttttacgtcgttatcgagcggcgttttcgttttagttcggagtttcgtagggtcgtttttatttttgtttattttttcgcgggtcggggtagtttttcgttagttatttcgcgtttttaggaagagggatcggttattatttatttatgtttttttattttattttaatattttttgtaaagttatcgttcgcgtcgtatttgcgtggcggggggcggggtggggcggagttacgtcgcggagtcgtcgtaggtaaatagtttttttttcgcggcgggagcggggtcgtcggttttaggtagggatagtagtcgtcgttcgcgtttcgggtcgggatttcgtcgtcgttttcgtcggaggtacgcgttagggcgggggtcgggttgcggcggaggcgggcggtttcggtgtttttcgtcgtcgtttcggttcggttcgttcgttttttgatttcgggggcggcggcggagcgttttttaaatttcgttgcgggtttcgcgttcggttagtttcgtattcgtcgcgcgttttcggttatttttatttttcggagtttttcgttcggtttcggcgttttttgttattttttttcgcggttcgcggtttcgttttcgtttcgcgtttttacgtttttcgattttcgttttcgcgtcgcgcgttttttttcgttcgcgtttttttcgtcgggtttcgtttcgcgtttttcgtttcgttcgcgtttttcgtcgggtcgcgtttttcgttttttatgtattattttttggagtagtcggcggatatggcgatcgcgttgttggcgggagagaagttgcgggagttgattttgtcgggcgcgtaggacgataaggcgggcgcgttggtcgcgttgtttttgtagttgaagttggagttgtcgttcgatcgggtggttattatcggtatcgtgttggtgtttattttgttggttattttggtttttattaagaatttcgtaggtgaggtcggcggtcggggcgcggggcgcgggtagagggggcgttcgtaggtgttcgggagttggcgtttttcgcgttttcggcggtttcgtttagtcgcgtttatcgtggtttggttgcgttcgcggcgttttaggtattttttatagtcgtttttattttagtaggtgtcgttggtcgtatagatttttcgtttttattttattgttgtttttttttttattcgttcgtttatggtcgcgggtgggattaggtttgtttggatttaggggttttaaatgttatgagatacggggtttggtttggagaatgttataagtagcgtttgaggggatgtagggtggttaggtggggattaggaaaggtcgggatgggtgttgatagtagagagttgattataggggttggtggagttgtcgggtagggtttttaggttggatttgggtggaaggagggtagagagagtttttgagaggtttaggttttttattttttaggtagggcgaggttttttcgggtgtattgggggttttcgaaggtttgaagtaggggggttagtatggggtagggttacgtgttagagtagggagtttggagtttttgtagggagatgggggttggattagggtagggattcgcgttggttagattaggatttgtgggggtatttgaagttatttaggcgaggtaggaagatggatagagtagttagtttgtttgtgagtttttgcggggtggggttttggtgtttttgttttttttaaggagtggggcgagataggtggagtcgagaatttttttttttggggtttgggttaaggtaagggggattagggttttttggtttgtgtggtttagaggtattagtttgtagcggggaggggtgttgggattttggggtttttttttttgtagtttttaaattttagtagattttgttttagtattggcgttttttaaattttttagatgttttgttttaaggagttttcgtggtttggagatattaggtttgagggtggatattggttaggttgtttgattttatttaggggtggaggaggtttttgttggtttttttttcgatattggaggttagatttcggggattagaggatttttggggtgggtatatagtatattttgtagagtagggagtttaggcgtgcggtggggttttggggtaggtttagtatgtttagatattacgtgtgttttttgtgtttgtagtaattaagtatcgtaaattaggtagttttaaatagtagatatttattttttatggtttcggaggttaaaagtttaaaatcgaggtgtcggtagggttttgtttttttttatagttttaggaa

SEQ ID NO: 1861 - DNA, 2460 bp, Artificial Sequence
  chemically treated genomic DNA (Homo sapiens)
tttttagagttgtgggagggagtagggttttgtcgatatttcgattttggatttttggttttcggaattatgagagataaatgtttgttgtttgaaattgtttagtttgcggtatttggttgttataaatatagagaatatacgtggtgtttggatatgttgggtttgttttaaggttttatcgtacgtttgggttttttgttttgtagagtgtgttgtgtgtttattttaggggttttttaattttcggggtttggtttttagtgtcgaagaggagattagtagaggttttttttatttttgggtgggattagatagtttggttaatgtttatttttaggtttggtgtttttaggttacggggattttttaaggtaaggtatttgggagatttgggaagcgttagtgttgaggtagggtttgttgaggtttggaggttgtagaagagagggttttagggttttaatattttttttcgttgtagattagtatttttgggttatataggttaggagattttgattttttttgttttggtttagattttaggggaggaagttttcggttttatttgtttcgttttattttttggggagggtagaggtattaggattttatttcgtagaggtttataggtaggttggttgttttgtttatttttttgtttcgtttgggtggttttaagtgtttttataggttttgatttaattagcgcgggtttttgttttggtttagtttttatttttttgtaggagttttaggttttttgttttgatacgtggttttgttttatgttagtttttttgttttaaattttcggaggtttttagtgtattcggagaggtttcgttttgtttgaggggtggagggtttgggttttttagagattttttttgttttttttttatttaagtttagtttgggaattttgttcggtagttttattagtttttgtaattagttttttgttgttaatatttatttcggttttttttggtttttatttggttattttgtatttttttaggcgttgtttgtgatattttttaaattagatttcgtgttttatgatatttgggatttttgggtttagataggtttagttttattcgcggttatgggcggacgaatggaaggaagaataataataaaatagagacgaggggtttgtgcgattagcgatatttgttaggatgggggcggttgtggaaggtgtttgggacgtcgcggacgtagttaggttacggtgggcgcggttggacggagtcgtcggggacgcgggaagcgttagttttcggatatttgcggacgttttttttgttcgcgtttcgcgtttcggtcgtcggttttatttgcgaagtttttggtgaagattagggtgattagtaggatgggtattagtacggtgtcgatggtgattattcggtcgaacggtagttttagttttagttgtagaagtagcgcggttagcgcgttcgttttgtcgttttgcgcgttcggtaggattagttttcgtagtttttttttcgttagtagcgcggtcgttatgttcgtcgattgttttaggaggtggtgtatggggggcggggggcgcggttcggcggggggcgcgggcggggcggggggcgcggggcggggttcggcgaggggggcgcgggcgggaggggacgcgcggcgcgggggcggggatcggggagcgtgggggcgcgggacggggacggggtcgcgggtcgcgggagagggtggtaggggacgtcgggatcgagcggggggtttcgggggatgggagtagtcggaggcgcgcggcgggtgcggggttggtcgggcgcggagttcgtagcggggtttggggggcgtttcgtcgtcgttttcggggttagggggcgggcgggtcgggtcggggcggcggcggggggtatcggagtcgttcgttttcgtcgtagttcggttttcgttttggcgcgtgttttcggcgggggcggcggcgggatttcggttcggagcgcgggcggcggttgttgtttttgtttggggtcggcggtttcgttttcgtcgcggggagggggttgtttatttgcggcgatttcgcggcgtggtttcgttttatttcgtttttcgttacgtagatgcggcgcgggcgatgattttgtagaaaatattgaaatgaaatgaaaggatatgaatgagtaatgatcggtttttttttttgggaacgcggggtggttggcggggggttgtttcggttcgcgggagggtgggtaggggtgggggcggttttgcggggtttcgggttggggcgggggcgtcgttcggtggcgacgtgaggattgggcgcgcgttggggttgttttcgtcgtatcgtagggtttttcgtttagtttagggcgtagagggggttttttcgtttgggttttttatttgtttcggtcgcgtttcgttgtgggttcggaggttttcgcg

SEQ ID NO: 1862 - DNA, 2474 bp, Artificial Sequence
  chemically treated genomic DNA (Homo sapiens)
tatgggttaggtgagcggggtttggtcgagggtagtcgggtagggggtagtagggtgcggtagtttgtttatcggaattttttagggtgtattttaggggggttgtttatttgaagggaagtgaggacgagggtgtttaaaggtcgttttttttatttttatttttatttttatttttcgtttttcgggatcgttacgttttggagtgagtgtagtcggtttgttttttaaagttttttgtttcggtcgattagttgggtgagttttggaattggaatttggattgtttagtgtgttgattttataatttcgttggggtggatttttagtttggtatttagttgttttttaattttgagcggtattcgtggatgtagtcggtttttggtttagggatgtttatttatttttggtttgtttgaagaaagttgttgtttttaatttttttttttttaagtaagtttaaaatttttatgagtaaaagagtttaaagaggtaagaggatattggcgttttaattgttttttttttttttaattttttttttttttttttttttggttggttttatggattatttgggagataaatttatagtggtttagatttatatgatttagtggatgggtatcgtgaggaggtttttttaggaagtttttaatttggtgattattacggtgggttacgaacggacgagtgtagagtcggttagtcggattttttttaagcgtatttttttttttcgatatttggtttttcggagtcgggaattttttcgtcgtttttttgttcgtagttaatagagattttttttattgaggaaaaggtatatagattcggaatcgttagatattgtaagtttattatgttttaaaaaatattaaaataatattgaaagttttttttttttagtttttttagggagggggttttagatattaaatcggggaagttattttttttagaatagttgttagttaaagtttaggtattttttgttttttgtatttgggaaagaggtacgtagtaataattttttttttttgaagttagttaggatatttttgttggagtcgacgtttgtgtggatagggttagtacgtgagttgggttgaatttgttagttgatttatgtttaagtgtgaatattttaattttcgatacgaaagtttatttttttttttatttttagggtggattagtggtatttgttttatttttttttatttttttaggaagtataagtggcggtgttatgtgtacgttgagttgtagtttttgtcgttttatcgagtttttattggattgttaaggaaagggttttaggagatcgaggtgtggtgggcgagtttgttcgttggtcgtgaattttgggtttggtgtgagtgggttagggagggaggttttgattttttatttaggtaggttcgggagggtttggattgggatagtagggtggaatgatagttaatgattaaaattttggtttgtgttttgttaggcgatagtgtagaaataatcgtaaggtttttttgatgatttggagaggtgggattgggtttagaaagcgaaagtgtttattgtgggggaagtatagtgagtgagtggtagagttaggtttcgaattttaggttttgatttttttatttacggttttttgtagtttagtttttagtagatgttttttttagatttttttaattaatttagggttgtttaggttattgattagatttgagtttaaagagagggtttgttatttttatataggagatttttgttatttgattgtgttggtttagtttatgggagtatttgaggataggcgaagggttaagttagtttttttttttgggttttttttagttaggagtgttatagttattaagggatttagtatttagggaggagttttgagttggttttttttatattcgaggtggtagggtttatagttgttttgttaggtgtaggggtttagtattttttttgttgatttagaggtgtgatttattttaggttacgtagtagttagagtaggtagttgtaaatgtaaggtaggagtcgagtatttgggtatgatacgtgtttcgtttataggacgttttttttatagtgggtttgtgtttttttgtggtttagaataaattagtggggtttggatttatgagatagattttttaatttttggaaggtgtgatttgttatagggaaagaaggttttttatttattttgtttttttttgtgtgtatttttgtttttgtgatgtgtttttttgttttgttttgtttttgtttgtttttttgttatttttgtttttttttagggtatggggttggtgataggtaggttttgttggtatttttttttttttattttggggagtggtgtgattatgggtattggtatgaattttttaggcgttttattttgtgttataggttggtgttattggtaggagtggtttttttag

SEQ ID NO: 1863 - DNA, 2474 bp, Artificial Sequence
  chemically treated genomic DNA (Homo sapiens)
ttggagaggttatttttgttagtggtattaatttgtaatatagggtaagacgtttaggggatttatgttaatgtttatggttatattattttttagggtggggaaagagggatgttaatagagtttgtttgttattaattttatattttgagagagaataggagtgatagagaaataaatagagatagagtaaggtagaaagatatattatagagatagagatatatatagagggagatagaatgaatgaggggttttttttttttgtggtaagttatattttttagaggttggggaatttgttttataaatttaagttttattaatttgttttgggttataaagaagtatagatttattgtgaaggagacgttttgtgaacgagatacgtgttatgtttaagtgttcggtttttgttttgtatttgtaattgtttgttttggttgttgcgtgatttggggtgagttatatttttgggttagtagaggggatattgagtttttgtatttggtagggtagttgtgagttttgttatttcgagtgtagggagggttagtttagggtttttttttaaatgttgggttttttaatgattatagtatttttggttaggaggaatttagaaaaaggggttggtttagtttttcgtttgtttttaagtgtttttataaattgggttaatatagttaggtggtagaagttttttatgtgaaaatggtaggttttttttttaggtttaggtttggttagtgatttgggtagttttgaattaattgggagggtttggggagaatatttgttgggagttggattgtaaagagtcgtgaatggggaggttagagtttggggttcgggatttggttttgttatttatttattgtgttttttttatagtaggtattttcgttttttgggtttagttttatttttttaaattattagaaggattttacgattgtttttgtattgtcgtttagtaggatataggttaaggttttaattattagttgttattttattttgttgttttaatttaagttttttcgagtttgtttgagtaagaaattaaggtttttttttttggtttatttatattaaatttaaggtttacggttagcgggtaaattcgtttattatatttcggttttttaagattttttttttggtaatttaatgaaagttcggtggaacgataaaagttataatttagcgtgtatatgatatcgttatttgtgttttttaggagggtgagaggagatgaggtaggtgttattaatttattttaaaaatagggagaaggatgagttttcgtgtcgggggttggggtgtttatatttaaatataaattaattggtaaatttagtttaatttacgtgttggttttgtttatatagacgtcgattttagtaaaaatgttttgattgattttaggagagaggaattattgttacgtgttttttttttaggtataggggataggaagtgtttgggttttgattgataattattttggaagaagtaattttttcggtttgatgtttgggattttttttttgggaggattggaggggaggagtttttagtgttgttttaatattttttaaaatataataagtttataatatttggcggtttcgaatttgtatgttttttttttagtgaagaaaatttttgttggttgcgagtagagaagcggcggaaggattttcgatttcgggaagttaggtgtcggaaggaggaagtacgtttgaagggggttcggttggtcgattttgtattcgttcgttcgtggtttatcgtggtggttattaaattgagggttttttggaaggatttttttacggtgtttatttattgggttatgtgggtttgggttattgtgagtttattttttaggtaatttatggggttagttaggaggagagggaagaaggaagttagggagggagagagtaattaaaacgttagtgtttttttgtttttttggatttttttgtttatggaagttttgggtttgtttggaggaaaaaaaattaaaaatagtagttttttttaggtaaattaagggtaagtaaatatttttgagttaggagtcggttgtatttacgggtgtcgtttagaattaagaggtagttaagtgttaggttgggagtttattttagcggagttataaagttaatatattgggtagtttaggttttagttttagggtttatttagttgatcggtcgagataaggagttttgaggaataagtcggttgtatttattttagggcgtgacggtttcgaaaggcgggggatggggatgggggtgggggtggagggggcggtttttgggtattttcgtttttatttttttttaggtaggtagtttttttgaggtgtattttgggaggtttcggtgggtaagttgtcgtattttgttgttttttgttcggttgttttcggttagatttcgtttatttgatttatg

SEQ ID NO: 1864 - DNA, 2827 bp, Artificial Sequence
  chemically treated genomic DNA (Homo sapiens)
tcggggtttcgtttcgtttaggttcgtacgcggggttttcgggaatcgtcgtttttttttttcgttttcgcgttcgcgttttttttttcggggtttcggtttatttatttttggtgcggtttcgtcggatttaggagtttcggtcgttcgggttgcggggagggggcgtttcgggtcggttttagaagttattttgtaaagaggtagggggcgcggggtcgcgcggggcgagttcgggattcgcggggaagaagtttttcgggatcgcgtttcggtcgttcgagtttttcgcgttcgtcgttttttatttcggtcgggggtttatttgggagttcgttgttttcggttagtcgttcgcgtgtgtttagggttagtagtacgtataagtgttagcgtacggtcgtcgcgtttatgtttaatgcgggtttcgttgggcgtgcgggcgtgcggggcgcggggattcgatcgatcggtcgttttcgtaggcgttgttcgttgttcgtcgtttcgttatcgttcgggttttcgagtcgtttagttagttcggttgatgagttgatagcgcgcgtttattggttcgtggcgtcggaggggcggggcgtcgtttagggtcggttaatgggcgtcggttttcggtttttcgaggaagaggggggttcgggcgtcgtcggggggattttttttttggggcgggcggtaggtggggggtgtgggtttggtcggtcggttcgttaggcgcggggtttaggttaggttggggttgtttggaggttgcgtttttttttgttcgcggcgtttcggttttcgtcgtcgagagtggacgtttttttggggtaatttttttcggtttagaggtagtttcgggggcggggattttgcgaatcggggatttcgtgaggtcgttcgttattcgtgggtagtgaaacgcgttagcgcgtagagtagattcgtttgcgttgtcgtttgttggacgttttttgagtatttattggggatcgagtgcgggcgaggtagtagcgaaggaatcgggaggggaaatttcgtgaagattatttgaaaattgacgtttaaaataaacgaattttttagtattcgttaaaggatagtggttcgttagtgtgtttgttacggggcggtcgtaggatttgcgtttggaatcgggcgggcgttcgggacggataatgtcgtttggcggtcggtttcgcgggaggttttcgtacggggttaatttcggtcggcgaagttcgttgttcggaatgcgaggtcgaggtttttttttgtgatagatcgggcggggttaggaggaggggtagggcgggtatttcggttcgaagatttaggaattgttttggtttggtttggggtttatatttgacgtttggcgagggttggtttcgggtttggttttatcgggtttgggagggacgggcggttggaaataaatggttttttttagttttaggtaggacgttttaagggacgaaagtttagtaaattttaaggtttatttttttgataattattaataagagttttttttttttttttttgttttttaggtttaatttaaagataatttttttttttttttgtttattttgtttgtattagtttgagtttttttatattagtttttttttttgtttttaatatatatacgtatatatatatatatatatatatatatatatatatatatagttatatatgtagatatatgtttttacgtgtaattatttagatatagttttatatttttatattttttagtatatatacgtttatatatgtttttttacgtttttatttaatttatcgtagacgagttttttagttttggaaggttaaatttgtgtttagttagtttttatattttatttgattttatattagtttgtggtacgggtttggtggttgaggtaaggggttttttatatggggatcgggggtgtggggggtttagagatgtttaaagaagaaggaagcgttgtttgttgtttttattgagtttttattttattgttttagatatttcggtttgtacggttgtttttggttgttggtttaatttgggagatgttgttgataggttttattttgttttcgttaattgtgtagttttgagtttttgtagggggtggggagtttttttagaattatatattattttgtgtattgggtaatagggtaagtagtgtgaggtggtgggggaggtttttttagggggttttgatttatttgaaataatgttttttaatgtgtttggttattaggtattttttcgtttagttttagttaggtgttttttaagtttgatggtagtaagagaagttttttttaggttttatttttataaattaaggtaggaatggaggtaggttattttgtgattttttagtttagaggtagttgttttttgtattaagttgtagtttttagtttgtttttaagcgattgtttaggttaagtttgttggtgaattattattttttaaggtgtgtaggtagagagaaagtggttttttttaggtagttgttgtttatgtggaggatttagcgagtagaggaggagggaaatggagagaagatatatttgtaagttttttataggtgaaggaaaggaggcggtttgtggagtagagaaagaggaggttatttttgttttagggcgtcgttagggaggttttttaggataggtgatttgggttagatatagaatataaagaggatatttgtttaatggatgagaagaataaatagagaatttgttaaggtttatgagtgaaggcgaggattgaataagtgagttagagaatgttttggaagta

SEQ ID NO: 1865 - DNA, 2827 bp, Artificial Sequence
  chemically treated genomic DNA (Homo sapiens)
tgtttttagaatattttttggtttatttatttagttttcgtttttatttatggattttggtagattttttatttgttttttttatttattaggtaaatattttttttatgttttgtgtttagtttaggttatttgttttaagaggtttttttgacggcgttttggggtagaagtgattttttttttttttgttttataggtcgtttttttttttttatttgtgaggggtttataggtgtgttttttttttatttttttttttttttgttcgttgagttttttatatagataatagttgtttagaaggaattattttttttttgtttgtatattttagagggtgataatttattagtaaatttgatttgagtaatcgtttgggggtaggttggggattataatttggtataagggatagttatttttgggttgaggggttatagagtaatttgtttttatttttgttttgatttgtggggatggagtttggaagaagttttttttgttgttattaagtttgaggggtatttggttagggttgggcgggggggtgtttaatgattaggtatattagagggtattgttttaagtaggttagagttttttggaagaattttttttattattttatattgtttgttttgttgtttaatgtataagataatatgtggttttgagggaattttttattttttgtagaaatttaaagttatataattgacggggataaaataaagtttgttaatagtattttttaaattaaattagtagttaggagtagtcgtgtagatcgaaatgtttggagtaatggggtgggggtttagtggagataataggtagcgttttttttttttttgggtatttttggattttttatattttcgatttttatgtaggggattttttgttttagttattaggttcgtgttataagttgatgtgaagttagatggggtgtgagagttggttggatatagatttaattttttagggttgaggagttcgtttacggtaggttggatgagggcgtgaagaagtatgtgtgagcgtgtgtgtgttggagggtgtgagggtgtgaggttgtgtttgagtgattgtacgtgagagtatgtgtttgtatgtgtgattgtgtgtgtgtgtgtgtgtgtgtgtgtgtgtgtgtgtgtgcgtgtgtgtgttgggggtaggaaagggagttggtgtggaggggtttaaattggtgtaggtagagtggataaaaagagaaaagagttgtttttgagttgggtttggagagtaggagaagaaaaaaggagtttttattggtggttgttaaggagatgggttttggggtttgttgaattttcgttttttaaagcgttttgtttggaattgagaggggttatttatttttagtcgttcgttttttttaggttcggtgggattagattcgaagttaattttcgttaggcgttaggtgtagattttaggttaggttagagtagtttttgggttttcggatcgggatgttcgttttgtttttttttttggtttcgttcggtttgttatagggggaggtttcggtttcgtatttcgggtagcgaatttcgtcggtcgaggttagtttcgtgcgggggtttttcgcgggatcgatcgttaagcggtattgttcgtttcgggcgttcgttcggttttagacgtaggttttgcggtcgtttcgtgataagtatattgacgggttattgttttttgacgagtgttaaaaagttcgtttgttttgaacgttaatttttaagtgatttttacgaggttttttttttcggttttttcgttgttgtttcgttcgtattcggtttttagtaggtgtttaagaaacgtttagtaaacggtagcgtaggcgagtttgttttgcgcgttggcgcgttttattgtttacggatggcgggcgattttacgggattttcggttcgtaggattttcgttttcgaggttgtttttgggtcgggaggggttattttagaggggcgtttattttcgacggcgggggtcggggcgtcgcgggtaggggagggcgtagtttttaagtagttttagtttggtttagatttcgcgtttagcgagtcggtcggttaggtttatattttttatttgtcgttcgttttaggggaagggttttttcgacgacgttcgagtttttttttttttcggagggtcggaggtcggcgtttattggtcggttttgggcgacgtttcgttttttcgacgttacgggttaatgagcgcgcgttgttagtttattagtcgggttggttgggcggttcgggagttcgagcggtggcggagcggcgagtagcgagtagcgtttgcgggagcggtcggtcggtcgggttttcgcgtttcgtacgttcgtacgtttagcggggttcgtattgagtatgggcgcggcggtcgtgcgttggtatttgtgcgtgttgttggttttgggtatacgcgggcggttggtcgggggtagcgggtttttaggtaagttttcgatcgaggtggggggcggcgggcgcggggggttcgggcggtcgaggcgcggtttcggagggtttttttttcgcggatttcgagttcgtttcgcgcggtttcgcgttttttgtttttttgtaaagtaatttttagggtcggttcggggcgtttttttttcgtagttcgggcggtcggggtttttgagttcggcggggtcgtattaggggtgggtgggtcggggtttcgggaggggaagcgcgagcgcgggagcgaggaagaaaggcggcggttttcggggatttcgcgtgcggatttgggcggggcgggatttcga

SEQ ID NO: 1866 - DNA, 2265 bp, Artificial Sequence
  chemically treated genomic DNA (Homo sapiens)
gttagtgggttatttttgtttattatgtagtatggtatttatttgtttagtattttatataatatcggaggtaggggagtttattatagaattttttattaagaaggtttttattatggagaaattgaggtattggaggcggggtttttgtagttacgttgggttacgtgttttagttagttaagttgtagcggttattaagggtgtttagggtttggtttgttggttatagtgttgattttatggtttgaaatgggttttttttgtttagataggttttagtttattattatttatttgttttagttttggtgggtagggagtggttgggagattttgttttttatattttgggttttgcggtatttaacgagtttttaatatatattttagggtttttgttttagattaggttatagtttgtttaggtatataaggggtatttatattttggaggtaaagagatatgtttatgtgttcgtaggtatatatgattacgcgtatagatatacgtgtagatgtatattaagttatatatacgtatataagttcgaggcggggatttttaggatacggaggtaggtaggtagaggtggggtttaggatgttttgtttttgtttgtgggtttggtttttttatttaatagacgagtatgtgggtgcgggagtggttattgcgaaaggggttttagtatgtgttattcgtggagattatagtaggtatgtcgcgtgtatgtatgtgtggtcgtgggtgtgtaggcgggggcgaggatatagatatgtatttttagagttcgtgtgtgtatttagtgtttgtgtatgtgtatattggggcggcgttggtttgtatgtgtattagaggtgtgtaagtgtgtagttcgtgtagataagtgtacgtgtaaggaaacgtgtgtgtagtttgcggtattatggatattagtagggtagtttgggtgggtatttggggagtattttttaggcggggtatgtttaatttatatggagtttatttttttttgttcgtatcgcgggattttatagtcggtggggcgggggagttttacgagggttgttagggaggggttgttgattgttttatcgtttttgatttttttagttaagttttttaatgtttttcgggttgtagatggtgggcgttgttgtttttttttatcgttcgttttggaggtagcgttgggataattttgttttttacgttttttattgtcgttaacgtttttatttattttattgtggattgatttcggagaaacgggaggttttgagtttagatcgtgaggttggggtggaggcggttcgatatttttatttattttcggtatttacgtttttgtaaaaattcgttcgttaattttttggtggtcggggcgtttcgaggtcgggtttcgtttttttagtttacggttttcgttttcgatttggtttagtatcggggattttcggatcgttattttcggttttgtcgaagtcgttaattttttcgggaagcggtaattttttttgtcgttttcggtttcgttttttcggggtcggggcgttagcggttttagtttggcgcggtattgcggtggttttttttgtcgttcggttacgtttttttcgtttcggtagttcgggacgggttttgcggtttcggggagggggcgagtcgttttttttcgcgtttcgtcgtcggtcgggttcgggtgtagcgcggatatttatttttagcggacgttttttttatcgtaggggttgggcggggcgcgtcggggattgaaagtcgtttcggggcgggcgttcgttttttcgcggtcgggttcgtatttaggcgtcgtcgttacggttcggtttcggttcggtcgcgggacgaggttcggcgcgtttcgtttcgttcggttttggttgggttcgggtcgcgggtgcgtagggcgcgtagggcgtatagggcgagggcggcggcggcgcgggggttggggcgtgggcggcgcggcgggtcggggcgcgtaggtcgggtcgtaggaggcgtttagttcgttcggtgtatcggcgtcgcgcggttttagataaaggcggcgtatttttgaagaggcggcggtttttgtaggcggcggaggggatggcggttcgggtcggagtcggtcggggacgcgggttcgagggtgtggcggtttaggttggttcggtttttaagcgggtaagggttttgtttcgaggtttaggaatggtttttgtttgatttattttttttttggttttacgaaa

SEQ ID NO: 1867 - DNA, 2265 bp, Artificial Sequence
  chemically treated genomic DNA (Homo sapiens)
tttcgtgaggttaggaagggagtgggttaggtagaggttatttttaggtttcgggataaagtttttgttcgtttggggatcgggttagtttaggtcgttatattttcgggttcgcgttttcggtcggtttcggttcgggtcgttatttttttcgtcgtttgtaggggtcgtcgtttttttaggaatgcgtcgtttttgtttgggatcgcgcggcgtcggtgtatcgggcgggttgagcgttttttgcggttcggtttgcgcgtttcggttcgtcgcgtcgtttacgttttaattttcgcgtcgtcgtcgttttcgttttgtgcgttttgcgcgttttgcgtattcgcggttcgagtttagttagagtcgggcggagcggagcgcgtcgagtttcgtttcgcggtcgggtcggggtcgggtcgtagcggcggcgtttggatgcggattcggtcgcggggagacgggcgttcgtttcgaaacgatttttagttttcgacgcgtttcgtttaatttttacgatgaagagggcgttcgttggaggtgagtgttcgcgttgtattcgagttcggtcggcggcggggcgcggaggggggcggttcgtttttttttcggagtcgtagggttcgtttcgggttgtcgaggcgagggaagcgtagtcgggcggtagggaaagttatcgtagtgtcgcgttaggttggggtcgttggcgtttcggtttcgggagggcggagtcggaggcggtaggaaaagttgtcgtttttcgggaaagttgacggtttcggtagggtcgagggtggcggttcgagggttttcgatgttgggttaagtcgagggcgggggtcgtgggttggaagggcggggttcggtttcggagcgtttcggttattaaggggttaacgagcgggtttttgtagaaacgtgggtatcgagggtgggtgggggtgtcgggtcgtttttattttagttttacggtttgggtttagaatttttcgttttttcgaggttagtttatagtgggatgaatgggggcgttggcggtagtagagggcgtgggggatagggttgttttagcgttgtttttagggcgggcggtgagaggaggtagtaacgtttattatttgtagttcgagggatattgagaggtttggttgggggaattaggggcggtggggtaattagtaatttttttttagtagttttcgtgggattttttcgttttatcggttgtgaggtttcgcggtgcgggtaagggagggtgggttttatgtgagttgggtatgtttcgtttggagggtgttttttaggtgtttatttaggttgttttgttgatgtttatggtgtcgtaggttgtatatacgtttttttgtacgtgtatttgtttatacggattgtatatttgtatatttttggtgtatatgtaagttaacgtcgttttagtgtgtatatgtataaatattgggtgtatatacggattttgagggtgtatatttgtgttttcgttttcgtttgtatatttacggttatatatgtatgtacgcggtatgtttgttgtggtttttacgggtggtatatgttggggtttttttcgtaataattattttcgtatttatatgttcgtttgttgagtggggaggttaggtttatagataggggtaagatattttgggttttatttttgtttgtttgttttcgtgttttgggggttttcgtttcgggtttgtgtgcgtgtgtgtaatttggtatgtatttgtacgtgtgtttgtgcgcgtgattatgtgtgtttgcgggtatataggtatgtttttttgtttttagggtgtgggtgttttttgtgtgtttagataggttgtggtttaatttggagtagaggttttggaatgtgtgttgggggttcgttgaatatcgtaaagtttagggtgtgaggggtagggttttttagttattttttatttattagggttgaggtagatagatgatggtgggttggaatttgtttgggtagggaagatttattttaggttatgaggttaatattgtgattaataggttagattttgggtatttttggtggtcgttgtagtttggttgattggagtacgtgatttagcgtgattgtagaggtttcgtttttagtgttttagtttttttatggtgaggatttttttggtgaggggttttgtggtgggtttttttattttcggtgttgtgtagggtgttgagtagatggatgttatgttgtatgatgggtaagggtggtttattagt

SEQ ID NO: 1868 - DNA, 2459 bp, Artificial Sequence
  chemically treated genomic DNA (Homo sapiens)
ggtattttttaggtttattaagattagttttttgtgtattgtgttttttgattatattttgggtttttgtaacgtggttagtattttttggtatttttttatttattatgtttttggtaagtagttgaattgtaaggtttttagggttttggttcgtgatagggtcggagtatttagttgttttgttggtatatttattgtttgtagtgaagatgattagcgtttttttaagtagttttaggttttttatggttgttattagggtttttatagttgtatttagttttattagggagtttttaaatggttcgcggtttgaacgttttgtaaagttttgtttattgaattgagggtagtgggtgtgttgggggtaaagattggagttagtattgggtaggggttacgggtagttagggggttgggttaagattatttacgtgagaggtatagtataggaagaaggggcgattttggcgttgggcgtcggttatgaggttatgggcgaaagttatgtagcgggtttttagttcgggtagttaggggggttgcgtttttacggataggttggttaatagtgggatggggattaggttttggttatagttatcgtcgtaaggagtggtcggcgggaagtaggttaggttttggtaggggttttgaggcgggtagttgtcgtgagggttgggttggtaggtggggttgcgggagtattaagggttgggggattttgggaggtgggagggtggttgagggttcgggtggtttttatttggtcgtgggagtacgggatgtttagaaatcgatggaagttttgatgggggggtaggaaggtttttttaggttttattttaaggtgttatttgtcggttatttttgtgaggtagtttcgggtagttaggatttcggttacggttattttttttaggggtaggttttttcgggagttgggtattaggacgttagggtatatgtttattcgaatcgggagtcggtcggttaggagggcggttttgcgggataagttatagagtttttgagatagatagaaatgtggttttttttagagagagagatagacgtttttttcgtttttttgtaatttattgggaggaaagggatggagggtcggggcggggaagaggcgcggttttttttttatttagagggtgtgtatagagatataggtacgtagaagtttgtgaatcgtagttttttcgtcgttagttggtttaggttgggagtggtagagttggggtgtttatagtagtttaggtttttatagtcgaggtcgtcggtaaagattagtacgatgttgggcggacgggtaacggttaggttagtagttagggttaggaggagggatcgcggtgtttttatggatatgggatcgaggggtttgttttaagagagggagggttatttggttttagtaggtttttttcgatatcgtagatttaggcgtcgtttttttttgagatttcggatttaaatatttttcgattttgacggtcgttttttgaagttttagagggtcggggttcgatagtatcgggagatcgcgggttgggacggaatttttttaggattagggtatttttagattttcgagcggagatttgatttttttcgtttagcggttcgggtttagggtcgggggcgtaagttatttggcgttgattagcggagtcgggtcggggggaaggcgttagagggagtttaggaggagtcggtatcgggttgcgggcgttttcgtttcggtttcgtttcgtgatttgtgatttttgcggggcggggtcgggggcggggtcgggggcggggtcgggggcgggtcggggcgaggggcgttgttgcgcgtgttcgtttcgaggtcgtcgtgtgcgtttgaggttgttggttgcggttttgaaacgggttttgggagttttttttgcgcggtcggttttggttgaggcgtttcgggttgcgcgcggggttcggcgttgcgtagtgttcggtgttttttcggttcggagtttttttagaggaggagcggttcgtgcgtttttagattttcggtattgggagattcgggtttttttgtaagagatttgagcgcggagcgttatgggtattcggtgaatgagtaaatggtagggaaaatcgtgtagttttatggattgcgggttttttttttacgattagtaaaagttttgatatttttttttttgcgtacgcgtgtttgtgtgcgtgtaagttgtggttgggtgcggggggttgtgtacgtgtttgtgtgtggtgtgtgtggagtgtttgaggtaggtgtgtggtgttttaggtgtgtgtgtatgtgtggtgtttgaggtgtgtgtgtgtgtttttgtagtgtttgagggatatgtgtgtgtggtgtttgaggtgggtgtgtggtgtttgaggggtgtgtgtgtgtggttgaggggtgtgtttggtgtttgaggggt

SEQ ID NO: 1869 - DNA, 2459 bp, Artificial Sequence
  chemically treated genomic DNA (Homo sapiens)
attttttaaatattaaatatattttttaattatatatatatattttttaaatattatatatttattttaaatattatatatatatattttttaaatattataaaaatatatatatatattttaaatattatatatgtatatatatttgaaatattatatatttgttttaaatattttatatatattatatatagatacgtatatagtttttcgtatttagttatagtttatacgtatatagatacgcgtacgtaggagaaagggtgttaaagtttttgttagtcgtgaaggaagagttcgtagtttatggggttgtacggttttttttgttatttgtttatttatcgggtgtttataacgtttcgcgtttaggttttttataggagggttcgagttttttagtatcggaggtttgggggcgtacgagtcgttttttttttggagaagtttcggatcgagaggatatcggatattgcgtagcgtcgagtttcgcgcgtagttcgggacgttttagttagggtcgatcgcgtagaggaagtttttagagttcgttttaagatcgtagttaatagttttaggcgtatacggcggtttcggagcgagtacgcgtagtaacgtttttcgtttcggttcgttttcggtttcgttttcggtttcgttttcggtttcgtttcgtaagggttataggttacggggcggggtcgaggcggaagcgttcgtagttcggtatcggttttttttgggttttttttagcgtttttttttcggttcgatttcgttggttagcgttaagtgatttacgttttcgattttgagttcggatcgttaggcgaggaggattagattttcgttcgagaatttgaaggtgttttggttttggaggagtttcgttttagttcgcggtttttcggtattgtcgggtttcggttttttggagttttaggaggcggtcgttagggtcggggagtatttgggttcggggttttagggaagggcggcgtttgggtttgcggtatcggaaagagtttgttggagttaagtagtttttttttttttgggatagatttttcggttttatgtttatgggggtatcgcggtttttttttttggttttggttgttggtttggtcgttgttcgttcgtttaatatcgtgttgatttttgtcgacgatttcggttatggggatttgggttgttatgggtattttagttttattatttttaatttggattagttggcggcgggagggttgcggtttatagatttttacgtgtttgtgtttttgtgtatattttttaggtaaagagggggtcgcgtttttttttcgtttcgattttttatttttttttttttaatggattgtaggggggcgggaaaaacgtttgtttttttttttagggaaggttatatttttgtttgttttagggattttgtgatttgtttcgtagggtcgtttttttgatcggtcggttttcggttcggatgggtatgtattttggcgttttggtgtttagttttcgggggggtttgtttttggaggaggtgatcgtggtcgaagttttggttgttcgaggttattttataggaatggtcggtaagtggtattttggggtggggtttgagggggtttttttgtttttttattagggtttttatcgatttttaggtatttcgtatttttacgattaggtaggaattattcgggtttttagttatttttttattttttaaagttttttagtttttgatgttttcgtagttttatttgttagtttagtttttacggtagttgttcgttttagggtttttgttagaatttgatttgtttttcgtcggttattttttgcgacggtggttgtgattagggtttggtttttattttattgttggttaatttgttcgtggaggcgtagtttttttggttgttcggattagaggttcgttatatggttttcgtttatgattttatggtcgacgtttagcgttaggatcgttttttttttttgtattatgttttttacgtaagtgattttggtttaattttttggttgttcgtgatttttatttagtgttaattttagtttttgtttttagtatatttattatttttagtttagtgggtagagttttgtagagcgtttaggtcgcgggttatttggggattttttgatggagttggatgtagttgtggggattttgatgatagttataggggatttggggttgtttgaagagacgttggttatttttattgtagataatgggtatgttagtagggtagttgggtgtttcggttttgttacgggttagggttttggaggttttgtagtttagttgtttgttaagaatatagtgggtgagggggtgttaggagatgttggttacgttgtaggggtttaaggtgtagttaggagatatagtgtatagagagttggttttggtaggtttgggaggtgtt

SEQ ID NO: 1870 - DNA, 2731 bp, Artificial Sequence; identical to SEQ ID NO: 1288
  chemically treated genomic DNA (Homo sapiens)

SEQ ID NO: 1871 - DNA, 2731 bp, Artificial Sequence; identical to SEQ ID NO: 1289
  chemically treated genomic DNA (Homo sapiens)

SEQ ID NO: 1872 - DNA, 2499 bp, Artificial Sequence
  chemically treated genomic DNA (Homo sapiens)
ggggttcggggttagtggggagagttaaggttatatgggtttcggatgcggtgaggggtgagggaaggagggtattttttagttaagatgaaattattatttttgagcgtcggtagtttttttaggttgttgatttgtaagaattttttgtttttgtgttgttttgaagaggaagaagttagaaaaggtttttagaataaaaacgttgtatttttatattttttttttttttttttaagcggagttttatagttttgagaaatagtaaggtttgggattagaggtttggattagttttattttttggttgggtttttttgttttgttatatttcggggtagttggggggttttggtgggtggggttaggtgtagtaggtggataaagagaagttttttagtcggattttggtgggttaggggaggggaggtaaattggggtggtttatttttttttattttttaatttttataatagtatgttttttttttcgaggttttttgggttttgtgaatttatatgcgtgtattttacgtaagaattttgttaattttatttagtattttttttttatttttatagagtagaaggtaacgttatttttttttttagaaggtaagttaaggtttagagaggttgtgatttttttaaggttatttagtttatagtattttttggtggtagacgttgtaggaggaggtgagggggttgtgcgggcggcgagacgtttagggtagagtagggcgggggtttgggggtgtattgggtttgtggatacgcggggaaacgggttgggtttatttttgattaaatttacggtgcgtagttttaaggggatgttattttttttggcgaagatgtagacggcgcggttgggttgggatattaggttaagaaatagttttaggtttatggcgggggcggtaaggatagcggggatggtagtgaaggcgttgagcgcggtgtgggtagtagttgtggtaggatttcggcgcgtcgggaaataggggattaggttttattttttggggatagtatttaattggagcgtattattttcggattcgtttcgttttttcggtttttgtttagttttgtcggttaagattttattattagattcgtgcgtttttatagggagggcggtcgttatgaacgtatagttgggagggtggagttggagttggggattttcgattggtagggaggacgcggatgtagggggtcgattgtaaggggaaggggaatcggttggatagggagaagtaggtttgtttttcgggatttcggtgttagggattttgtttagttttaggcgtcgttttgatttagaaacgattgggcgtcgtcgttttggaaaggttttagcgtacggatatttgagggttcgtttagagttttgtttttcggcgttgtatggtggcggaagggagggagcgaatgggattttttaaaagggattttagagttttatttagtgggatgtgatatttgtaggtgttttaaattggtgggaattttgattggaaggttggggttaaggatgaattttttgtcgtttagattgttttttgtagagtagttgttgttagatagcgggagttgttagatagcgggagtttttatttcgtgtataggatgggggtagggagttcgtagtcgcgggaggtaggaatgattgttcgggaatttttttttttttttttgaattttagttttggtattttattagggggtatagtgatggtttagggttgggttcgggattttagttgaattttttagagtattttatttttttggttagtggtttaagcgagtgaattagaatgtttttttgggagttttgaaattggaattggagagaggagttttttatggggaggtaaacgggagttggggttatttgtagtgatattttttgagttcgaggagtagacgagattgagagagaaaagttgatttagagaaagggagtgataatagggtatgttggtttatatttgtaattttagttatttttacgggatttgtttttttgatgtttgggtatgaaaggattttttaagttttagaatagtgggagaatttaataaagaaaaaattaatatatatataaggttattttgtggaggaaaaaatggattaattttaagtaaaaaattgggaaggatttcggtaaaagatacgttagaaggaagtaatgttttttaagatgtttttagaaatttattagataggtggggtgtggtggtttacgtttgtaatttttgtattttgggaggtagagatgggcggattagttgaggttaggagtttgagattagtttgggtaatacggtgaagtttcgtttttattaaaaatataaaaattagttgggtgcggtggtatattcgggaggttgagataggagaattatttgaattttggaggtagaggttttagtgagttgagattatattattgtattttagtcgggttattgagcgagattgttt

SEQ ID NO: 1873 - DNA, 2499 bp, Artificial Sequence
  chemically treated genomic DNA (Homo sapiens)
agatagtttcgtttagtggttcggttggagtgtagtggtatgattttagtttattgaaatttttgtttttaaggtttaagtgatttttttgttttagtttttcgagtgtgttatcgtatttagttaatttttgtatttttagtagagacggggttttatcgtgttgtttaggttggttttaaatttttgattttaattgattcgtttatttttgttttttaaagtatagggattataggcgtgaattattatattttatttgtttgatgggtttttaagaatattttaaaggatattatttttttttgacgtattttttatcgagattttttttagttttttgtttaaggttaatttatttttttttttataaagtaattttgtatatgtattggttttttttttgttgagtttttttattgttttgaggtttagaaagtttttttatatttagatattagagaaatagatttcgtgagagtaattgggattgtaggtgtgggttagtatgttttgttattattttttttttttgagttagttttttttttttagtttcgtttatttttcgaatttaggaaatgttattataggtggttttagttttcgtttatttttttatagggagtttttttttttagttttagttttaaaatttttaaggaagtattttggtttattcgtttgggttattggttagagggatgggatattttgaaagatttagttagagtttcgggtttagttttggattattattgtgttttttggtgagatgttagggttgggatttagggagaagaaaggaggttttcggatagttatttttgtttttcgcggttgcgggttttttgtttttattttgtgtacgaagtgggagttttcgttgtttggtagttttcgttgtttggtagtagttgttttgtaggggatagtttggacggtagaaagtttatttttaattttagttttttagttaaggtttttattagtttgggatatttgtaagtgttatattttattgggtgaaattttaagattttttttaggggattttattcgttttttttttttcgttattatgtagcgtcgagaaatagagttttgaacgaatttttagatgttcgtgcgttggggtttttttaggacggcggcgtttagtcgtttttgggttagggcgacgtttggaattgggtagggtttttggtatcgggatttcgaaaagtagatttgtttttttttgtttagtcggttttttttttttttgtagtcggttttttgtattcgcgttttttttgttagtcgagggtttttagttttaattttatttttttagttgtgcgtttatagcgatcgttttttttgtagggacgtacggatttggtggtggagttttggtcggtaggattggataggaatcgaaggggcgaggcgggttcgggggtggtgcgttttaattgggtgttgtttttagggggtggggtttgattttttatttttcggcgcgtcgggattttgttatagttgttgtttatatcgcgtttagcgtttttattgttattttcgttgtttttgtcgttttcgttatgggtttagagttgttttttgatttggtgttttagtttagtcgcgtcgtttatattttcgttaagaagaatggtatttttttagagttgcgtatcgtggatttggttaaaggtgggtttagttcgttttttcgcgtgtttataaatttagtgtatttttaggttttcgttttgttttgttttgagcgtttcgtcgttcgtatagtttttttatttttttttgtagcgtttgttattagagaatgttgtggattgagtggttttgaagggattatagtttttttgaattttagtttgttttttgaaaaggaggataacgttattttttgttttgtagggatggaaagaaaatattgaatggagttgatagagtttttgcgtggaatgtacgtatataaatttataaagtttagaagatttcgggaagaaggatatattgttgtgagaattaagagatgggaagagatgagttattttagtttgtttttttttttttggtttattagagttcggttagaaaatttttttttatttatttgttgtatttggttttatttattaaaattttttagttgtttcggaatgtggtagggtagggaggtttagttagggagtgaggttgatttaggtttttagttttagattttgttgttttttagggttgtggggtttcgtttggggaggaggagggagggtgtagaggtgtagcgtttttattttgaagattttttttgatttttttttttttagggtagtataagagtaaggagtttttgtagattaatagtttggggaaattgtcgacgtttaaggatggtgattttattttgattgaaaggtgtttttttttttttattttttatcgtattcggagtttatgtgattttggttttttttattggtttcgggtttt

SEQ ID NO: 1874 - DNA, 2299 bp, Artificial Sequence
  chemically treated genomic DNA (Homo sapiens)
ttttttttaaaaagtattaaggttatttatttaataaataggaagaaattttaaagtgaaaatatagaggggttagggatttttttattaagagtttaagattaggttgggtttagtggtgtatgtttgtaattttagtattttgggaggtcgaggtaggtggattataatggaaggggttcgagattagtttttattaaaatataaaaattaggtgtggtggtgcgtatttgtaattttagttatttgggaggttgaggtaggagaattgtttgaattttggaggtggaggttgtagtgagttgagattgtattattgtattttagtttggatgatagagtgagattttgttttaaaaaaaaaaaaaagagtttaatattaattttttgaaagttagaggaagtagaatgtatcgtaagtaataaggagaaataagattgattttagcgtcgtataaagggaaattattaattttgaaagtaaattatgtgaagggttttttgtgggttttttttatattttaagttttagggtatatgtgtataatgtgtaggtttgatatataggtatatttgtgttatgttggtttgttgtatttattaatatattatttatattaggtattttttttaatgttattttttttttagtttcgattttttcgataggttttggtgtgtgatgttttttttgaagggtttttttaaagattaggttaaagttaaagattaagtttttttttttaaacgttttagttaaaagtaggagttaatttttatattttcgaaggtggttttaggattttaagttatattttggtaagggtgtggtagttggtagaggattgtaggtttttgttaggtagaatttgtcgggttttggggagtggagatttagattttgaggtggaagtagagataagagttgggtatatttatttggatgtggggttgggagcggtgaattagagtttagttagattttggaggttggtagtaggttttgtagaggtgtaggggtattttatttagaaggggttatttattggttttttgtggttaaaattagttttaagtaggattttttatggttggagtcgtttttaaaggggcgtcggtttttatttaggtgtgattttgagcgttgtttagttgaaaaggcgtgatgatagggagtatacgtgaggttattcgggaagaatattttgttaagtgtagaggtcgtaaaaacgtggaatatggttttgttttttatgttttattgaaaatgattattagaagtagaaattgggtttgtgtttagaatttgaaaatttgtagggtagaaaaataggataaaggtattttttagtgattgtaaaattaaattttaatagaaagatgtttgaagagataggtggattatgattttagaattggagataggagaggtttttagaattaaagattatttatggttatataaatatttgagaggtatttttattaaaatatttttttttttatattaatattatgaattatatgttatgtataatttataatagagtatagtagagttattagtggtttaaagtgttgtatatatgattgttatatgaggtaaataagattttttgatttagagttaagaaaatggaaataataattgttaaggtatattaagaattatatatgtatgtgtgtgtgtatatatatatatatatatatatatatatatatatatatatatatataatatttaatttttatagtaatatatatttataaatgagtatatataaatatgtgtgtgtatgtgtgtgtgtgtatatatatttatttaatttttgtagtaattttataaggtagggattattgtaatttttatttgagagaggcgtattttgaagtatttggtagtaaggtaatttgtttaaggttatatagttagtaataagtatagtacggttttgtaggtttaggtgggttttattatatcgttttttttggtagtaagaaaatggaaggtttttgaagtagtgggggagttatcgggtataaggaagtagatttttggaggaatatataattagtaaaagtggagtttaggaatagacgttattaggtataagtgatttttttagatattgggaatttgtgttttgaaatattaaagtatttttaggaagtagaaaagttagtttttttattgaattgttatgtggttttgaagaaaatgttttaatatttataaaatttaaagttttaatttgtaagaaggaaaaaatgttatgtgttttttattaagttttttttt

SEQ ID NO: 1875 - DNA, 2299 bp, Artificial Sequence
  chemically treated genomic DNA (Homo sapiens)
aaaaaaaaatttagtaggaggtatatgatatttttttttttttgtagattaaagttttgagttttatggatattaggatattttttttaaaattatatagtagtttaatgaaagagttaatttttttgttttttaaaaatattttggtgttttaaaatataagtttttagtgtttggaaaaattatttatgtttggtaacgtttatttttgggttttatttttgttaattgtgtgtttttttagggatttgtttttttgtgttcggtgatttttttattattttaaaaattttttatttttttgttgttagggaaagcggtgtggtggaatttatttgggtttgtaaggtcgtgttatgtttgttattagttgtgtgattttgggtaagttattttattgttaggtgttttagggtacgttttttttaagtggggattgtaatagtttttattttataagattgttgtaaggattaaatgagtatatatatatatatatatatatatatatatatttgtatatatttatttataggtatgtattgttgtagggattaaatgttatatatatatatatatatatatatatatatatatatatatatatatatatatatatatatatatataatttttaatatgttttagtaattattatttttatttttttaattttgggttagagaattttatttattttatataataattatatatgtagtattttaaattattggtaattttgttatattttgttataggttgtgtatagtatataatttatgatattggtgtgaagaaagggatgttttaatgaaaatattttttaaatgtttgtgtagttatagatgatttttaattttgaaaattttttttgtttttaattttgaggttataatttatttgtttttttaggtatttttttgttgaggtttagttttgtagttattaaaagatgtttttgttttgtttttttgttttgtagatttttaggttttgaatataagtttagtttttgtttttgatgattatttttaatagagtataaaaaatagagttatgttttacgtttttacggtttttgtatttggtaaaatatttttttcgaatggttttacgtgtgttttttattattacgtttttttagttaggtaacgtttagagttatatttgagtggaggtcgacgtttttttggaggcgattttagttataaaaagttttgtttggagttggttttagttatagagggttaataaatggttttttttgaatgaggtgtttttgtatttttgtagagtttgttgttagtttttaggatttaattgggttttgatttatcgtttttaattttatatttaggtaagtgtgtttagtttttgtttttgtttttattttaagatttgagtttttattttttagaattcggtaggttttgtttgataaggatttgtagttttttgttagttgttatatttttgttaaggtgtgatttggagttttggagttattttcggagatgtgaaaattagtttttatttttagttaaagcgtttggaaagaaaagtttgatttttagttttgatttggtttttaaaaaaattttttaaggggaatattatatattagggtttgtcgggggggtcggggttgggggagggatagtattaggagaaatatttaatgtaaatgatgtgttgatgggtgtagtaaattaatatggtataggtatatttatgtattaaatttgtatattgtgtatatgtattttagaatttaaagtataaaaaaaatttataaaaaattttttatatgatttatttttagaattggtggtttttttttgtgcggcgttggaattaattttgtttttttttattatttgcggtgtattttgttttttttaatttttaaaaaattagtgttaaatttttttttttttttttgagataaaattttattttgttatttagattggagtgtaatggtgtaattttagtttattgtaatttttatttttagggtttaagtaatttttttgttttagttttttaagtagttgggattataggtgcgtattattatatttaatttttgtattttagtaggggttggtttcgaattttttttattgtgatttatttgtttcggttttttaaagtgttgggattataggtatgtattattgagtttagtttagttttgaatttttgatgagggaatttttgatttttttgtgtttttattttgggatttttttttgtttattaaatgaatgattttggtattttttggagaaaa

SEQ ID NO: 1876 - DNA, 2270 bp, Artificial Sequence
  chemically treated genomic DNA (Homo sapiens)
gttatattttatgttttttgagagtgttattaacggaattgagaaaataattatttagacgggttatttgggggttgatttttattttggaatttttttggaaggtgaacggtttatgttatgtagttgttatgtaagaggtattatgggatttttttttttgggcgtttatggagtcgcggtagagttttgggtgatttagtagtagttgtttgttgtgtggttgtttttattgtttttttttataattgttgttgatttttttgtattgattttgtagatgtttttttggtttcgtggtgtttttttggatttttaagggatttttgtgtatttattttagttttttttttgttagtaatgtttatttttttagtttttttaagtagttttataaaaaatttttagtgaaaaatattagttaagaaggcgaaggtatttggaaaatttttagatttggttattgtgtgttgtaattttagtttttttttatagttatgatatgtatattaatgtaggtgtttttgagatttttgtaggttcgagaaagtatgatatgtttttagaattttggatttggattttattttggatagtatatgataaggacgaggatttttattttagttagttaaagttggatagaatttttaaaagtaatgaagttagttttttggatatatttacgggttttgttttgagaaggaattgagtaggtagtgagaagagtcgagtgaagtttggttcgtgagtgttttaataattgagatgaacgtcgattcgtttgtaggtaagttgttagtaagtatttattaaatatttatcgtgagttttgtattttgtttagttattaagaaattaaaagggggaaaaatagttttatttgtttagagtttataataaatttgtattgtgaatatagaatatagaaaaattggattttagtgaggtgttagaaagagtgtattgtttagttgagatagtagatgaaggaaaaatatttttggtttttttttgttatgtaatcgtatcgggagggtggagtgttggtgtttttagtttatttaatttggatggagttgcgggtttattagtttggggattggttttatcgtttgttttgtttagtagtcgcgttttttcggattttttgttttagtttgaattttttttttgttttggttttattttaagacgaagattgtgtaatttagaaaatgtagcgtaagtaattatgtttagtgtgatgttaaatattttttaaaggtagcgtagatttgtagaaattgtagtttgggagaagtgatggtgtttttttttttattattttagtttgttttgattatttttatttatatgatttattgtgatgtttttataatgtagtttggttattatttgggaatttgttggaaatgtagattttggtatttcgtttaagattttaaattgaagaaggttttagtttttttttgtaattagtaatagatgtaatttgtatggttttgatgtaaattgatttggaagaatggttttggtatttatattttggtttttagatgtaggtaatttgagttgaatatttttaaatttgaggtatagtatagaaaaaagaatataaatagtttatataaagtaaaaaaattttttagaaaggatttaagttggttggggcgcggtggtttatatttgtaattttagtattttgggaggttaaggcgggcggattacgaggttaagagatggagattattttggttaatgtgaaattttatttatattaaaaatataaaaaattagttaggcgtggtagtaggtgtggtagttttagttattcgggaggttgaggtaggaaatttatttgaatttgggagatggacgttgtagtgagttaagattgagttagtgtattttagtttgggggatagagtaagattttgtttttaaaaaaaaaaaaaaaaaaaaaaattaggtttaggtaatataatgaggttttatttttataaaaaaataattgttttaattagttaggttgatggtgtgtatttgtgattttagttatttaggagggtgaggtgggtggatcgtttgagtttaggagtttttttttgggatgtttttatttttgtttgtagttttatttgttattttgtgtagatttattttgtttttgttttgttttgttttgttttgtttttgagatagttttgttttgttatttaggttggagtatagtggtataatttcggtttattgtaaatttcgttttt

SEQ ID NO: 1877 - DNA, 2270 bp, Artificial Sequence
  chemically treated genomic DNA (Homo sapiens)
gggggcggagtttatagtgaatcgagattgtgttattgtattttagtttgggtgatagagtaagattgttttaaaaataaaataaaataaaataaaataaaaatagaatgagtttgtatagagtgataaatgaggttgtaggtagaaataagagtattttaagggagggtttttgggtttaagcgatttatttattttatttttttgagtagttgggattataggtgtatattattaatttggttaattaaaataattatttttttgtagaggtggggttttattatgttgtttaggtttgatttttttttttttttttttttttggagatagagttttgttttgttttttaggttggagtgtattggtttaattttggtttattataacgtttattttttaggtttaagtgagttttttgttttagtttttcgagtagttgggattattatatttgttattacgtttggttaattttttgtatttttagtatagatggggttttatattagttaggatggtttttattttttgatttcgtgattcgttcgttttggttttttaaagtgttgggattataggtgtgagttatcgcgttttagttaatttaagttttttttaaaaaatttttttattttatataaattgtttgtatttttttttttatgttatgttttaggtttgaagatgtttagtttagattatttgtatttaaggattaaaatgtaaatgttagggttatttttttaggttagtttgtattagaattatgtaggttgtatttgttgttagttataagagagagttaggattttttttagtttaaggttttaggcgggatgttaaaatttgtatttttagtaagtttttagatgatggttaggttatattgtgagaatattataatagattatgtgagtgagaatgattagggtaggttgaggtggtggggagaggaatattattattttttttaagttgtagtttttgtagatttacgttgtttttgggaaatgtttagtattatattggatataattatttgcgttgtattttttgaattatatagttttcgttttagagtggagttagggtaaaagaggaatttaagttggaataaggagttcgagaagacgcgattgttggatagaataagcgatgaagttagtttttaaattgatgagttcgtagttttatttaaattaaatgggttgagaatattaatattttattttttcggtacgattgtatggtagggaggaattaaaaatattttttttttatttgttattttagttaagtagtatattttttttagtattttattagagtttagtttttttgtattttgtatttataatataggtttattatgaattttgagtagatgaggttattttttttttttttggttttttagtaattaggtaaagtataaggtttacggtgggtatttaataaatatttattgataatttgtttgtaagcgagtcgacgtttattttagttgttgaggtatttacgggttaggttttattcgattttttttattgtttatttagtttttttttaaagtaaagttcgtggatatatttaaggaattggttttattgtttttaaaaattttgtttagttttaattggttagaataggggttttcgtttttgttatatgttgtttagaatgaagtttaaatttaggattttgggagtatgttatgttttttcgaatttgtaggagttttaagggtatttgtattgatatgtatgttatggttgtagaagggggttgggattgtagtatataatagttaaatttggggattttttagatgttttcgtttttttggttagtattttttattgaaggttttttataaaattgtttaaggaaattaggggagtgagtattgttagtagaaaggggattaaaatagatgtatagaggttttttaaaagtttaaaggaatattacgaggttagggaaatatttgtagggttaatgtagagaaattaatagtagttgtgggggaggatagtgaaggtagttatatagtaggtagttgttgttgggttatttagggttttgtcgcggttttatgagcgtttagaaggaaaggttttatgatattttttgtataataattgtatgatataggtcgtttattttttaggaagattttagggtaaagattagtttttaaatagttcgtttggatggttatttttttaatttcgttggtagtatttttagagaatatagagtatagt

SEQ ID NO: 1878 - DNA, 2471 bp, Artificial Sequence
  chemically treated genomic DNA (Homo sapiens)
taggttgtgggggtggtttttgtgtggtgttaagaggaagtcgggaagttaagtttttatgttttatgtatgttgtgttttaggttttgatgttggtttatatataggtggatatttttgagttatttaagataaagtttaaagaggaaatagttttagtggttggggtaagatttagacggattttttttttgggtttcgttttatttgttatattataaggttttaggtagatttgtggttattttttttggtatttaggtataatagttgtttggttgtgggatttttaggtttagcgagtttttttttgtgtttgttggtttttttggttatgggtaggatttttgtggtgtagggagggatacgttagagtttttagtattttatttttaagagagggatagagaattatttagaggggttggggacgttaaaggggtatatgaagattttaatttttagttttttagggttgtagtttagaggtagtttgttttttttttaaaattaaatttaaatttaattgtatttagaagtttttgtattgggaggcgtttgtttaggatgttttagtttggttttgtttttttagatagttagggatttaggttataattggttaatttagcgggcgaattcgagttcgtagtagtgttggttgattgtttttatttagcgttgtaatcggtatatttgtagataggaaattttttttattgaagtttttagtttattatttgagatatttggtgtgggcgggtgatttagagataaataatgagcgggggttttttgtatagtaattaattgttttaattgttaatatgtttaatttattacgtggagattaaggttgcgtcgaggaaggggttttggtttttttttgtttttagattgtagggtttatttcgtaatgttaatgtttatggttttcgttagttgcggttaggcgttaggtatacgggtaacgggtagggttagtattcggttttatacgggagttttgtgtagtatttgggttttttttgtgtgtgtgtgtatcgggtacggaggtattttttttttttgtcggagtttagtttgtgcggacgtagtgtatattcggtataggaagtagagtcggagatgttggtattgttagttgtgtcgtttttagggcgttttattttaattttttagagtggattattttttattgtaagtagaaataaagtttggttaaaggtttatcgtataaattagtagaaaacgttcgtagttgttgatttgggaagtggtttttgaatgtttataaaatttggttttgagtagtagcgaagttagtatatgttcgagcggtttttagtaggcgcgtagaagtcgcgtcgttttcgggaagtagggttagaggttaaggattgtgaaaagtttttatttttagtattaattatgttaggtagattgtttgggggatgtttattttgaaagtataaaaaaataaaatagatttttagtaagggaggatgggcgtgtaggttacggtagttttgttgagtagggaggggtttcgtttgttgtttgttaggttgacgtttcggtttttcggggatatagttttcggtttattggtttgttatatttttatgggtttggtcgagggttgtttttcggtttaatggtaatagtttttttatgttgtgggtgaacggaggtgttagtagatagaggaggagggttagggcgcggtgggagggagaaattcgttattttttttttagagtggagtttatttgggaatgatagtaggaggataaattttgaaagaaaaataaagtggagtttaggatgagaattattagtatattttagagtttaaaatgttatttaatttttcgtagtgtttattataataaatttatttaaaatttatttttataacgtggttgagaatattgtttttgttgattgattattttcgggttaagagttttgcgtgcgtttaggtattttaggtttttttcggttattatttttgcgtttgtgtttattgtataaaagtgaagttttagtcgttttaggttggttttttttttgattttttatttcgagtgattgttttagaagtgtattattttatgatatagtttgtgtttttgggagtttttttttaggagatattgatttttggttagttttacgtaagttcggttagttgatggaggtggaggtaggtgatttgagagggattttggttttgattttgggttttcgtaggggataacggattaggtttagtatagaaaggtttcggagaattaataatattgattaggttgttttcgtttttaatatgtaagttgatagggtgattgggaaaattaggagtttaaattagacggttaggtatcgaggtgggtaggatatttgagtaggtatgttgtgtgtgtcgttatttattttgacgaggattcgtagttttttttgcggcg

SEQ ID NO: 1879 - DNA, 2471 bp, Artificial Sequence
  chemically treated genomic DNA (Homo sapiens)
cgtcgtaaggagggttgcgggttttcgttagggtgggtggcggtatatatagtatgtttgtttagatgttttatttatttcggtgtttggtcgtttagtttaggtttttagtttttttaattattttgttaatttgtatgttgaaggcgggagtaatttagttagtgttgttagtttttcgaggtttttttgtgttgagtttggttcgttgttttttgcgagagtttaagattagagttagggttttttttagattatttgtttttatttttattagttaatcgggtttgcgtggggttggttaggggttagtgttttttgggggagggtttttagaggtataagttgtgttatagggtgatgtatttttgaagtagttattcggaatgggaaattagaaaggaaattagtttggagcggttgaggttttatttttgtgtagtggatataagcgtagaggtgatgatcggggaggatttgagatgtttgagcgtacgtagggtttttggttcggaggtgattagttagtaagagtaatgtttttagttacgttgtaaaagtagattttaagtaagtttattatgataaatattacgaaggattaggtaatattttggattttggagtgtattgatggtttttattttaaattttattttattttttttttaaaatttatttttttattgttatttttaaataaattttattttaaaggggaggtggcgagttttttttttttatcgcgttttagttttttttttttgtttgttgatattttcgtttatttatagtataagggagttgttgttattgaatcgaggggtagttttcgattaagtttatagggatgtagtagattaatgggtcgggggttgtgttttcggaaagtcggggcgttagtttggtaggtaataagcgaggtttttttttatttagtagagttgtcgtggtttgtacgtttatttttttttgttaggagtttgttttatttttttgtatttttaaaatgagtattttttagatagtttgtttggtatgattgatgttgggggtggaagttttttatagtttttggtttttgattttgtttttcgagggcggcgcggtttttgcgcgtttgttgggggtcgttcgggtatgtgttgatttcgttgttgtttagagttaggttttgtaaatatttaggagttattttttaggttagtaattgcgagcgttttttgttggtttgtacgataagtttttaattaagttttatttttatttgtaataaaggatgatttattttgggaggttaaaataaagcgttttaggggcggtatagttggtaatgttaatattttcgattttgttttttgtatcgggtgtgtattacgttcgtataagttgggtttcgataggaaggggggatgttttcgtgttcggtgtatatatatatagaaggggtttaggtgttgtatagagttttcgtgtggggtcgagtgttggttttgttcgttgttcgtgtgtttggcgtttggtcgtagttggcgaggattatggatattggtattgcgaagtgggttttgtagtttggaagtagaggaggattagagtttttttttcgacgtagttttgatttttacgtggtggattaaatatattagtagttaaagtagttaattgttgtgtagggggttttcgtttattgtttgtttttgaattattcgtttatattaggtgttttagataatagattgggaattttagtgaggaggattttttgtttgtagatgtgtcgattatagcgttgagtgaagatagttagttagtattgttgcgggttcgaattcgttcgttgagttaattagttgtggtttgaatttttggttgtttaggggagtagggttaggttggggtattttgagtaaacgttttttagtgtaggggtttttaagtgtagttaagtttagatttggttttaaagaagggatagattgtttttggattgtagttttgaaaaattggaagttgagatttttatgtgtttttttggcgtttttagtttttttggatggttttttgttttttttttgagggtgagatgttgaaggttttggcgtatttttttttgtattataggagttttgtttatggttagaagagttagtagatataggaggggattcgttaaatttgggggttttatagttaggtagttgttgtgtttgagtgttagggagggtggttataggtttgtttggggttttgtgatatggtaggtgagacgagatttagggaaggaattcgtttggattttattttagttattgaagttattttttttttgggttttattttagataatttagagatgtttatttgtgtgtaaattagtattagagtttgaaatataatatgtatggagtatgggagtttggtttttcggtttttttttggtattatatagaggttatttttatagtttg

SEQ ID NO: 1880 - DNA, 2343 bp, Artificial Sequence
  chemically treated genomic DNA (Homo sapiens)
ttgttcgtataagtttatgaggtgtgggtgggtttttgggagcgtgtttttagggttaagggtgggttttttatggtattgattatttatttttatttacggttttttattgtttttagaataaagttttttcgtcgtagtttatttggtattgtatttttgatttttgtcgtttgcgcgggtttttttttttgttgattttattcgtttttttgtgttttaggcgtatttagttttatgtatttatttatttatttttgtaggttggggtataggggttgaagattggataggggagtttgagttttagttttatttttgtcgtgtattgaatttaaatttcggtttttttttttagtagattgtatatatttgattgtttggtttgggggtttttgcgaaggttaaaggagtgaatgtttattagtgtgttttttgttatatatttttttagtatcgagttttattgttttagtttggaattcgtttattgttttttatttataggttttcgtttgagttaggttattgaaggggtttaggatacgttattttagaatatattattttggtatattgatttttttgtattaaaggtattttagaaatagtaggtgtagaaagggggttttgatttttttttttttttttgaaagtaggagttaaaacgttttgtgaaagacgttttttttatgttaggaggaggaaagatattattagataaggagagtcgaggttaaaagaaatttgtatgaatagattttttaatttttatttttttagttatataattgttattttatgtttaatttggtataaaagtttttatgtttagttatttttttgggttttggttatttgggcgggaggcgggggggtttttttgtatatgtaaatgaaatttgtatgttttttttttgttgatttgttttatgttagtttaattttttagtttagttagagattttaagatagtaaagaagggtttttttttttttattttattattattttgtatttttttgtttttattttcgttttttatttagtagagagagtgagtttattataaatataagttattttagttgtttttttgagaattttttatggttatttgtttttcgttaaataaaatttatagtttcgatcgcggtttagggattttatgtaacgagttttagtttgcgttttcgttattcggtttttttttcgttttaaagtattagggtttttatttgaaatttatcggtgtcgcgagtttttagtaggttatttcgggtttttttttttatttttagtttggttaggtattttttgttttggtagttttttttagagttttttttttttttaatatttttttttttaggattttttatttgtaatgtaatgattttttaatttgtttttattttattaaagtattgtttgtaagtaaatttagaaattagtagaatagttttcgttttatgttttttatgtttcggtgtatatattttaatattttgagtggatgtttgaattcgtggattatagtgaatttgtatatatatgttattatttttttttgtatgatgttttatatatttatggtaattttttttttaaaagaaatagggtttttttatgttggttaagttagttttaaattttaggttttaagtaatttttttattttagttttttaaagtattgggattataggtatgagttatttcgtttagtttgataattttttttttttttttgagacggagtttcgcgttgttgttcggattggaatgtagtggtgcgattttggtttattgtaatttttattttttaggtttaagcgatttttttgttttagtttttcgagtagtagggattataggttgataatttttttttaaataaaagattttatttatgtattattgaatttagtttattagtgtagagtatatgaataaagagaaaaagtatttttttaattaaatatgtttagttgtttagatagtggtgatatttttagtttgttatggtaatatgattataattttgatataatatgaatatgtgtagtattttatgtttaattttttatagatttagtttggttttttttaatatttttttttggagttgtatttgatgttattattagtttttatatagatttattggggaatgggataattttgtttttgttttttgtgtaggaattatttgattttgaaagttttgtgagaagttgtggcgagaaacggagttaattatatattacgatggtggagaaagataatgtttaatttataaattaggtatagttaagagacgaatagtaataattaataatat

SEQ ID NO: 1881 - DNA, 2343 bp, Artificial Sequence
  chemically treated genomic DNA (Homo sapiens)
gtattattaattattgttgttcgttttttaattgtgtttaatttataagttaaatattatttttttttattatcgtggtgtgtggttgatttcgtttttcgttatagttttttataagatttttaggattaagtgatttttgtataagaaataaaagtaaaattgttttattttttagtggatttgtatgaaaattggtaataatattaggtatagttttaaaaggagatattggaaagaattaagttgggtttataaggaattgagtatgagatgttatatatatttatgttgtattaaggttgtgattatattattatagtaagttgaaaatgttattattatttggatagttggatatgtttgattgggaaggtattttttttttttgtttatatgttttgtattagtaggttgggtttagtaatatataggtgagattttttatttaaaaaaaagttattagtttgtaatttttgttattcgggaggttgaggtaggagaatcgtttgaatttgggaggtggaggttgtagtgagttaagatcgtattattgtattttagttcgggtaatagcgcgagatttcgttttaaaaaaaagaaaaaaattattaggttgggcgaggtggtttatgtttataattttagtattttgagaagttgaggtgggaggattgtttgaggtttggagtttgaggttagtttggttaatatagggagattttgttttttttaaaaaaaaaattattatgggtatgtaaaatattatataggaaaaaataatagtatatatatataggtttattataatttacggatttaggtatttatttagggtattgggatgtatgtatcgaggtataaggggtataaagcggggattattttattggtttttaaatttatttgtaaatagtattttgataaaataaaagtaaattaaaaaattattgtattatagataaggaattttgaaggagggagtgttggagaaggggagggttttggagaaggttgttagagtaggggatgtttaattaggttgaaggtgaagagggggattcggagtggtttgttagggattcgcggtatcggtgagttttagatggaggttttggtgttttagaacgagaagagggtcgagtggcggaagcgtaggttgaggttcgttatatggggtttttaggtcgcggtcgggattgtggattttatttgacgaagaataggtggttataggaggtttttaaggaggtagttgggatgatttatgtttgtaatggatttattttttttgttgagtagggggcgagggtggaagtaggggagtataaggtgatggtggggtggaggaggaaaaatttttttttattgttttagggtttttggttgggttgaagaattaaattgatataaggtagattagtaggagaaaaatatatagattttatttatatgtataagggagttttttcgtttttcgtttaaatgattaagatttaaagaagtgattaggtataaaggtttttgtattaggttgaatatagaatggtaattgtgtaattaggaagataaggattaaaagatttgtttatatagattttttttggtttcgattttttttatttggtaatgttttttttttttttggtatagggagggcgttttttataaggcgttttagtttttgtttttaggaagaaaaggggaggttagagttttttttttgtatttgttgtttttgaagtgtttttagtgtagagaaattaatatgttagagtggtgtattttggggtggcgtgttttgaatttttttagtggtttggtttagacgggagtttgtggatggagagtagtggacgggttttaggttggagtagtaaggttcggtgttggggaggtgtgtggtagggggtatattgatgagtatttatttttttaattttcgtaagaatttttaggttaggtagttaggtgtgtataatttattgaaggagaaaatcgaagtttaagtttagtgtacggtaggggtagagttggggtttaaatttttttgtttagtttttagtttttatattttaatttgtaggaataagtgaatgaatatatgaggttgggtacgtttggggtatagaggagcgagtgaaattagtagaggaggaggttcgcgtaggcggtaggaattaaggatgtagtgttaggtgggttgcggcgagagagttttattttgagggtagtgagaagtcgtgggtaggggtgggtggttagtgttatggaaaatttatttttgattttgaggatacgtttttaggagtttatttatattttatgaatttgtacggataa

SEQ ID NO: 1882 - DNA, 2399 bp, Artificial Sequence
  chemically treated genomic DNA (Homo sapiens)
tcgtaggatatataggcggttaggttgagtttttaggaggtgaaatggttttgtttatattggttatggttttttttttttttgttttgttagtttttcgtcggtttggggtttttatatatgtttgttggtatagttttgttttttttgaattttttttttttttttttttgttgatttagtgttttttttcgtttgggtcgtgtaaggattttgggttttgtttttttattttttttcggtttgtttttagtttttatggtgatgtttttgttgggtggaagttagttttttggggtgaatttaggtttttgttgttttagtgtttggttattttttgttggatatatttatttatatttttttgggatatttttttttttatttttggtttttgaagttggggaaatattttttttggtaggtgaggtttgagtgatttagattcgagtagttttggatattatatttttttagttatatagagatggacgtgaggattgggtatatagaggggatatacggaaatgttggttagggttttggttttttttttgaatttgttattgagaggatagaaagtttttggtttttgttattattttgttagtagagggtatttagatattttatattggaagttggaaagatagcgtgtgtgtttttattaagttatatttgaagtttggtttgtatttggatttgttatttttgtgggttgataaaggtttttttgttttagtgagtttttaattgtatttgtacgagtattagttagtataggttatttaaattatagatttgtaggttgggaaggaggtttattttttttatttgttttttagaagtatttttttagttgaggtatagttttagggaagggtcggtggggatagattatgggttaggattgttttgggttaggatttgggattttgttgtagttttgttgatttgtagagaaatgtttggtttgtgtaggtttttagtaattatgttgtagaagtgggtttggtttattttgaagatttttttttgttgtggtattttttggtgttggaggaatgagtgttagttggtgttttttgtttggtttgaaaggttgatatgaattgtgtatttgattttggtagttgattgtgttgattttttagttttaattataatgagtatgagtatgaatgttttgaaatatagacgtatacgagttgttaaatacggtgagttattatatttttaatttttaggtaagtttaggtgttaggggaagcgatttatatattaaagagatgaagttttggtttttgcgggcgggggcggggagagggttggggagttgttggttttggggtgggagcgtatatttttgtttgttagattagaggatgtttgagaggtgatagagatggggttttttagttttgtgaaattcgagataggtttgataaattattttaataaaaagttttttgaagagaataattgggggaattgggtggagttttggtagtttttataggttggtaggtgtcgagggataggcgatattattattttacggggagtgtaggtacgtgtgcgtgagcgtgaatacgtgtgtaaatgtgtgtgtagttagtgtgtgtatgtgagtgtgtatgttgtgaggatgtgtgtgtgaagggtgtttgtatgtgaacgtgtgtgtgttagtgtgtgtatgtgagtttgtgtgttgggtgtgtgtggagggtatataagtgtgtgttagtgtaagtatgtatgttgtgggggtgtgtgtgtgggtggagggtgtataagtttgtatgaatgtgtatgtgaatatgttagtgtgtgtatgtgtgtgtgttgtggcggtgtatgagtgtgtgtggagggtgtataagtgtgtatgagtgtatgtgtgtgttttgtggggtatatgtgtgtggagggtgtataaatgtgtatgagtgtgtatatgaatatgtgttaatgtgtgtatgtgagtgtgtgttggggtgtgtgagttgtgttgagggtttataagcgtgtatgagtgtgtgtatggatatgtgtgttagtgtgtatgtgagcgtgtgtgtggacggtgtgtaagtgtgtatgtgtgtgtaaatatgtgtgttagtgtgtgtatgtgtgtattgtgggagtgtgtgtggagggtgtgtgtgaacgtgtgtgtagtgtgtgtatgtaagcgtgtatgtttgtgagtgtgtgaagggtgtataagtgtatgagtgtgtgtatgcgaatatgtgtgtgttagtgtgtgtatgtgagcgtgtgtgttgtggggggtatgtgtgtggagggtgtgtgtatgtgaacgtgtgtgtagtgtgtgtatgtaagcgttggtgttgggtgtgtgtgaagggtgtgtaagtgtgcgt

SEQ ID NO: 1883 - DNA, 2399 bp, Artificial Sequence
  chemically treated genomic DNA (Homo sapiens)
acgtatatttatatattttttatatatatttaatattaacgtttatatgtatatattatatatacgtttatatatatatattttttatatatatattttttataatatatacgtttatatgtatatattaatatatatatgttcgtatatatatatttatgtatttatatattttttatatatttataaatatgtacgtttatatgtatatattatatatacgtttatatatattttttatatatatttttataatgtatatatgtatatattaatatatatgtttgtatatatatgtatatttatatatcgtttatatatacgtttatatgtatattaatatatatgtttatatatatatttatgtacgtttataaatttttaatataatttatatattttaatatatatttatatgtatatattaatatatgtttatatatatatttatgtatatttatatattttttatatatatatattttataaaatatatatatgtatttatgtatatttatatattttttatatatatttatatatcgttataatatatatatatgtatatattaatatgtttatatatatatttatgtaggtttgtatattttttatttatatatatatttttataatatgtatgtttatattaatatatatttatatattttttatatatatttaatatataagtttatatgtatatattaatatatatacgtttatatataaatattttttatatatatatttttataatatgtatatttatatgtatatattaattatatatatatttatatacgtgtttacgtttacgtatacgtgtttgtatttttcgtggggtggtagtgtcgtttgtttttcggtatttgttaatttgtgggagttgttaggattttatttaatttttttaattattttttttagagaattttttattaagatgatttgttaggtttatttcgaattttataggattaaaaagttttatttttgttattttttaggtattttttgatttgatagataggaatatgcgtttttattttagagttaatagttttttagtttttttttcgttttcgttcgtagaaattaggattttatttttttgatgtataggtcgttttttttggtatttaagtttgtttgaaagttgggaatatgatgatttatcgtatttggtagttcgtatgcgtttatattttaagatatttatgtttatgtttattataattagggttggagaattagtatagttaattgttaaaattaagtgtataatttatattaattttttagattagatagagagtattagttgatatttatttttttagtattaggaaatgttatagtagaagagagtttttaagatgggttagatttatttttgtagtatggttgttgggagtttgtataggttaggtatttttttataggttagtagagttgtagtaagattttaggttttgatttaaggtagttttgatttatggtttatttttatcggtttttttttggagttgtgttttagttggggaggtatttttggaaggtaggtggaggaggtaagttttttttttagtttgtaagtttgtggtttaggtggtttatattaattgatattcgtataggtgtaattgagaatttattgaggtaaaagggtttttgttaatttatagaagtgataagtttaagtgtagattaggttttaggtatggtttgatggaggtatatacgttgtttttttagtttttagtgtagggtgtttgggtgttttttattgataagatggtagtaggagttagagattttttgtttttttagtgataagtttagagggaaagttagggttttggttaatattttcgtgtgttttttttgtgtatttagtttttacgtttatttttgtgtggttggaggagtgtaatgtttagagttgttcgggtttaaattatttaggttttatttgttaggaaaggtgtttttttagttttagggattagaagtggggggaaggatgttttaggaaaatgtaggtggatgtgtttagtaaagagtaattagatattggggtagtaaggatttaggtttattttagaaggttggtttttatttaataaagatattattatgggagttagagatagatcgggaggaggtgagaggatagagtttagggtttttgtacggtttaggcggaagggggtattgagttaatagaaaggaagaaaaagggagtttagaggggatagggttgtgttagtagatatgtgtggggattttaggtcggcgaggggttggtaaggtaggaaggagggaggttatggttagtgtaagtagggttattttattttttgggagtttagtttgatcgtttgtgtgttttgcgg

SEQ ID NO: 1884 - DNA, 2431 bp, Artificial Sequence; identical to SEQ ID NO: 1274
  chemically treated genomic DNA (Homo sapiens)

SEQ ID NO: 1885 - DNA, 2431 bp, Artificial Sequence; identical to SEQ ID NO: 1275
  chemically treated genomic DNA (Homo sapiens)

SEQ ID NO: 1886 - DNA, 2497 bp, Artificial Sequence
  chemically treated genomic DNA (Homo sapiens)
ggtagtttttttgtttatagtatgggttattaggttaaattttgttattatcgtggggaatttgattcggagttttatggttattcggatggattttgcgatgatagttatatttttggatttgtgagatagatagagaagttaggagatagtgtttagtatcgatagagtataaattttagagtatatttttcgtgtagggttgggttagttttaagtgtgtaggtttcgttttttaaatttgaggtatttttgtttttttgattttattttgattaggttattgtgatttttgagagatatgtagtttaaatttatttttattaaagatttttgttggttttgggggtatttgtagtttttgaaaagtagatggggttagaggatttacgggaatagttttatttgtttgcgtttagaggaggttaggtggttttgtttttagttttttttgtatttttgtcgggggtgtagatatggatgtagtttaggggtagttttttgtttattgtatatttgtaaagggttataggttatttaagtttttgatgggtcggttggatttagtaattatatggttttttgttgattaagttagtaagattttgggtattgtagaattttataggggtaaggtaggtagtatgataataaaagttttaaaatatagggtttggcgtaagtttacgataggtttaaggtttttgttttgttattggtttttttgttttaattttcggttttgtggggataaagtttttttggtttgttttatttatggtttttttttagagtttaggtaaatttgggggtattgatgtatttagtttagtttttatatttttttgttattggttttgggaaggggtatttggtattagggagtttttgagtagaacgtgggtttattttgtaagtttttttttagggggatcggtataaagttagagtttagtttttttaggttttaggttttatggaagggaaggggatttaggaagattgggtatgggaggaggtttttggggagttagtgttttttagagtttaggttcgtgggtgagttgagtagagggagtcgttgtcggattttttcggtgttcgtttcgtgtttgatttcgagggattttattggttgttgtttttgtagttgcgattatggataggttttagttttagattggttgttttttaaagtgaggggaggggttttgtttggtaaagttagaaggataattaagttgtaaagttttttgtgtttttttgggaaaaagagtgggttttttatttacgtgttaggttacgtatatggtattattggaggtttttatacgtagatttgagttagtgttatttagggtgttttcgtgattaaggatttatatataattatatatagaatttagaggtaaattgaaattaaaaacgggttaattatttaaatatttaggtaaaattattatgtttataaatgagttattaggttaatgtggggttatagtcgagaattatttgggaaatttatatattttttattttagtttgggggtgaagatttgaattagaagtggttttaggtagtaatttattgttgggttatcgtatttatttaggattgtgtttttatataggtatagtatagttttttggtattagtgttgggtttttttcggttttttagtttcgttttttatttttttttttttagtttagtagttttgtttgtattttagttttttaattcgagttttttagtaatatttttttttatttgtgattcgaataaatgattttgattttaataaatttagggtgagtttttataaatttttgagttattttttggtaagtttttattgattatttttcgttatggtgttttttattgagtttatatatttgggaagaaagtataattaggagtcgttaggtgagtagtgagagacgttattttttttttagttatttttgtttagttatttttggttagttatttttgtttaattattttttttttagttatttttttttagttatttttgtttagttatttttgtttagttatttttgtttagttattttttttttagttaatttttttttagttattaacgagttttgggaaaagtagatggggttaggggatttataaaatagttttatttgtgtttggattaggttaagtggttttgtttttaaaagtttagttaggttggatttgtgttttttttgtttaggttttttacggttttgggtattgtttttgttgttgtatggggaatttttagttggttttgggataattttgatgttgatgtttatttgttttttttattgttgggttattgtatttaaaatagtatatggtatacgcgagggtaggtgtttattaagtatttgtataatggttgaagagtaggttacggggggagaggatgaaagttagaaagagtgatttgagaatgacgttattttttattatttgtttattttttta

SEQ ID NO: 1887 - DNA, 2497 bp, Artificial Sequence
  chemically treated genomic DNA (Homo sapiens)
tggggaggtgagtaggtagtggggaatgacgttatttttagattattttttttagtttttatttttttttttcgtgatttgttttttaattattatgtagatgtttaatgggtatttattttcgcgtgtgttatgtgttgttttaagtgtagtgatttagtaatgaaggagataggtgggtattagtattagggttattttagagttagttaggaattttttatgtagtagtagagataatgtttaaggtcgtagaggatttgaataagggaagtataagtttagtttggttggatttttgggaataaggttatttggtttaatttaaatataaataaaattgttttgtgggttttttgattttatttattttttttagagttcgttgatggttgggaaggagttgattgggaaggaggtggttgggtaagggtggttgggtaggggtggttgggtaagggtggttgggaaggggtggttgggaagggggtggttgggtaggggtggttggttaggggtggttgggtaggggtggttgggaagggggtggcgttttttattgtttatttgacggtttttggttgtgttttttttttaggtgtatgagtttagtggagagtattatgacgaagagtggttagtgaagatttattaggaagtagtttagaagtttgtggaaatttattttgagtttattggaattaaaattatttattcggattataggtgagagagaatattgttgaaaagttcgggttgggaggttgggatgtaggtagagttattaggttgggaggggaggggtgagaagcggggttgggaggtcgggagaggtttagtattggtgttaaggagttgtgttgtgtttgtgtgagagtatagttttaggtaagtgcggtgatttaataatgaattgttgtttgaagttatttttagtttaggtttttatttttaaattgaaatgaagaatgtgtgaattttttagataattttcggttgtgattttatattggtttggtgatttatttatgagtataatggttttgtttgaatgtttggataattggttcgtttttggttttaatttgtttttgggttttgtgtgtggttgtgtgtgagtttttgattacggagatattttgagtggtattggtttaagtttgcgtgtggggatttttagtagtattatgtgcgtggtttggtacgtgggtgaaagatttatttttttttttagggaagtatagaaagttttgtagtttaattgtttttttgattttattagataagatttttttttttattttaaagagtagttagtttaaggttgggatttgtttatggtcgtagttgtaagggtagtagttagtggggtttttcggagttaggtacggggcgggtatcgaagggattcggtagcggttttttttgtttagtttatttacgagtttgggttttggagggtattgattttttaggagtttttttttatgtttagtttttttgagttttttttttttttatggggtttggggtttggaggagttaagttttggttttgtgtcggtttttttaggagggagtttgtaggatgggtttacgttttgtttagaggttttttggtgttaggtgtttttttttagggttagtggtaggagggtgtgagggttgagttgagtgtattagtgtttttaggtttgtttaggttttggggagaggttatgggtggggtaggttaggaaggttttatttttatagagtcgaggattggagtaggagagttagtggtagggtaaagattttgagtttgtcgtgggtttgcgttagattttgtgttttggggtttttgttgttatgttgtttgttttgtttttgtagggttttgtagtatttaggattttgttgatttaattagtaagaggttatatggttattgggtttagtcgatttattagggatttgggtgatttgtggttttttgtaggtgtgtagtggatagagagttgtttttgagttgtatttatgtttatattttcgatagagatgtagggagagttgggaataaggttatttggttttttttaaacgtagataaataaaattgttttcgtgggttttttgattttatttattttttagagattataggtgtttttagagttagtaagggtttttgataagaatggatttgggttatatattttttagggattataatggtttggttagggtggggttaggagggtaggggtgttttaggtttgggaaacgggatttgtatatttggggttggtttagttttgtacggagggtgtgttttggggtttgtgttttgtcggtgttgggtattgttttttggtttttttgtttgttttatagatttaaagatgtggttgttatcgtagaatttattcgaatggttatggggtttcgaattaagttttttacggtggtggtagggtttgatttggtaatttatgttgtgaatagaagggttgtt

SEQ ID NO: 1888 - DNA, 2272 bp, Artificial Sequence
  chemically treated genomic DNA (Homo sapiens)
ttgaggttaaatatttgagattagttagagtaatatagtgatattataatttcgataaaaaaaaaaaaaaaaaaaaaaaacgtgaaaaaattagttacgtatgatgttttatgtttgtagatttaattggttgggagattaaggtaaaaggatggtttggatttaagagtttagggttgtggtgaattatgattaaattacggtatttttgtttcgataataaagattatattttaaaaaaatataaaataattttataaataaggattttaatgttataagtttttttataggttgtaaatgttttatgttaatttgaattgtattttaaaaagtaatgatttttggggtaaaggttatagaatatagttttaagaaataaatttatatatttattttataagaaataaatttatatttttgtgttataagagtttttgaaggagatattaaacgtagaaaggaaaaattagtattagttattataaaaatatatcgaattgtaaagattattgatattataaagaaattgtaaattaatgggaaaaataaaaagttagtaatattatgataggataaattttatatgtaataatattaaatttaaatgtaaatgggttaaatgttttagttaaaagatatagattggtaagttggataaagagtaaagatttattgttgttttgtatttaggagatttattttatgtgtaaagatatatataggtttaaaataaagggatggaggtatatttattaagtaaatggaaagtaaaaaagagtagggtttgtaattttagtttttgataaaatagatattaattgaaaaagattaagagagataaagaatagtattataaagtagtgttatttgtttttttttaggtttttgttttattagttattaggtggtagttatttaggatgttggaatttggttatttttgttttttttagtgggtgaggttggtggttgttttatttgttttaggtatatttttaatagaggtggttgtttgttttttaagttagtttggttttgtttggtatgtataggtttcggggatcgatatgttgttttgattgagatcgttttgattttgttaaattttacgtttggtttgggttatagaagtataagttttttgggtggtattattggttgttttttggattggaatataaagttttttttaagatgatttgtggtttgttttttggtaattaataagttcgtagtgttatacgatttatgagatatggattgaaggtttaaagggagtgtatattatgttttagagttagttgttttttttttttatatggttttatttgtagtatagttgttgtattgaggtttgtgtatgttgggtaagggtaagttggtttaaagggtaattagttatttttgtacggatgtgttagtagtaggtagattagttattaattttatacgttgttagttaggttaaattagtttttttattataaaggtagggttatagtgttatttggtttttttaaggtttttgtttttttagttattaggtggtatttatttaggttttgggaatttggttatttcggttttttggagtgggtgagttggtggttgttttatttgttttaggtgtatttttgtagaggtggttggttgttttttgagttagtttggttttgtttggtatgtatagattttagttacggatacgttattttaagtgagtttgttttgtttacggttaaattttaagtttggttagggttatagaaggtagagtttcgagggtggtaattttggttgttttttgtatttgaatataaagttttttttaagatggtttatggtttgttttttggtaattaagaagtttatagtgatataagatttttgaggtaaggattggagtttttaaaggtagtatatattttgtttttgagatggttgttcgttttttttatatggttttatttgtagtatagtagtagtattgaggtttgtgtatgttgggtaaggttaagagggtttaaagagtaattagttatttttgcgagggtgtgttaggagttgggggtatagttattaattttattcgttgtaggatatggaatattagtttttttaataaaaaggtagggttaagggttatttgttttttttaaggtttttgttatattagttattaggtggtagttatttaggttgtgggaatatggttatttatttttttgattgggtaaggttggtggttggtttattttttttagacgta

SEQ ID NO: 1889 - DNA, 2272 bp, Artificial Sequence
  chemically treated genomic DNA (Homo sapiens)
tgcgtttggaggaggtggattagttattaattttatttagttaaggaagtggatggttatgtttttatagtttgagtggttgttatttgatggttgatatagtaaaggttttaggaaaagtagatggtttttggttttatttttttgttagaagaattgatgttttatgttttgtagcgagtgaggttggtggttgtgtttttagtttttggtatattttcgtagaggtgattggttgttttttgagtttttttagttttgtttagtatgtataagttttagtgttattattgtgttataaatggagttatataggggaaacgagtagttattttaggagtaaggtgtatgttgtttttgggggttttagtttttgttttaagggttttatgttattgtgggttttttggttgttaagaggtagattataggttattttgagaaggattttatgtttaagtgtagaaagtagttaggattattattttcgggattttgttttttgtggttttggttaaatttagaatttggtcgtagataggataagtttatttggagtagcgtgttcgtagttggggtttgtgtatgttaggtaaggttaagttggtttaaagagtaattagttatttttgtaagggtgtatttagagtaggtggagtagttattagtttatttattttaggaagtcggggtagttaggtttttaaagtttgagtgggtgttatttaatggttgaagaaatagaggttttaggaaaattagatggtattgtggttttatttttatggtagaagagttgatttagtttgattggtagcgtgtgaggttgatggttggtttgtttgttgttggtatattcgtgtaaagatagttggttgttttttgagttagtttgtttttgtttagtatgtataagttttagtgtaataattgtgttgtaaatggggttatatagaggaaaggagtagttggttttggagtatggtgtgtattttttttgggtttttagtttatgttttatgggtcgtatgatattgcgggtttgttggttgttaagaggtagattataggttattttgaggaggattttatgttttagtttagaaagtagttagtggtattatttaggggatttgtgtttttgtggtttaggttagacgtagaatttgataaagttaggacggttttagttagagtagtatgtcggttttcggggtttgtgtatgttaggtaaggttaagttggtttaaagagtaagtagttatttttgttaagggtgtgtttggaataggtggagtagttattaattttatttattgaaagaagtagggatggttaggttttaatattttgagtggttgttatttgatggttgatggagtagaggtttgaggaaaagtagatggtattgttttgtagtgttgttttttgttttttttgattttttttagttaatgtttgttttattagagattaggattgtaaattttgtttttttttgttttttatttgtttggtaaatatatttttatttttttattttaagtttatgtgtgtttttgtatatgagatgggttttttgaatataggataataatgggtttttattttttatttaatttgttagtttgtgttttttaattggggtatttagtttatttatatttaagtttagtattgttatatgtgaaatttattttgttatgatgttgttagttttttattttttttattagtttgtagtttttttatagtgttaatggtttttataattcgatatgtttttgtagtggttggtattggttttttttttttacgtttagtgttttttttaggagtttttgtaatataagaatgtggatttattttttgtaaggtaaatatgtggatttattttttgggattgtattttatggtttttattttaagaattattattttttaaaatgtaatttaaattagtataaaatatttatagtttatggaaaggtttgtggtattagaatttttatttataggattattttgtgtttttttgagatatggtttttgttatcgaggtagaagtgtcgtggtttgattataatttattatagttttgaatttttgagtttaagttatttttttgttttaattttttaattagttggatttataagtataaggtattatgcgtggttaatttttttacgttttttttttttttttttttttttgtcgagattatggtattattatgttgttttggttgattttaaatgtttgattttaa

SEQ ID NO: 1890 - DNA, 2313 bp, Artificial Sequence
  chemically treated genomic DNA (Homo sapiens)
taggtaggggttttaggtttaggggtttttgagtagggaagattttagtaggaggtagggagggtgtttttttttacgtatagtattgtaggggtgcggtggggagggggtttttttttacgtatagtattttcggggtgagtttgaggggagttagtattaaaggttattgggatttagggttttggtagaggaagcgaggtttggggtagaggggatttggtttgggcgggggaggggttgcgattaagtttagggtattaggtggaggagggtagagttcggagatggttattattattcgggagtcgtttttgtttttagtttcgaggtagacgtttgttttggtggggtatgtttaggttacgggaggtgggtaggattattgtgggtgttgtaggggttgtcggcggaggttagggtatagggaggggagaaattatagtttggattttatttttagtttaagttatacggaatcgggggtttttgtatagaggtttgttttgtagtatggttttgagtagttgtatatatttaggtttaagtggtttttttaattatttttgtgtttacgattgtgtagggaatggttaggattttagggaaatttttcggatatttggcgttgttcgtttattttagatttgtttttttgttttttagtttttttttagtcggtttttgaggttttttttaggaggaggaggtttttgaggttttttttgtgagggtcgatttgaaggtttgagacgtttttttttatttttgtaggtgattttttagaggattttgggtttttagagtcgagggttatggagatttttggggtttatttatggttttgggattgtttttattttggtgggattaagttataatttggagtagtttaaggttggtataatagatatttataaattaataaaaataattgtgaaaatataagtaaaataagttcgtcggtatttaagagttttgtagtagtagggttagtttgagagttgttttttttgttttatttggggttttagggcgttgtagttcgttattagagggattagatgttcgtggttttttaagggtttagtgtggagttatttatttttattagtatagagaagatttacgttttgtggttgaagtaggggggtagttttttcgatagttgtaggtcgttcggtttcgcgtttggggtatagttggcggggttttgtcggtttcgttttagcgtgggtattcggttataggttagtttttttttgaatggtttttgggttatggtatttggggatattatagttgtgttgaatgtatagttacgtgttattagttttttatttggaataaaattattatcggttttggttattttgaggaaattttaataagttgtttttaagaaatattttttaataaaagaaatattgtttatattgaagtgttttaaatttgaagaagaaaatgagtatttgaatttaaaagtgaaaaagaaataatttttttagaaaaacggatttgaatagtttgggtttagggtgagattttatattttaaatgttttattgatttatttgggttttttaggtgtaatatttgataatatttatcggtaatttcgtttatgaatatattacgtcggggatttaagtacgttaaattgttttaattggtagttaaacgagagattgtaaaatatgtttttatttaacggtttaatgtttgagtatttatttttttcgttgttttgtcgttgggagtattggtttttgggtgagggatttttagtaagaagtatttataaatgaaataaaagtttagtaaatttgagttgaaggtaggggaaggagagttgttttttgaatattaatgaggggaggaatcgggtggatcgtagaaatgtttcgtgttggttgtgtaaattattgtttcggagttgttagaatttaattaggaaaggaaggggttttgtttgtgttattcgttatagagttcgggttttttagaagaaagaagcgtttttaagaatagaattttattaagtatatattttgagtaggttttgtttttgaaacgtaattgtttattcgaaggttttttatatttttttaagtagtttttttttattttttatagttatacggtgggaattttttttatacggttatataagtatttacgtattcggtttagttgtgtggttttgggcggtttcggattcggttttgtggtttgcgtgggtagttcggatggttggtgggttcggttttgttgttttttttatttttgtttattaagtagagaaaaattata

SEQ ID NO: 1891 - DNA, 2313 bp, Artificial Sequence
  chemically treated genomic DNA (Homo sapiens)
tgtggtttttttttgtttggtgagtagagataaagggggtagtaggatcgggtttattagttattcgggttgtttacgtaaattatagggtcgaattcggagtcgtttaaggttatatagttaagtcgagtgcgtgaatgtttatgtgatcgtgtgaaggaggtttttatcgtgtggttgtgggggatggaaaaaggttatttggaaagatgtagaagattttcgagtaaatagttacgttttagaaatagagtttgtttagaatgtgtatttggtgggattttatttttagggacgttttttttttttgagagattcgagttttgtggcgagtggtataggtagggttttttttttttttagttgggttttgatagtttcgaggtagtggtttatataattaatacgaaatatttttacgatttattcgatttttttttttattgatatttaggaagtagtttttttttttttgtttttagtttaagtttgttgagtttttgttttatttgtgaatattttttgttggaagttttttatttagagattagtgtttttaacggtagagtagcgggggaggtaagtgtttagatattaagtcgttgagtagaggtatgttttgtaatttttcgtttagttattaattggagtagtttaacgtgtttgagttttcggcgtgatgtgtttatggacgaagttgtcgatggatgttgttaggtgttgtatttggagggtttagatggattaatgaggtatttaaagtgtagaattttattttgaatttagattatttaggttcgtttttttaggaaagttattttttttttatttttagatttaagtgtttatttttttttttaaatttagagtattttagtatgaataatattttttttgttaaaaaatattttttggaaataatttattgaagtttttttagagtggttaaagtcgatgataattttattttagataaagaattggtgatacgtggttgtatatttagtatagttgtggtgtttttaagtgttatgatttaggagttatttagagaggagttggtttatgatcggatgtttacgttggagcggggtcggtaagatttcgttagttatgttttagacgcgaagtcgagcgatttgtagttgtcgaagagattgtttttttgttttagttataagacgtgggttttttttgtgttgatgggggtgagtagttttatattaagtttttggagggttacgagtatttggtttttttggtgacggattgtagcgttttggagttttaggtgggatagagagagtaatttttagattaattttgttgttgtagaatttttggatgtcgacgagtttgttttgtttgtgtttttataattatttttattaatttatgggtgtttgttgtgttagttttgagttgttttaggttgtggtttagttttattagggtagggatagttttagggttatgaatgggttttaggagtttttatgattttcggttttgggggtttagggttttttgaggggttatttgtaaaggtgggaggaggcgttttaggtttttaggtcggtttttatagagagaattttagggattttttttttttagggagggttttaggggtcggttgggagggagttggggaataaaggaataggtttggggtggacgggtagcgttagatgttcgagggatttttttggggttttggttattttttgtatagtcgtgggtatagagatgattggaggagttatttgggtttgagtgtgtgtagttgtttagagttatgttgtaggataggtttttatgtagggattttcggtttcgtgtagtttgggttgagaatgagatttaggttgtgattttttttttttttgtgttttggttttcgtcggtagtttttgtagtatttatagtggttttgtttatttttcgtggtttgagtatgttttattaagataggcgtttgtttcggagttggggatagaggcggttttcgggtggtggtggttattttcgggttttgtttttttttatttggtgttttggatttggtcgtagtttttttttcgtttaggttagattttttttgttttagatttcgttttttttgttaggattttgggttttagtgatttttgatattgattttttttagatttatttcgggggtgttgtgcgtgagagagagttttttttttatcgtatttttgtagtgttgtgcgtgagagagagtattttttttgttttttgttagggttttttttgtttaggagtttttgggtttggagtttttgtttg

SEQ ID NO: 1892 - DNA, 2492 bp, Artificial Sequence
  chemically treated genomic DNA (Homo sapiens)
tttatttattaagtagggtggttattttttattttataggtgggtggtgtgaggtttttaggtgaaagggttttgtatataggaggcgtttaataaatgtttgtggcggttgtaataatttttcgggggtgaagtaggaagtttgaggggtttagaaatgagagagatagagatagggagagatagagagagagagagagatagagagagagagagatagagagagagagagatagagagagggagagagagagggagagagagagagagagagagagagagagggagagatagagagagagagggagggtttttttttatttttaggtcgggtagttaggttttttttatttagatttaattttttttattttgggttttgggtttttttttgttttgtttagtatttgggagttgggggttttcgttgtatggttgagtgttttcggggatttttattttcgtatttatttttggtttagtttggttttaggtttttttttttaggatatttgtagtttcggttggtttttcgttttttagagcgggtttgatttttgtgttttgggaggaggggtttaggtttggtttggttatttatgtgtttattttgtagatggttatggtggatttgtaaaattggtttatttcgggggttatggaggggttgtttcgggtttgagtaggaggttgggagttggtggcgatggtatagtcgggagtagtggtaggtagttttttaggtgtttacgatttagttggtagcgaggaagtttcggagagggatttggagatggaggtttgttttagaggagtggtagtttaattatttattaattcgggatgttagaatgtgatttggggcgtaattagattcggtagggaaggtattttgtgtcgggtaggttcgtgtgatttgttttttaattatttattttttggagttgtgggttgatataagtgtttatgtggatgagtttttttttgggttattttttttttaaggattttaattttggggggtttcgtttttttatttgtttatattaggtattgtttattttattgggcgggcgttgttcgatgtttttttttaggattttttttgttagatttagtagtagtagtttttggaggggaacgtcgttttattttttattgtttttaggtttgcggtttatagtggggttacgttttttgagtttggtttttatagtcgttttggttcgtttagtttttttatttgtcggagtaggagtagtataaacgttggagttgtttagttttgggtagatttcggttttgtatacgcgttgtttgtttacgcggagttttcggtttttttgggtgataaatggggttttttttggttttttaagatgaagttgaagattgtggttttttttgggtttgtcgggggtatgtgggtttggtagttgtttttgtatattttaagggtcggtttaggggaggtttagaggaaagaggaggtgtttttgtttagggattttggaaaatagagtgttcgggtataaaggaaaagttcggttaaggttaagggttaaggtcgaggggagtcgggggttaggggaataggtggattttatattattgtatatataatataggtgaatttgaatttaaatgatttattttagttttggtttttaagttatttttattgggaagaagaaatttttaggagtgatttttgagagttgagggttttcggggtggggtagtgtgaggggttgggttagtgtgaggggtaaagtttaacgggtattttatttttgcggtttgggtttttttagttgatggggtgggggatatttatttttttagttttagtttttagggaacggagtagagggtagagggagtgggttgtatttattaggaagtttgggagtgtttttgttgggggttggggtagaggtagttcggtaggtttttagggaggttggggttgggggtaggggtacggttgtgttcgggtatttttaatgtttgagttgatgggggagttagttgtttttgatagttagggaaaggggttaaagggggttttagatttttttagtttggaatgatagaaagtgttggaaggcggggttagtgggagataggtttttaggattagtttcgggtaggtagtttggtatttttttaggtttggtttatggatttagaggtgtttgggtttagatttgttcgggagggtagtggttgggtttggtttggtaggggttgaatggacgaggttagttggggtcggtgagaggttggggatttttagggtgagagtagtagttggatgagtttttggaatttttcgcggtgtttatagatgtagatttcggttttttagagggcgttgattagtattgtgttattgattttatttagtatgatgttcgtttttagttgggggtttaatttgttcgggttagggaggagggggttattttaggatgtttaggttgggtagg

SEQ ID NO: 1893 - DNA, 2492 bp, Artificial Sequence
  chemically treated genomic DNA (Homo sapiens)
tttgtttagtttgagtattttagggtgatttttttttttttggttcgaatagattgaatttttagttggggacggatattatgttggatgaggttagtgatatagtgttggttaacgttttttgggagatcgaggtttatatttatgagtatcgcgaggagttttagaagtttatttagttgttgtttttattttgagggtttttagttttttatcggttttagttgatttcgtttatttagtttttgttaggttaagtttagttattgttttttcgggtagatttgggtttaggtatttttgagtttatagattaggtttgggagaatgttaagttgtttgttcgaggttggttttgaaggtttgttttttattaatttcgttttttagtattttttgttattttaggttgggaaagtttagagttttttttggtttttttttttgattgttaaggataattgatttttttattagtttaaatattaagggtattcgggtataatcgtatttttgtttttagttttagtttttttgagggtttgtcgggttgtttttgttttagtttttagtaagggtatttttaggttttttggtgggtgtagtttattttttttgttttttgtttcgttttttgggggttgggattaaagaaatgggtgttttttattttattagttgggaaagtttaggtcgtaggagtgggatgttcgttggattttgttttttatattggtttagttttttatattgttttatttcgagaatttttagtttttaaaggttatttttgggagttttttttttttaatggaagtggtttaagagttaaaattgaaataaattatttggatttaagtttatttgtgttgtgtgtgtagtggtgtgagatttatttgtttttttgattttcggtttttttcggttttgatttttggttttgatcggattttttttttgtattcggatattttgttttttaggatttttgggtagggatatttttttttttttttaggttttttttaaatcggtttttagggtatgtagaggtagttgttaggtttatatattttcggtaggtttaaggagggttataatttttaattttattttggaggattagggagagttttatttgttatttagagaggtcggggatttcgcgtggataggtagcgcgtgtgtagggtcgaggtttgtttagggttgggtaattttagcgtttgtgttgtttttgtttcggtaagtggaggagttgggcgggttagagcggttgtgggagttaagtttagagggcgtggttttattgtgagtcgtaggtttgaggatagtgagaagtaaagcggcgtttttttttaggggttgttgttgttgggtttggtagagagagttttgggggagggtatcgggtagcgttcgtttagtaaggtgggtaatgtttggtataggtaggtgggagggcggggttttttagggttggggtttttgaggagggggtgatttaggagggggtttatttatatgggtatttgtattagtttatagttttaaggggtgaataattgaagggtaggttatacgagtttgttcggtataggatgttttttttgtcggatttggttacgttttagattatattttgatatttcgagttggtgaataattaagttgttatttttttgaggtaggtttttatttttaggttttttttcgaggttttttcgttgttagttgagtcgtgggtatttgagggattatttattattgttttcggttgtgttatcgttattagtttttagttttttgtttagattcgggatagtttttttatggttttcgagatggattagttttataggtttattatggttatttataaggtgagtatatgggtggttaagttaggtttgagtttttttttttagggtatagaaattaggttcgttttggaggacggagggttagtcggggttatagatgttttggaaagggaagtttggagttaggttgggttaggggtgggtacgggggtaaggattttcgagagtatttagttatatagcgggaatttttaatttttagatgttggataaggtaggagggagtttaaggtttagggtggggagagttgagtttggatgagaagggtttggttgttcggtttgggaataaagaaagattttttttttttttttttgtttttttttttttttttttttttttttttttttttttttttttttttttttttttttgtttttttttttttttgtttttttttttttttgtttttttttttttttttgtttttttttgtttttgttttttttatttttgagttttttagattttttattttattttcggggggttgttgtagtcgttatagatatttattgagcgttttttgtgtgtaggatttttttatttggaggttttatattatttatttgtgaggtggaaaatgattattttgtttgatagatgag

SEQ ID NO: 1894 - DNA, 2410 bp, Artificial Sequence
  chemically treated genomic DNA (Homo sapiens)
ttataaaagtaatacgaaaatattaatgttgtcggtttttattttttgggattaattaagagtaatagaataatttggatagattagaattatatatttaaagagatttggttttttaagaaatgttatttatagaaataaaattattttattatattttagttgttttaaattttattttcgttagtttagtaaggggaagaaatatgtatttttttttttttttttttttttttttttttttttttgtttttgttttaatatttttagttatttgtttttttttgttttagttatatatgggtaaattgttgtttgtttagatgtgggtttaatgtaggtagttttgagttattatttttagtatttgtgatgttattttggtttgtgatgtgggtgtgggtgggtgttatattattagattttatagttaaattatgtgggaagaagttttatacggttttgtttttagttttagaaatttttgaagtttttattttttttaaaatggtttggatgaattttgaagatttttatgtttttaagaagtatgttttgtaggaaatgtagttaaatatgtagattagatttggggatatgggtagtgagatgtatttttatatgtgtaaaagtgtttttttttatgtatataaaggaggtattgttaagtttttagaatagttgttaaggttagggattaggaatgaaagaatacgtttttgtagatttgggtatttttttttgtatgtttttttcgggaagattatatggtttttggaatgtgggttttttttatattttatggtaaatgtagtaattagagttgttagtagtgttaagggtttgaaaggagaataaagtcgtttttttttgggaatttttgggtaatgttttattgtttattaggtgttcgttttgttggtgggtttgatttttttatttgtaaaatgttttaggagttttttttttgagggggaggttagtgaaatgatggaaaaatagagtatgaatttggtaggggtttttggaatcgtatgtgttgtttgtttgcgtttttaagtgttgtttttggagtgaattagagtttgtaggcggatcgtattataggttgtggtggaattatttttaggtttatggtagttggatttatagatagttgagaggataattgtttttttttagtggcgagttttggttttattttttaagagttgggtcgattttagagtagggttttggaaagggtttgtttttgggaagagtttgcgaatgtttggagattgggtaggtaagagtttttttaaagttggttagttttggaaaaatggtatcgggtttttgggttatttggaaattattatttgtttttattttgtaaagtagggataggagggaaatgttaagtaaaaaaaggtataataggagtaggttatttgttttttttttttttttttttattttgagtttggtttttttgtattttatttttttatatatttattcgttagatttattttgttaggttttttatttaatgattttgtttggttttttatttattttgttttttaggttggagtgtagtggtgcgatttcggtttattgtaattttcgttttttggggtttaagtaattttcgtgtattagttatttaagacgttgggattataggcgcggattattaagtttagttaatttttgtatttttagtagagatgagtttttattatgttggtttagttggttttaaatttttggttttaagtgatttatttattttggttttttaaagtgttgggattataggcgtgagtttgtgtttagttttaattttttttttttagtagagagttgtttatatgggtagtatttgatatatattttttaagttttattaaattttgttttttttgtttttattgtaatttattttaattgattatgttataataggtaatttttagttttttttagaattaatttagggtattttgttttaagttattttttttatgttaataaaattaatatttattgaatgttttttgaaggttaggtattgttttagttattttattagtattatgttatgaaatgttattaattattttatgagtttgagtattgttttttgttttatagataaagaaattgaggtataagttgtttaagtattatgttttaagtaattaataaaggttgaatttaattaaagtttatattgtttttgtttttgtttttgtttttgagacggagttttatttttgttatttaggttggagtgtagtggtacgattttggtttattgtaatttttattttttaggtttaagggatttttttgttttagttttttaagtagttgggattataggtacgtattattatgtcgggttaatttttgtattttt

SEQ ID NO: 1895 - DNA, 2410 bp, Artificial Sequence
  chemically treated genomic DNA (Homo sapiens)
aaaaatataaaaattagttcggtatgatagtgcgtgtttataattttagttatttgggaggttgaggtaggagaattttttgaatttgggaggtgggggttgtagtgagttaagatcgtgttattgtattttagtttgggtgataagagtgaaatttcgttttaaaaataaaaataaaaataagggtagtatagattttggttgggtttagtttttgttggttatttgaggtatgatatttgagtaatttgtgttttagtttttttatttgtaaaatagggaatagtgtttaaatttataggatggttggtagtattttatgatatgatgttaataaagtggttagaatagtgtttggtttttaggaagtatttaataaatattagttttattgatataggagaaatagtttagaataaagtattttgggttagttttaaggaaggttgagggttatttgttgtggtatagttaattgaagtgagttataatgaaggtagagaaggtagaatttgatagaatttgaagagtatgtattaagtgttgtttatgtgaatagttttttgttggaagaaggagattgaggttgagtataggtttacgtttgtaattttagtattttgggaggttaaggtgggtggattatttgaggttaggagtttgagattagttgggttaatatggtgaaaatttatttttattaaaaatataaaaattagttgggtttggtggttcgcgtttgtaattttagcgttttgggtggttgatgtacgagaattgtttgaattttaggaagcggaggttgtagtgagtcgagatcgtattattgtattttagtttgggggatagagtgagtaaaagattaagtagagttattgagtaaaagatttagtagagtaaatttaacggatgagtgtgtggaaagatgaggtgtaggaaagttaaatttaagatggagaaggagaaaagagaaatagatgatttatttttattatgtttttttttgtttgatattttttttttgtttttgttttgtagagtaaagatagatggtaatttttaggtagtttaggagttcggtgttatttttttaagattgattagttttgaaaagatttttgtttgtttagtttttagatattcgtaaattttttttaaagataaattttttttaaagttttgttttaaaatcgatttagtttttaggaggtgaggttagggttcgttattgaaagggagtaattgtttttttaattgtttgtgggtttagttgttataggtttggaggtggttttattatagtttgtggtgcggttcgtttgtaggttttgatttattttagggataatatttaaaaacgtaagtaggtaatatatgcgattttaggagtttttgttagatttatattttgtttttttattattttattggttttttttttaggagggaggtttttgaggtattttataaataaaagaattaaatttattaataggacgagtatttgataagtagtgaggtattgtttaagagtttttaggaagaggcggttttgttttttttttaagtttttgatattgttaatagttttaattattgtatttgttatgggatgtaaaagaaatttatattttagaaattatgtagttttttcgggagagatatgtagggaaaggtgtttaggtttgtaggaacgtgtttttttatttttggtttttaattttggtagttgttttgagaatttaatagtgttttttttatgtatatgaaggagggtatttttgtatatgtagggatgtattttattatttatatttttaaatttggtttgtatatttgattatattttttgtaaaatatattttttaagaatatgaagatttttaaaatttatttaagttattttgggggaaatgaggattttagaagtttttgaggttagaagtaaaatcgtatagaatttttttttatataatttaattataaaatttgatgatgtaatatttatttatatttatattataaattaaagtgatattataaatattagagataatggtttaaagttgtttgtattgagtttatatttaaataaatagtaatttgtttatatgtgattaaggtagagaaagataggtgattagaaatattaaaataaaaataaaaaaaaagagagagagagaaaaaggaaagagaaaatatatattttttttttttattaagttagcgaaaataaaatttaaggtaattgaaatatggtaaggtgattttatttttatagatgatattttttagaaagttagatttttttaaatatgtgattttaatttatttaaattgttttgttgtttttagttggttttaggaaatggaggtcggtagtattaatgttttcgtgttgtttttatgg

SEQ ID NO: 1896 - DNA, 2327 bp, Artificial Sequence
  chemically treated genomic DNA (Homo sapiens)
taggtcgggcgtagtggtttatgtttgtaattttagtattttgggaggttgaggcgggcggattacgaggttaggagattaatattattttggttaatacggtgaaattttttgtttattaaaaatataaaaaattagtcgggcgtagtggcgggcgtttgtagttttagttattcgggaggttgaggtaggagaatggcgtgaatttaggaggcggagtttgtagtgagtcgagatcgcgttattgtattttagtttgggggatagagtgagattttattttaaaaaaaaaaaaaaaaaaaaaaaaaaaagtttggtagggagtaggatatttggattttattttgttgtttttttggttgtgtgatatttaggttacgttgtttttttgggtttcggtttttttatttgtttaagaggggttgatagtcgtatttgtttttttagtttttttttaggaaggtggtagttataattagtatttgttgaggttgattttgtattaggtttaggataggcggggtttagggaggttcgtttttcgttacgtttttttgttaggggagtttcgaggtttttttagtgttatttttatgttatattttgttttagttttgtgcgttttaagttagggtattgagtgtgttagtattcgtagggataggtattggattttgggtggatttgagggtttgtgattatttttttagttgtttttttttagaggttattttttttaaggaaggaaagaattttttcgttattttttgtagtgcggttagtttaggttagtttgtatagtagggttagaattagggtttttggggagggatgtttgtttgtttagtgggaggagacggtacgttcgtgaagtcgttatttagttagtttgggggttacgagtgttgtttttggtggcgttgtgcggggagggagggggtcgagtagggtgggtattcgtatgtttgtgttttgttggttttcgatagatgatagttttttttttagggtttttagtgtagagttttttggggatattatggttatttttgtttagatgagagggagtcggttgtttgtgatagcgtcgtaaaatgtcgttagggttttttttttttttttttttttttttttttcgtttttttttggttggtggttttttgtaggttttcgtttttgttggtgttggttataatgtttttatttttagggtttcggcgttttagttttttgcgtttatcgcgtttgttcgttagaatttttgtgtttttggtgcgtgtggtttgtcgagtttcgagtttttgttttttttagtttttttttttttcgcgtttttaggaggtgtttttggaagttacggagttttatcggtattaagatcgattgttttttggggtgaggtagtaggttgtatagtttggggttttgttttgttatgggataattatataatttattgttttttttgaagtggttgtaatatttgcggtggatagagcgtttggaattttggttgggagcgggtagggttaggtttgggggtagttttggtagtagtcgggggtaggggtcgtttatattgagaagtttgataggtttaggtgttatttgttgtgtgattttggataggtttttgatttttttgggttttagtttttttttttgtaaaatggaggtaaatgaggatggaaggagatgtagtgtggagtatcgagggtagaggagagttgagtcgattttattttttgttttagtcgtattgagagaggcgatttacgtagttgtttgtttgatttttgttttttaatattttttaatatttttttcgttattaggtttaggtttatgggtggttttgagtcgtattttttattgagtattaggagaaggtatcgtggggttaggggtggtcgagacgtttggaggttatagggttgcgagtattggcgttgtttattattttaggtttttagtacgtgttttagtttggttagtttagtggtagggtttttgtttgtggaggaagggaggttaaggtattttttttgagtaggaagtgagaggaatagttttgtatatattgggttttatatggtataatttgaaggtagatagtggtttttttgtatttggggaaattgaggtttagagagttagggattttttaagattagttagtagtagttgtttttttttggggtgttattttttttgttttttttgttttgcgtttgtttagtttttttgttttggtgattgaggatcgttaggtaggggttggtgttgggcggggggcggcgggttttttcgtagtgtaaggtcgggtt

SEQ ID NO: 1897 - DNA, 2327 bp, Artificial Sequence
  chemically treated genomic DNA (Homo sapiens)
ggttcggttttgtattgcgggagggttcgtcgtttttcgtttagtattagtttttgtttggcggtttttagttattagagtaggagggttgggtaggcgtagggtaggagggataggggagatggtattttaggaaggggtagttgttgttggttggttttgggaagtttttggttttttgggttttagtttttttaggtatagaggagttattgtttgtttttagattgtgttatgtgggatttagtgtatgtagagttgttttttttattttttgtttaggaaaggtgttttggtttttttttttttataggtagaggttttgttattgagttggttaggttggggtacgtgttgggaatttggggtgatgggtaacgttaatattcgtagttttgtgatttttaaacgtttcggttatttttggttttacggtgtttttttttggtgtttagtggagggtacggtttagggttatttatgagtttgggtttgatggcggggggagtgttggggagtgttgggagatagaggttagataaatagttgcgtggatcgttttttttagtgcggttggggtagagggtggggtcggtttagtttttttttgttttcgatgttttatattgtatttttttttatttttatttgtttttattttatagaggaggaaattgagatttagagagattaggggtttgtttaaggttatatagtaagtggtatttaggtttgttagattttttagtgtaggcggtttttgttttcgattgttgttaaggttgtttttaaatttggttttgttcgtttttagttagggttttagacgttttgtttatcgtagatattatagttattttaggaaagatagtagattgtatagttattttatagtagggtagagttttaaattatataatttattattttattttaaagggtagtcggttttggtgtcgatgggatttcgtggtttttagaggtattttttggggacgcgggaggaaagagggttgaggagaataggggttcgaggttcggtaggttatacgtattaagggtatagggattttggcgggtaggcgcggtgggcgtagggggttgggacgtcgaaattttgggagtggggatattgtggttagtattagtagggacgggagtttgtaggaaattattaattagagagggacgaggaagagagaaaggaggagggagggaaagttttggcggtattttgcgacgttgttataggtagtcggtttttttttatttggataggagtggttataatgtttttaaggaattttgtattggagattttaggaggagggttgttatttgtcgaaggttagtaagatataggtatgcgagtgtttattttgttcggtttttttttttttcgtatagcgttattagaagtagtattcgtggtttttaggttggttgagtagcggttttacgggcgtgtcgtttttttttattgggtaggtaggtatttttttttaggggttttggttttggttttgttgtgtaggttggtttgagttgatcgtattgtaggaggtggcgggaaggttttttttttttttgagggaagtggtttttaggggagagtagttgggggggtagttatagatttttaggtttatttagggtttagtgtttgtttttgcgggtgttggtatatttagtgttttagtttgggacgtatagggttgggatagagtgtagtatgaggatgatattgagagggtttcggggtttttttagtaggggaacgtggcgagagacgggtttttttaagtttcgtttattttgggtttggtgtagggttagttttaataaatgttaattgtggttattatttttttggggaaaagttgagggggtagatacgattgttaattttttttaaataggtgaggagatcgaggtttagagaggtaacgtgatttggatgttatatagttaagggggtagtagagtgaggtttaaatgttttgttttttgttaagtttttttttttttttttttttttttttttgagatggagttttattttgttttttaggttggagtgtagtggcgcgatttcggtttattgtaagtttcgttttttgggtttacgttatttttttgttttagtttttcgagtagttgggattataggcgttcgttattacgttcggttgattttttgtatttttagtagatagggggttttatcgtgttagttaggatggtgttgattttttgatttcgtgattcgttcgttttagttttttaaagtgttgggattataggtatgagttattgcgttcggtttg

SEQ ID NO: 1898 - DNA, 2426 bp, Artificial Sequence
  chemically treated genomic DNA (Homo sapiens)
taattttttcggggttgttagatcgtcgatatatacgtatatatatatagagtgtatatatatgtatatacgtgtagtcgtattttttggtgcgtttgttgtgagggtataggggtgggtaggttggtaggtacgtgaagttgttattagtttcgagggatcgtgagcgagttgggatttgggggagaaaaaaatgggggcggacgttagttttttgggcggtcgtcgttatcgttttcgttttttcgaggttttttttgtatttttgggtagcgaagtttttcgttaagacgggggttgatgttatttcgggttgtttagttaggggattcgggggttttggtggttgttttcggaagtgagttagtcgtttgtcggtcgataggtttggaatttttagttagaggatagaaaatttgtatgggttaggtgagcggggtttggtcgagggtagtcgggtagggggtagtagggtgcggtagtttgtttatcggaattttttagggtgtattttaggggggttgtttatttgaagggaagtgaggacgagggtgtttaaaggtcgttttttttatttttatttttatttttatttttcgtttttcgggatcgttacgttttggagtgagtgtagtcggtttgttttttaaagttttttgtttcggtcgattagttgggtgagttttggaattggaatttggattgtttagtgtgttgattttataatttcgttggggtggatttttagtttggtatttagttgttttttaattttgagcggtattcgtggatgtagtcggtttttggtttagggatgtttatttatttttggtttgtttgaagaaagttgttgtttttaatttttttttttttaagtaagtttaaaatttttatgagtaaaagagtttaaagaggtaagaggatattggcgttttaattgttttttttttttttaattttttttttttttttttttttggttggttttatggattatttgggagataaatttatagtggtttagatttatatgatttagtggatgggtatcgtgaggaggtttttttaggaagtttttaatttggtgattattacggtgggttacgaacggacgagtgtagagtcggttagtcggattttttttaagcgtatttttttttttcgatatttggtttttcggagtcgggaattttttcgtcgtttttttgttcgtagttaatagagattttttttattgaggaaaaggtatatagattcggaatcgttagatattgtaagtttattatgttttaaaaaatattaaaataatattgaaagttttttttttttagtttttttagggagggggttttagatattaaatcggggaagttattttttttagaatagttgttagttaaagtttaggtattttttgttttttgtatttgggaaagaggtacgtagtaataattttttttttttgaagttagttaggatatttttgttggagtcgacgtttgtgtggatagggttagtacgtgagttgggttgaatttgttagttgatttatgtttaagtgtgaatattttaattttcgatacgaaagtttatttttttttttatttttagggtggattagtggtatttgttttatttttttttatttttttaggaagtataagtggcggtgttatgtgtacgttgagttgtagtttttgtcgttttatcgagtttttattggattgttaaggaaagggttttaggagatcgaggtgtggtgggcgagtttgttcgttggtcgtgaattttgggtttggtgtgagtgggttagggagggaggttttgattttttatttaggtaggttcgggagggtttggattgggatagtagggtggaatgatagttaatgattaaaattttggtttgtgttttgttaggcgatagtgtagaaataatcgtaaggtttttttgatgatttggagaggtgggattgggtttagaaagcgaaagtgtttattgtgggggaagtatagtgagtgagtggtagagttaggtttcgaattttaggttttgatttttttatttacggttttttgtagtttagtttttagtagatgttttttttagatttttttaattaatttagggttgtttaggttattgattagatttgagtttaaagagagggtttgttatttttatataggagatttttgttatttgattgtgttggtttagtttatgggagtatttgaggataggcgaagggttaagttagtttttttttttgggttttttttagttaggagtgttatagttattaagggatttagtatttagggaggagttttgagttggttttttttatattcgaggtggtagggtttatagttgttttgttaggtgtaggggtttagtattttttttgttgatttagaggtgt

SEQ ID NO: 1899 - DNA, 2426 bp, Artificial Sequence
  chemically treated genomic DNA (Homo sapiens)
atatttttgggttagtagaggggatattgagtttttgtatttggtagggtagttgtgagttttgttatttcgagtgtagggagggttagtttagggtttttttttaaatgttgggttttttaatgattatagtatttttggttaggaggaatttagaaaaaggggttggtttagtttttcgtttgtttttaagtgtttttataaattgggttaatatagttaggtggtagaagttttttatgtgaaaatggtaggttttttttttaggtttaggtttggttagtgatttgggtagttttgaattaattgggagggtttggggagaatatttgttgggagttggattgtaaagagtcgtgaatggggaggttagagtttggggttcgggatttggttttgttatttatttattgtgttttttttatagtaggtattttcgttttttgggtttagttttatttttttaaattattagaaggattttacgattgtttttgtattgtcgtttagtaggatataggttaaggttttaattattagttgttattttattttgttgttttaatttaagttttttcgagtttgtttgagtaagaaattaaggtttttttttttggtttatttatattaaatttaaggtttacggttagcgggtaaattcgtttattatatttcggttttttaagattttttttttggtaatttaatgaaagttcggtggaacgataaaagttataatttagcgtgtatatgatatcgttatttgtgttttttaggagggtgagaggagatgaggtaggtgttattaatttattttaaaaatagggagaaggatgagttttcgtgtcgggggttggggtgtttatatttaaatataaattaattggtaaatttagtttaatttacgtgttggttttgtttatatagacgtcgattttagtaaaaatgttttgattgattttaggagagaggaattattgttacgtgttttttttttaggtataggggataggaagtgtttgggttttgattgataattattttggaagaagtaattttttcggtttgatgtttgggattttttttttgggaggattggaggggaggagtttttagtgttgttttaatattttttaaaatataataagtttataatatttggcggtttcgaatttgtatgttttttttttagtgaagaaaatttttgttggttgcgagtagagaagcggcggaaggattttcgatttcgggaagttaggtgtcggaaggaggaagtacgtttgaagggggttcggttggtcgattttgtattcgttcgttcgtggtttatcgtggtggttattaaattgagggttttttggaaggatttttttacggtgtttatttattgggttatgtgggtttgggttattgtgagtttattttttaggtaatttatggggttagttaggaggagagggaagaaggaagttagggagggagagagtaattaaaacgttagtgtttttttgtttttttggatttttttgtttatggaagttttgggtttgtttggaggaaaaaaaattaaaaatagtagttttttttaggtaaattaagggtaagtaaatatttttgagttaggagtcggttgtatttacgggtgtcgtttagaattaagaggtagttaagtgttaggttgggagtttattttagcggagttataaagttaatatattgggtagtttaggttttagttttagggtttatttagttgatcggtcgagataaggagttttgaggaataagtcggttgtatttattttagggcgtgacggtttcgaaaggcgggggatggggatgggggtgggggtggagggggcggtttttgggtattttcgtttttatttttttttaggtaggtagtttttttgaggtgtattttgggaggtttcggtgggtaagttgtcgtattttgttgttttttgttcggttgttttcggttagatttcgtttatttgatttatgtaggttttttgttttttggttggagattttaaatttgtcggtcggtaggcggttagtttattttcggaggtagttattagggttttcgggttttttggttgagtagttcgggatgatattagttttcgttttagcgaggggtttcgttgtttaggaatgtaggaggggtttcggggaggcggaggcggtggcggcggtcgtttagggagttgacgttcgtttttattttttttttttttaagttttaattcgtttacggtttttcggggttgatggtaattttacgtgtttgttagtttatttatttttgtgtttttatagtaagcgtattaggaaatgcggttgtacgtgtgtgtatgtgtgtgtattttgtgtgtgtgtgcgtgtatgtcggcgatttggtagtttcgggaaggtta

SEQ ID NO: 1900 - DNA, 2397 bp, Artificial Sequence
  chemically treated genomic DNA (Homo sapiens)
aatattttgaggataattgattagagggaggaggggttgtatcgttttttagtaggttgagttaattattagtttgtattagtatttgatttgtggtatgtgttaatttattattgttaattgtagggatttagtgattttttcgaatttttgttatttttgttacggtttttgttttgtggaggtttgtggaatgggaagtggggaggggaaggagaagggggcggagttagtcggagttttttggttaggtttggagttattttgttttgttatagtttttatgggtttagagtgggttttggggtagagggtttgtaaggataggggtgggtggttttgtcgagggcggtgttttgagtaggttttattttttagtttgtttagtttggttttattttagttttgttgttttgttattttgtttttttgtgtttattttttattttttgtcggggatattttaaggtttgttaaggttggagtaggggtgggatttagttatttaataaacgtttttttggttatgtagggttgggtattggggtggggggttgatttggattttttaagatattagattgtttaattgtttagtttttattggggtaagtgtttcgttgagggtgaagggggttgtgagtgtttattagggagtttggataggtttcgttttttatagttgttttattttttggagttgttttggtggtagatggtattgttttagaaaggtgaggttggagttgttttttttattaggggtggttaaggacgtttttagggttttttatgtaggtttttagggttattttgggcgtggttgagggtatgtagattacgttgtgtttttttttattttttatgttcgtcgtttgtttgatatgttttttagttgttttgtttcgtagaagttgtgtggttttttttgtgagtagagtcgggttttatgatttttcggagtagcgttagggattttttttaggtataattttaaagggggttttaggatttgttaggtttacggaagtggtttttgtaattttttttttggtggtagtttttggtgtatttcggtaggggtagtttttttttattatagggattttgtgtgttaggttttagttgcgttgtcgttgaattatggatttaatagtagagaagttttgtaggtcgtttgtgttggttcgggaaatcggggtttagtcggggtttgttacggttttggtgtcgttttgttttttgtcggcgttacggagtaagcggagagatttattttttcggttttaagaggtattaacggaggaggttgagaggtaggagttgaataattgatggttttttttggtttaggatttgttgaaaatgatacggtgtaaggtagaggggttgagagtgttgattataaaatgttgagaagttattttagggcggttacggttagaaggaggatttttatttaggacggggttataggtatttggggcgggtgttagaggtttttgttttgggttattttagggggttaggatatttagaagttgggtttagaggtttatagggttggtttatttttattttttttttatacgtttgttattatcggtgttttagtttagtaattttatggttcgttggtttcgtttatagtttttattgttttttgtgtgttgggcgtgggtttttgagttttatttttagtttttttagttttaggagaggagtggaggataggggtttaacgtggggtgtggtgcggagcggggagggttgtggcgtttttttagtttttttttttttaatagttttagttttttttttggagaattttttatttgttgggtatatttggtttttttttattattttgtttttagtcgggagatttttatttagtgaaatagtgaaataggaagggttttttggttatttcgcgtagggcgtagggtatgtagcgggggagtggttcgtttttttagtgttttatcgtttatatttttaggggagtatatagacgggtaggttgtggggttttgattttatggtagtgtttgggggtgaatgtttatagtttttgaaattttagtgggagtgcgttatcgggtggttttttagtttagcggtttgtaggtggttggtgagagtgagtttaattagatttttgttttataataaggatagaggaatttttgtattttagggttttttgttttggtgtattaaaaaattggattatacgtgggtttggagaatgagtgtaaggttttattgagtggaagtagtttttagtagatgggggagttagaggggagatggtttttttttggagttaggtaatattttcgggatgtttagtagtttgtttttttttattagtgtgtttttttttttatatag

SEQ ID NO: 1901 - DNA, 2397 bp, Artificial Sequence
  chemically treated genomic DNA (Homo sapiens)
ttgtgtggggagaggaatatattggtggaagaagataagttgttggatatttcgagaatgttgtttgattttaggggaaaattattttttttttggtttttttatttgttgagagttatttttatttaataaaattttgtatttattttttaagtttacgtgtgatttaattttttggtatattaaggtaagaaattttgggatatagaaatttttttgtttttgttataaggtaggggtttaattgagtttatttttattagttatttatagatcgttagattaaaagattattcggtaacgtatttttattggggttttaagagttgtaaatatttatttttagatattgttatggggttagagttttatagtttgttcgtttgtatgtttttttagaggtgtgagcggtggggtattgaagaagcgagttattttttcgttgtatgttttgcgttttgcgcggggtaattagggaattttttttgttttattgttttattgggtagagatttttcggttggagatagaatggtggggagaggttagatgtgtttagtaggtaggggattttttaggggggaggttgaggttgttaggaaaggaggggttgagggggcgttatagtttttttcgtttcgtattatattttacgttaaatttttgttttttattttttttttggggttaaggaggttgagagtagagtttagaggtttacgtttagtatataggaggtagtgggggttgtggacggggttaacgagttatggggttgttgggttgaagtatcggtgatggtaggcgtgtgagagggaagtgggggtgagttagttttgtgggtttttaggtttagtttttgggtattttggttttttggaatgatttagggtaggagtttttgatattcgttttaaatgtttgtgatttcgttttgagtgggggttttttttttggtcgtgatcgttttggagtggttttttagtattttgtggttagtatttttagtttttttgttttgtatcgtgttatttttagtagattttgagttagagaaggttattaattatttagtttttgttttttagtttttttcgttagtattttttaaagtcgggaagataaattttttcgtttgtttcgtggcgtcgataggaagtagggcggtattaggatcgtgataggtttcggttgggtttcggtttttcgagttagtataggcggtttgtaaggtttttttgttattaaatttataatttagcggtaacgtagttggggtttggtatatagggtttttgtgatgaggaggggttgtttttgtcggaatgtattagaggttgttattagggagagagttataaggattattttcgtggatttggtaggttttagggttttttttaaaattgtgtttggggagagtttttggcgttgtttcggaggattatggagttcgattttatttataggggagattatatagtttttgcggggtaagatagttgaggagtatgttaggtaagcgacgggtatggggggtgggggggagtatagcgtggtttgtatgtttttagttacgtttagggtgattttggaggtttgtatggaagattttggaagcgtttttggttatttttggtggaagagatagttttagttttatttttttaggatagtgttatttgttattaaggtagttttagagagtgggatagttgtgagaggcgggatttgtttaggttttttgatgggtatttatagttttttttatttttagcgaggtatttgttttaatgaaaattgagtagttggataatttgatgttttggagggtttaggttagttttttattttaatgtttagttttgtataattaaggaagcgtttgttgaatggttgagttttatttttgttttaattttggtaggttttggagtgttttcggtaggaagtggagggtgaatatagggggataaagtaatagggtagtagagttggggtggggttaggttgggtagattggggaatgagatttatttagaatatcgttttcggtagagttatttatttttatttttgtaaattttttgttttagggtttattttaaatttatgagagttgtggtaggatagggtgattttaggtttggttaggaggtttcggttgatttcgttttttttttttttttttttttattttttattttataggtttttatagggtaggggtcgtgataggggtgatagaagttcggagaggttattgagtttttgtaattagtagtaatgagttgatatatgttataggttaagtgttaatgtaggttgataattaatttaatttgttaggaagcggtgtagttttttttttttttgattaattatttttaggatgtt

SEQ ID NO: 1902 - DNA, 2354 bp, Artificial Sequence
  chemically treated genomic DNA (Homo sapiens)
agatattttgtataggtgtgcgtttttattttggttgttgtgtgagttgaggataaaattttggttgttgtgggagttgagtttgtgggtaggttgagttaggggtgggagtgagagggaggggtgagaggggtttgagtatttatttagcgtatgttttatagaattagtttgttttaggaagtttcggtgtttagtgttataatgtatattttagttttgtgtttgtatattagatttcgggttcgttttatatgggtgttttgagttgattttttttgttggagttgttgaagggttttgtaggttttaatttatagttagtttttaattttgttattagtaggggttttagtttatagtaacgtagttgtttttattgtaggttaattttgttatagcgttgttaatttgaaatatttagtttagagtgagtttttggggaggcgggaggttgtttaagtattttatttgttgtgtgggtaagaagcggtttgtattttattagagtttggggatttaggatttagatttgttgtttcgtagttgtgtgattttgggaaggttaggttttattttgggtgtgttttttttttttgaagatttaattcggtttgtgtgttaggagtggagggtttgttggagtttgaggaagatggtagttgggtcggtagtagggtgagtagggtttgagtggggttaggttttttatattggataatgatgtttattgtaaagtttatgttttggatttttgataaatattttagtaatcgatttgatattttattatgtttaagttgatttgtttttatgttggatatgtgtttattaggacgtgtttttggttgttattggtagggtttggaatgaggatatttgttgtgtattttgttttggagttttagataggtaaaaaaatatttatgtggttttatttaggttatttttttgtttgtatgaattttaggttatttttagaaagggttttatagtttcggtgttttattttttgatttttgttaagtcgtttttagtagtagttggaattttttgaagtggttgttatagatgttggtaaagttcggtttgggatgtttttattttgtattaggtacggggttgtttttgttgtatatttatttggaaattatttatatgttaagtatcgtagaggtaaggggagtttgttattggattgcgtttaatacggttgtagggatatagataagtatattttttggtagaggtacgggttcggttggttggagttgtagtagttgtgtgtggttatagagtttttaaatgagggagatggatggtttcgttttatagtgtgtttagagtatgtttacggtgtttgggaagattagggatttattatgttcggttttggttttttttatagtgaagtttttttgttggtaggatttatggttaagtatgggggtaggggttgggggagttttgttagtgatttttcgtaggtagtaaggtttttgggagttggttaggaaaatagaaattttattttggagtaggtgcgtaaattaatagtttagaaattaataaggtttttattaaggattatgagttatttgtgttgttttgtttgttttggtatttgcgtaggatacggggtggggggcgggggaagtatatgttaatagggagttggtggtcgttttgagagttagttttttttttataatttgtttgaaatttttttttttgtagaagatggaatttagtatatttcgagagtttattgtataggttaggtgtatttatgtttattgtttttattagtaaaagagtaaaattaaaattaaataaacgaagattttggtaagattgtttgattttgttttgaggtgagtatatagtagtatcgggaaagtgcgtaatttataaagatggtgtagtttgtaggttaggaggggttggggtttgtcgagggtagttggggttttgtagtttgatttataatattgtatttagagcggggaggtgttgtttttaggtttatttgtgatttttgaggtataggtagagggtcgggcgtgtatgatattgtataggagtttttttcgtagtgtggaatttatttacgtcgtttgtttttttagtttttaaatgtatttggggtttgagattagaaatagtagaagttttggtggttagtggaatagttatttaagtggatttttattttttgggtattttttgagtatttttttgttaggtattgttttaggggttggtgacgggaagtttattttgtttatgaggttttttcggtatagaggtggatattgagggatcgttggtttatacgtatgttgaaatatgtg

SEQ ID NO: 1903 - DNA, 2354 bp, Artificial Sequence
  chemically treated genomic DNA (Homo sapiens)
tatatattttaatatgcgtgtgagttagcggttttttagtgtttatttttgtgtcgaaagagttttatgggtaaggtgggtttttcgttattagtttttgaaatagtgtttagtagggaggtgtttaaagaatgtttaggagatgagggtttatttaggtaattattttattaattattagagtttttgttgtttttgattttagattttagatgtatttggggattgagggagtaggcgacgtgggtgggttttatattgcggagaggatttttatgtagtgttatatacgttcgattttttgtttgtattttaggagttataggtgggtttggagatagtattttttcgttttgagtgtagtgttgtggattaggttgtaaagttttagttgttttcgatagattttagttttttttgatttgtaggttgtattatttttatgagttacgtattttttcgatgttgttgtgtgtttattttaaggtaggattaagtaattttgttagagttttcgtttgtttgattttggttttgtttttttgttgatagaaatagtaaatataaatgtatttgatttgtgtagtgggttttcgagatgtgttgggttttattttttgtaaagagaaggattttaagtaagttatgagaaaggagttggtttttagagcggttattagttttttgttgatatgtgtttttttcgttttttatttcgtgttttgcgtaagtattagaataaataggatagtataggtggtttatggtttttggtgggaattttgttaatttttgagttgttggtttgcgtatttgttttaggatggagtttttgtttttttggttagtttttagaggttttgttgtttgcgagaagttattgatagagtttttttagtttttgtttttatgtttggttatggattttattagtaaggaggttttattgtgagggaaattagagtcgggtatggtgagtttttggtttttttaggtatcgtggatatgttttgggtatattgtgaagcgaggttatttattttttttatttggaagttttgtgattatatatagttgttgtagttttagttagtcgggttcgtgtttttgttagggaatgtgtttgtttgtatttttgtagtcgtgttgaacgtagtttaatggtagattttttttgtttttgcggtgtttggtatgtggatgatttttaggtgaatatgtagtagaggtagtttcgtgtttggtgtagggtggaggtattttaggtcgggttttgttaatatttgtggtagttattttaaagagttttagttgttgttgaagacgatttggtaaaggttagagagtgagatatcggggttatgagattttttttaagggtggtttgaggtttatataagtaaagagatgatttgggtgaagttatatggatatttttttgtttgtttggggttttaaagtaaggtgtataataagtgtttttattttaggttttgttagtggtagttaagagtacgttttggtagatatatgtttagtatggaaataaattaatttggatatagtggagtgttaggtcgattgttaagatgtttgttaaaaatttaggatatgggttttatagtggatattattgtttagtgtgggaagtttggttttatttagattttgtttattttgttatcgatttagttgttattttttttagattttagtaggttttttatttttagtatataggtcggattgaatttttaggaaagaagagtatatttagggtgggatttgatttttttaaggttatataattgcggagtagtagatttgggttttggatttttaaattttgatgagatgtaggtcgttttttgtttatatagtaggtaagatgtttggatagtttttcgtttttttaaaaatttattttgggttggatgttttaggttggtaacgttgtggtagagttagtttgtagtgaaaatagttgcgttgttgtaagttggggtttttgttgatgatagggttgggggttgattgtagattgaggtttgtagaattttttagtaattttagtagagggaattagtttaaggtatttatgtggagcgggttcggggtttggtgtgtaggtatagggttggagtgtgtattgtggtattgggtatcggaattttttggagtaggttagttttgtgaagtatgcgttgagtaggtgtttaggttttttttattttttttttttatttttatttttggtttagtttgtttataggtttagtttttatagtagttaggattttgtttttagtttatatagtagttaggatagagacgtatatttgtgtaaagtgttt

SEQ ID NO: 1904 - DNA, 2382 bp, Artificial Sequence
  chemically treated genomic DNA (Homo sapiens)
ttttagttttataattaattaaaataaagaataagtaaatataggttttttttaaaaaaggtttaaatgtaaatatattatatgatattaagtttaaattttgatataaaatatttggaataattatttagaaaattataaattttaaaaaataaattttattttataaaataaaaagtgtgtatatattattaattagtgtattaggtttattaagattatgattattagtaaattatatttaagttttattaaaattttaagagtattgtgtgttgttagaggtaaagtattgtgtgaaatgtttgttgagaattgttattttttaagaaggttattaattttattttttgggaattttttatttaatgttattttttgaatagtttttatatatgtttgaaattattaattgtaatagtgtttgtgatgttgattagatggtatacgtgggttatttaattttttttagaatatattttgggggtataaatattttaaaaagttatatttatagtagtttgtattatatagaaattaagattttttttgggagtgagaaattataataataaagtataatatattaggattatagaaggtaggattcggatgatggatgtgtgaatagagatgatggatggtgaattatagagataggttgggtttttaggtttttgggttacggaaggagtgtgttttgtaattagtataggatatagtttagtaagaattatatattttaaggagttcggggtttggagttgggttttgtgtttattgatggggatttagtagttgtgttttttttggtttggtagagttttttgagtagggatttgtgtatggttttagtaggtgtttttttttagggtttttttaaggcgggaagtaaattttttttttttttaggttgtagtgtgagttgagttttagttttagggtttagggaggggttgggtagttttttgatggaaatatatttgtatgagtagttttttttttgtagagggtggggaagaaaaggatgtttggggtagtttagttttacggtgtggtggggttaggggttgtgtttattatggatttgattttttttttttttgtgattttgttttattgtacgtgtcgggacgggttttaaagattagtttatattagaaattttgattgaggtttttgagaaatgttattttgaattttgttttagtatttggatgtgtttttttatttgatagagttataaagatttttttagttaaaaataaaagtaaagttttgttagattcgtgttcgtggttttaaatttgttttagttattgagtaggagttgagagggaagagagagagaagaatataagatttatatggggaaggatttttatgagggtgtggtagtgagagcgggtggtaagttgttaaagaggtttaagttatagaagtgggttttatgtgggattttcggaatgagtaggagggcgatgggtggagggtgagggttagaagattttaattagaggtgagaatttaaagatgagttattggttatttaagttaaatagtgaaattattttggtttgtgtttttagttagtggagtagggaaggggttaggatgtgttttttgtaggtgttattggaaaggggttttgatttagattttaagagagggtttttggattttatgtaagaaataatttgggaggagtttataaagtggaaataagtttattaagatagtaaatgaataaaggaatggttattttatagatagggtagtattaaatattgttggtcggttatttgtatagatagtttttgattatatgttaaataaggagtggattatttattagttttttaggaattttttttaaaaatatagattatataaggtaatttgtggatgttgttatagtatttttaattgtgaggataattagaggttattttttttatcgttttggttttagtaggttttggtcggtttttttagcgtattttgttttattagtagggtttttatgatttgtattttgtgattttagtttggttgattttttagtttattttgtgattaagaatgtttaattttttggaaatgtaggttagtatgtttaagttttatttaattaagtttttatttaatatggagttattttggttttaatatttttgatttagggtggttgtagagttggaggtgtagattggggtagattagttttttgagaaaagtatatagagttattgcggggttgtgaggtgggagagatgaatttatattggtatttgattagtgattttttagttgtaatgagaatagaatggagaggtttgggataggaagataggatgtggttgtttatgttattttggtggg

SEQ ID NO: 1905 - DNA, 2382 bp, Artificial Sequence
  chemically treated genomic DNA (Homo sapiens)
tttattaggatggtatgagtaattatattttgtttttttgttttaggtttttttattttatttttattatagttggagagttattgattaaatgttaatgtgagtttattttttttattttatagtttcgtagtggttttgtgtgttttttttaggaggttgatttgttttaatttgtatttttagttttgtagttattttaagttagaggtgttagaattagagtgattttatgttgaataggggtttgattaaatgaggtttaggtatgttggtttgtatttttaggaggttaggtatttttagttataggatgagttaggaagttaattagattgggattataagatataggttataaagattttgttgataagataggatacgttaaagaagtcggttaaaatttattgaaattaagacggtgaggaaagtgatttttggttgtttttatagttagaaatgttatggtaatatttataagttattttatgtggtttatatttttaaaaagaatttttgaaaagttaataaataatttattttttatttagtatatgattaaggattatttatataaatagtcgattagtagtgtttggtgttgttttgtttatggagtagttatttttttatttatttattgttttaataaatttgtttttattttatagattttttttaaattattttttgtatgagatttaagaatttttttttgggatttgaattaggatttttttttagtaatatttgtaggaagtatattttggttttttttttgttttattgattggaggtataggttaaggtaattttattgtttgatttgaatgattaataatttatttttgggtttttatttttgattagaattttttgatttttattttttatttatcgtttttttgtttatttcgaaagttttatatgaaatttatttttgtggtttaggtttttttggtaatttgttattcgtttttattgttatatttttatagaaatttttttttatatggattttgtgtttttttttttttttttttttttagtttttgtttagtggttgaagtagatttggagttacgaatacgagtttggtagagttttgtttttgtttttaattgggaaaatttttataattttattaggtgaaaagatatatttagatattaaggtagagtttagggtaatattttttaggggttttagttaaagtttttgatgtaggttggtttttgaggttcgtttcgatacgtatagtgagataggattataaggaggggaggagttaagtttatggtggatatagtttttgattttattatatcgtggggttggattgttttaggtattttttttttttttattttttgtagaggaggggttgtttatgtaagtgtgtttttattaggggattgtttagtttttttttgagttttggagttggagtttagtttatattgtagtttgaggaggaggaaggtttatttttcgttttgggagggttttgggaggaagtatttgttgagattatatataggtttttgtttaggggattttgttaggttagaaaggatatagttgttgagtttttattagtgagtatagggtttagttttaagtttcgagttttttggagtatatggtttttattgagttgtgttttgtgttggttataggatatatttttttcgtggtttagagatttgagagtttagtttgtttttgtagtttattatttattatttttgtttatatatttattattcgaattttattttttgtgattttgatatgttgtattttattattgtagttttttatttttaaaaggagttttggtttttatgtggtataaattgttgtgaatgtaattttttaaggtgtttgtatttttagagtatattttggaaaaagttgaatgatttacgtgtgttatttggttagtattatagatattgttatagttgatggttttaaatatgtgtaggggttgtttagggaatggtattgaatggaaaatttttaggagataaggttggtggtttttttaaaagatggtaatttttagtaaatattttatataatgttttatttttaatagtatataatgtttttagagttttgatagggtttagatgtgatttattaatagttatggttttggtaggtttaatatattagttaatagtgtatatatattttttattttatgaagtgaggtttattttttaaagtttgtagttttttaaatagttgttttagatattttatattagaatttggatttagtgttatataatgtgtttatatttaaattttttttaaaaaaaatttgtatttgtttattttttgttttggttaattatgaagttaaga

SEQ ID NO: 1906 - DNA, 2369 bp, Artificial Sequence
  chemically treated genomic DNA (Homo sapiens)
gtttggggttgaggttggtttttatttatcggttaggttttgagtaaacgaattggtttttttgggtttttttttttttgtttttaaaatggtgtaggtgaggataataggagttttaaggggtgttgtgagggtggttagtacgtgttttgttaagggttttataaagtttaatttgtggttatgagagggggtgtagtaggatagggtgggggtagtttttgaaagttttataaattaagagaatagaaaggaaggtattttgtttttatagtggaggttatttttttggttagagggagggttggttgttgttcggttaaggaggggtagagagaatttggtagaatttattgagttttcgtgttggtagttttggaatgggatttttttgggtcgtttttggtttgatgaattggttttgaggttatttattttatagtttggttcggatttcggttatttagtttttaagaaagtttggaattaggaaaggagcgtcgttggcgtggaaagatatatttgtattttaaaatatttggtttttggttgtgttttaggaattgggaggtgagattttttttggtgattgatagttttgtgtttttgggcgtagagttttgtggttggttttggtatttttttttttttttttttttcgttttttttggttaatgttagtaataatttagagggtagttttattatttgttaggtttaacgtagtgtttttcgtagtagttacgtgaggtttttcggatggggagttgttttttttttttgtttcgtttttggttttagttatatagcgtttattttttttgtttaagggttaggaggttagattgttggggtaaagttgttatagtagcgagggagagagcgttgttttttttttttttaaaagttattttggtaaggtattagttaaatattttttcggttttagaaggttttttttgtgaagtttgtagcgtttaaacgataattagtaaatttttagagataggtttttgggaattagttgcgtcgggcgggatgaaagtcgttttgatgttttggagcgagagagtagagagaaggaggaagatagatattatttgttagtcgtagggtttcgggtagtagtagtacgttaaggaggagttagggggttgcggggagtttaggagggcgtgggaggtttggtagggttcgttattttataggttggttttttatttgggggtttgtttgtttgcggcgattttttagtttataggaggggacggtcggcgttgatagttttttttttgttttttttacgaagtttttttttggtagtttttgatttttcgtttagaagtaaagttggaatagtttagtagggtggtcgttagatgaggaatttggtattgagattggtttaggttatataattagaagaagagttggagacgggatttaagtttttttattttaatttttggtgggttttattttgtttcggtttttttttagtaggggtttcgtttaggagatattggtaattgtgtagagggattatgggatttttatgagtgatttcgggttttggtttagttttttatttttgaaatatttttaaaacgattataagtatgtttatataaatttttttaaaatattttgagaattttttaataatgtgtttattaaaggtaggttttttggtgaggggtggtagggaggttggggtgaagggtaggagttttatgtttttagttttagagagggttaaatatttagggtaggtgaaaggtaggttgtttattatttatttagcgagaatttttgtgggttttttgtagaggtttaggagacgttttttttttggtttatttttaacgttagtttttttttgtggttgttttaaagtttagtttattcggttttttaattgtgagattttcgaattgtttttttattggttgtaggttatagtttttgtttttatttttagtagtattagtcggggataggaattgtttgttgtcgggatttttttttttagtagattgggagttttttatttttggtatttatatatttgtttgcgtgtttggagtggtagaggaaaggggttggggtgtggtgatggttggtggagttggaggtatttggtatatggaagacgtaggcgggaaggtggttgagttttagcgtatgttgagcgtttattttttttttttgtaggtgtttttttatttattagataaatgtgatgattttagttgtataaaagagaagatttcggttttaggaggtaaaataatatgtttaggattagggtaggtttgtggggcgggtatttgaattgttagtggtatgatgttcgagtttttttttat

SEQ ID NO: 1907 - DNA, 2369 bp, Artificial Sequence
  chemically treated genomic DNA (Homo sapiens)
gtgggagaaggttcggatattatattattggtagtttaaatgttcgttttatagatttgttttgattttaggtatgttgttttgttttttggggtcgaggtttttttttttgtataattgggattattatatttatttggtgagtgaagggatatttgtagagaagggaggtaagcgtttagtatgcgttgaaatttagttattttttcgtttgcgttttttatgtattaggtgtttttagttttattagttattattatattttagttttttttttttgttattttagatacgtaggtagatgtgtgggtgttaagggtgaggggtttttagtttgttggggaagggggtttcggtagtaaataatttttgttttcggttgatgttgttagaagtgagagtaggggttgtgatttgtagttaatggggaagtagttcgagggttttatagttgggaggtcgagtgagttaagttttagggtagttatagggaggagttgacgttagagatggattagagaggaggcgttttttgggtttttgtaggggatttatagaggttttcgttgggtgaatgatgggtagtttgttttttatttgttttgggtgtttggttttttttagggttgggaatatgaggtttttgttttttattttagtttttttattattttttattaaaaaatttatttttggtaaatatattattaagggatttttagaatattttagagaagtttgtgtgaatatgtttgtggtcgttttaaaagtgttttagaagtgagaggttaaattaaggttcgaagttatttatggaaattttatgatttttttgtatagttattagtgttttttggacggggtttttgttggaaaggggtcgagatagggtgaagtttattaggggttggagtggggaggtttgggtttcgtttttagttttttttttggttgtgtggtttggattagttttagtgttaggttttttatttggcggttattttgttgggttgttttagttttgtttttgagcggaaggttaggggttgttagggaggagtttcgtggggaaagtaaaggggaagttgttagcgtcggtcgtttttttttgtgaattaaagagtcgtcgtagataagtaggtttttagatggagaattagtttgtgaggtggcgggttttgttaggttttttacgtttttttgggtttttcgtagttttttggtttttttttggcgtgttgttgttgttcgggattttgcgattggtaggtagtgtttgtttttttttttttttttattttttcgttttagaatattagagcggtttttatttcgttcggcgtagttaatttttagggatttgtttttggggatttgttggttgtcgtttgaacgttgtagattttataggggaagttttttgggatcgagaagatgtttagttaatgttttgttaaggtggtttttgaaggggagggggatagcgttttttttttcgttgttgtgatagttttgttttagtagtttggttttttggtttttaaataaggagggtgggcgttgtgtggttggggttaggggcggggtaggggggagggatagttttttattcgaggaattttacgtggttgttgcgggggatattgcgttgaatttggtaagtggtggggttattttttgggttgttgttggtattggttagggagagcggggagaggggggagggggggatattagggttagttatagggttttgcgtttagaggtataaaattgttagttattagaaagggttttattttttagtttttgaaatataattagaggttaagtgttttaggatgtaagtgtgtttttttacgttagcggcgttttttttttggttttaggtttttttggaagttgggtggtcgggattcgagttaagttgtggggtaggtagttttagggttagtttattaggttagggacggtttaggagggttttattttagggttgttagtacgagggtttagtgaattttgttagattttttttgtttttttttggtcgggtagtagttaattttttttttggttaaaggggtggtttttattgtggagatagggtgtttttttttttatttttttagtttatggggtttttaagagttgtttttattttgttttgttgtatttttttttatgattataaattaggttttatggagtttttagtagggtacgtattggttatttttatagtattttttggggtttttattgtttttatttgtattattttaaggatagggaaaaggaggtttagggaagttagttcgtttgtttaagatttagtcggtaagtagaggttagttttagttttaggt

SEQ ID NO: 1908 - DNA, 2425 bp, Artificial Sequence
  chemically treated genomic DNA (Homo sapiens)
tgtattttagggtaattagtttttgtatgggaggagaggggtattttttgtattattttatggtgttattaaaagttgaattatgggttggtttaattttgtagagaagagattatttaatttatttgtggaaatttattttttagcgatattgatgttttttaagaaatttaattttgggtttgagtgatggttggtgtaaaaaataaatttaagattttagtgttttttagaagtttggatttttagggattttgttgtgagttataggacgttatcggtttttttttttttgtgggttgagtgtgggggttatgtggatttttttatgagtagatgttattagggttattggttttagtttttttttttatagttgtagtgggggttggggttggggtattttagggagggtttttgtatgagtttgtgttatagtgtgtggtattcggcggagggattaagttgatcgttttaggtgagttttttttttttttttttttttcgtttttgggataatttttgttgtttttgtttgtttttgtattttgttttaatttgtggttagtttttttttttgtattttaggtttgagtaaggatttttgttttttttgtttagatttttgtttgttttagtaggttattataattattttatttttgattataggggtaggggattagatagaatgatttattgagtttcgtttgtttgtttgtttgtttgtttttttgtttgtttttttgtttttttgtttgtttttttgattgtttgataggcgtaggttgggtttttaagttttgttttgttttggtttttttagtttgggtttttgtcggaatagttttgtttttgggttatttgggttttattttttggggaattgggaataaggggtttgagggaggtattttttgggagattttagaaggatttagtgttttcggggttgatgttcgggaattatagagttgggatttagagttaggatttagatttagaatgaggtaggaggtggaggggttgttttgggcgtttgggggttgttagggattgagttttgagttagtttgagatttaggaaatttcgttaggagggagaagggagaagtagattttggatattagaaagttaggggaagggttataaaaggagtggatgtgacggaagggcgggtttttgggtttttttagaatatattttttgtgtttagggggattagaggggtagagtttattgcgtgaaagttttattgttatgattaggtagtcgggacgtggggtggatgttagaaaagattttacggaataagagagagtttaggatagtaggtaggtttttcgatttttttaggtttttgttttatatacgggttttagaatatatatttggttggaatagtttgagggattaaaaggttttagtattttatagagttgaggagttaggttagaaaagtaattttagagttcgttgtgtaggggagatatagagttttttttatttgttaggatggtaggaggggatagggttagggcgttgagggttagatgtcggtgttgggggttaaggtttcgagagattttaggataggtggttaggtgtttaaggtaaaatagtttttcgtgtagattagggtatagtggaaaatattttgatttttttgtttggtatagatttttagatatagagtttttgaataagggtattttaatattttattatatattgaggttaggggttttttaggtggatattaggattttgattttttgttttttatttatttcgtaggttagtttaaggttgttttttcggttattttgttttcgtttttttttgaggagttttaagttaataaggttatattggtgtgttttataagtgatttttattcgggagtcgtgatagtggtttggaaggtagatagtagtttcgttaaggcgggagtggagattattatattttttaaataaagtaataataagtacgcggttagtagttatttgagtttgacgtttgagtagtggaagttttatagaagttatagttgttaggttacgtatgaagggagtatcgtggagaagatagtggtttttatagaatgtttataggtttttaatttttattttttattacgggagattagagttgtaggattttaggggaggggtttttttttttattttaaggtattaagtttttttttttgtatttaataaatttttaataaatatttttattgttaattagaaattttgttttattttattttttttttttttatatataatttttagttttttttgggtttttaatttgtggtggaaagaattttgaatttagtgggaaagttgtttatgtgaaggggtttttagttttttgggtatttttgtaggtaaggttttttttatttagata

SEQ ID NO: 1909 - DNA, 2425 bp, Artificial Sequence
  chemically treated genomic DNA (Homo sapiens)
tgtttgggtgaggaaggttttatttgtagagatgtttagggaattgagaatttttttatataggtaatttttttattgggtttagggttttttttattataaattgagaatttaggaaaggttaggaattatatgtgagaaaagaaaaaatgagataaaataagatttttgattgataatgagaatatttattgagggtttattgagtgtagggagaagggtttgatgttttggggtgggaggagagattttttttttgggattttgtagttttagtttttcgtggtggggggtgagggttgagaatttatgaatattttgtaggggttattgttttttttacggtgttttttttatgcgtgatttggtagttgtagtttttgtgggatttttattgtttaggcgttaggtttagatagttgttggtcgcgtatttgttgttgttttgtttggagggtgtggtggtttttattttcgttttgacggggttgttatttgttttttaggttattgttacggttttcgggtagaagttatttatgagatatattagtgtggttttgttggtttgaagttttttagaggagggcgggaatagagtgatcgagggggtagttttgggttgatttgcggggtggatgaggggtagggggttagagttttggtgtttatttggggagtttttgattttagtatatgatgaggtgttggggtgtttttgtttaggggttttgtgtttgaaggtttatgttaggtagaggggttagggtgttttttattatgttttgatttgtacggggagttgttttattttagatatttgattatttgttttgagatttttcggggttttggtttttaatatcgatatttgatttttagcgttttgattttgtttttttttgttattttgatagataaagagagttttgtgttttttttgtatagcgaattttggggttatttttttggtttggttttttagttttgtgggatattggggttttttggttttttaggttgttttagttaaatgtgtgttttggagttcgtgtatggggtaagggtttggggggatcggagagtttgtttgttgttttgggtttttttttatttcgtggagttttttttggtatttattttacgtttcggttatttggttatagtagtggggtttttacgtagtggattttgtttttttgatttttttgggtataggggatatgttttgaagagatttaggagttcgttttttcgttatatttattttttttgtgattttttttttggttttttggtgtttagagtttgtttttttttttttttttttgacggggttttttgagttttaggttggtttagggtttagtttttggtagtttttagacgtttagggtagtttttttattttttattttattttgggtttggattttggttttgggttttagttttgtgattttcgagtattagtttcgagggtattgggtttttttaaagttttttaggaggtgttttttttagattttttgtttttaattttttaggagatggaatttaggtaatttaaggataaagttgtttcgataagaatttagattgaggaggttagaatagaataaggtttagagatttagtttgcgtttgttagatagttagagagataaatagagagatagagagataaatagagagatagatagatagatagatagacgaggtttagtaggttattttatttagttttttgtttttgtggttagaggtgaagtggttgtagtgatttgttgaggtaagtaagggtttgaatagggagggtagaggtttttgtttaggtttgggatgtagggagaaaggttgattataagttgagataagatatagaaataaataaaaatagtagaaattgttttaagagcggggaaggagaggggagaagagatttatttaggacggttagtttggttttttcgtcgaatattatatattgtgatataggtttatataaaaattttttttgggatgttttagttttagtttttattgtagttgtgaaggaggaagttggggttagtggttttggtggtatttgtttatgagggagtttatatggtttttatatttaatttataaagagaaggggatcggtgacgttttgtgatttatagtaggatttttggaaatttaggtttttggaggatattgggattttgaatttgttttttgtattaattattatttaggtttaggattgaattttttagggagtattagtatcgttaaggagtgaatttttatagatgggttaggtggttttttttttgtaaagttgaattaatttatggtttaatttttggtaatattatggggtggtgtagagggtgtttttttttttttatgtagaggttgattgttttagagtgta

SEQ ID NO: 1910 - DNA, 2425 bp, Artificial Sequence
  chemically treated genomic DNA (Homo sapiens)
ggtttttagaatattgtattttagggtaattagtttttgtatgggaggagaggagtattttttgtattattttatggtgttattaaaagttgaattatgggttggtttaattttgtagagaagagattatttattttatttgtggaaatttattttttagcgatattaatgttttttaataaatttaattttgggtttgagtgatggttggtgtaaaaaataaatttaagattttagtgttttttagaagtttggatttttagggattttgttgtgggttataggatgttatcggttttttttttttgtgggttaagtgtgggggttatgtggatttttttatgagtagatgttattaggattattggttttagtttttttttttatagttgtagtgggggttggggttaggggtattttagggagggtttttgtatgagtttgtgttatagtgttgggtgttcggcggagggattaagttgatcgttttaggtgagttttttttttttttttttttttcgtttttgggataatttttgttgtttttgtttgtttttgtattttgttttaatttgtggttagtttttttttttgtattttaggtttgagtaaggatttttgttttttttgtttagatttttgtttgttttagtaggttattataattattttatttttgatcgtaggggtaggggattagatagaatgatttattgagtttcgtttgtttgtttgtttgtttgtttttttttttttgtttgtttttttgtttgtttgataggcgtaggttgggtttttaagttttgttttgttttggtttttttagtttgggtttttgtcggaatagttttgtttttgggttatttgggttttattttttggggaattgggaataaggggtttgagggaggtattttttgggagattttagaaggatttagtgttttcggggttgatgttcgggaattatagagttgggatttagagttaggatttagatttagaatgaggtaggaggtggaggggttgttttgggcgtttgggggttgttagggattgagttttgagttagtttgagatttaggaaatttcgttaggagggagaagggagaagtagattttggatattagaaagttaggggaagggttataaaaggagtggatgtgacggaagggcgggtttttgggtttttttagaatatattttttgtgtttagggggattagaggggtagagtttattgcgtgaaagttttattgttatgattaggtagtcgggacgtggggtggatgttagaaaagattttacggaataagagagagtttaggatagtaggtaggtttttcgatttttttaggtttttgttttatatacgggttttagaatatatatttggttggaatagtttgagggattaaaaggttttagtattttatagagttgaggagttaggttagaaaagtaattttagagttcgttgtgtaggggagatatagagttttttttatttgttaggatggtaggaggggatagggttagggcgttgagggttagatgtcggtgttgggggttaaggtttcgagagattttaggataggtggttaggtgtttaaggtaaaatagtttttcgtgtagattaggatatagtggaaaatattttgatttttttgtttggtatagatttttagatatagagtttttgaataagggtattttaatattttattatatattgaggttaggggttttttaggtggatattaggattttgattttttgttttttatttatttcgtaggttagtttaaggttgttttttcggttattttgttttcgtttttttttgaggagttttaagttaataaggttatattggtgtgttttataagtgatttttattcgggagtcgtgatagtggtttggaaggtagatagtagtttcgttaaggcgggagtggagattattatattttttaaataaagtaataataagtacgcggttagtagttatttgagtttgacgtttgagtagtggaagttttatagaagttatagttgttaggttacgtatgaagggagtatcgtggagaagatagtggtttttatagaatgtttataggtttttaatttttattttttattacgggagattagagttgtaggattttaggggaggggtttttttttttattttaaggtattaagtttttttttttgtatttaataaatttttaataaatatttttattgttaattagaaattttgttttattttattttttttttttttatatataatttttagttttttttgggtttttaatttatggtggagggaattttgtatttagtgggaaagttatttaagggaggaggtttatagttttttcgagttatttttttggaaggtttttttttttttagtt

SEQ ID NO: 1911 - DNA, 2425 bp, Artificial Sequence
  chemically treated genomic DNA (Homo sapiens)
gattggaagaggaaggattttttagagagatgattcggggaggttgtaagtttttttttttgggtgatttttttattgggtgtagaattttttttattataaattgagaatttagggaaggttaggaattatatgtgagaaaagaaaaaatgagataaaataagatttttgattgataatgagaatatttattgagggtttattgagtgtagggagaagggtttgatgttttggggtgggaggagagattttttttttgggattttgtagttttagtttttcgtggtggggggtgagggttgagaatttatgaatattttgtaggggttattgttttttttacggtgttttttttatgcgtgatttggtagttgtagtttttgtgggatttttattgtttaggcgttaggtttaggtagttgttggtcgcgtatttgttgttgttttgtttggagggtgtggtggtttttattttcgttttgacggggttgttatttgttttttaggttattgttacggttttcgggtagaagttatttatgagatatattagtgtggttttgttggtttgaagttttttagaggagggcgggaatagagtgatcgagggggtagttttgggttgatttgcggggtggatgaggggtagggggttagagttttggtgtttatttggggagtttttgattttagtatatgatgaggtgttggggtgtttttgtttaggggttttgtgtttgaaggtttatgttaggtagaggggttagggtgttttttattatgttttgatttgtacggggagttgttttattttagatatttgattatttgttttgagatttttcggggttttggtttttaatatcgatatttgatttttagcgttttgattttgtttttttttgttattttgatagataaagagagttttgtgttttttttgtatagcgaattttggggttatttttttggtttggttttttagttttgtgggatgttggggttttttggttttttaggttgttttagttaaatgtgtgttttggagttcgtgtatggggtaagggtttggggggatcggagagtttgtttgttgttttgggtttttttttatttcgtggagttttttttggtatttattttacgtttcggttatttggttatagtagtggggtttttacgtagtggattttgtttttttgatttttttgggtataggggatatgttttgaagagatttaggagttcgttttttcgttatatttattttttttgtgattttttttttggttttttggtgtttagagtttgtttttttttttttttttttgacggggttttttgagttttaggttggtttagggtttagtttttggtagtttttagacgtttagggtagtttttttattttttattttattttgggtttggattttggttttgggttttagttttgtgattttcgagtattagtttcgagggtattgggtttttttaaagttttttaggaggtgttttttttagattttttgtttttaattttttaggagatggaatttaggtaatttaagggtaaagttgtttcgataagaatttagattgaggaggttagaatagaataaggtttagagatttagtttgcgtttgttagatagatagagagataaatagagagagagagatagatagatagatagatagacgaggtttagtaggttattttatttagttttttgtttttgcggttagaggtgaagtggttgtagtgatttgttgaggtaagtaagggtttgaatagggagggtagaggtttttgtttaggtttgggatgtagggagaaaggttgattataagttgagataagatatagaaataaataaaaatagtagaaattgttttaagagcggggaaggagaggggagaagagatttatttaggacggttagtttggttttttcgtcgaatatttaatattgtgatataggtttatataaaaattttttttgggatgtttttagttttagtttttattgtagttgtgaaggaggaagttggggttagtggttttggtggtatttgtttatgagggagtttatatggtttttatatttaatttatagagagaggggatcggtgatattttgtgatttatagtaggatttttggaaatttaggtttttggaggatattgggattttgaatttgttttttgtattaattattatttaggtttaggattgaatttattagagggtattagtgtcgttaaggagtgaatttttatagatgggataggtggttttttttttgtaaagttgaattaatttatggtttaatttttggtaatattatggggtggtgtagagggtgtttttttttttttatgtagaggttgattgttttagagtgtagtgttttgggaatt

SEQ ID NO: 1912 - DNA, 2473 bp, Artificial Sequence
  chemically treated genomic DNA (Homo sapiens)
aaagtattaattaatgatagaataaggaaaatggtataattggtttaaaggagaatttaagtattatatatagatatgtaggtaaatataaatgttggtatttatttataagtagatacgaaatcggttaataatttgaggataataattaattgtattttattggatataatttatttgtatttttatggtattaagtatttgtattattattggttttttttttaagtttcgagagttaggaaatagtttaaagatgatgaaaggtatagatattttggagagttatgttagatagaatatttagtaatttttatagattttttggtttatattaatattttttataattttttttgatagtatagtgtagttattattattttagagaagaagtgaggggttatgttgtgttttttggatttttgttttttaatttgtaaaatgggtatgataagagtttttgataatttagagatatgaggttttgttgggataagtatcgtgggaaacgtgaagtgttaagggatagtgttttaaattttagtgtggtttttttttttgatttagtttatatttttgttttattttggaagatttatttttttttttttatattaattttgatttgataatatttttgaaattagagaatgaggtgttgattttgtatgttttttttttttaatatatatgaatatagataaaaagttattgagataagaaaggtaagtttatttttgtattaattaatttagtgttttgtgggaagtataggattaggaagaaattaaatgatagtttataaatatatatatatatatatatatatatatatatatattttattaattattattattattatcgtcgttattattaatgtattttgtaaatttatatataatttgtaaatttttttttgaaataagagagagagggtaattgaaattatttaaggtagtatttggaatacgtaggttaaagattgagttagggagggattgttattatatgggttgtggggaggtagagtttttttgtgttttcgagagtattttttttcggggttttattagtttttaattcgtttttcgaatttttatttttttttttgttttgcgtttttggaaatttagatagcggttttattttcgtgatttatttagtaggaatgtgggagttttcgaattgttttagttaaagttttttaattttttttcggtgatgaatgggtgaggtttttaaatgaaatgtggaggtttttagttttagttcgcggtttttttttttttcggcgtaattatttttgtgtagaatatgttaagtgttttgtttttcgggaatttgtttcgtatgtaaatatttggtgattaagcgaggtttatttaattaagtattttgtaatgatttttaaattaaagaatagtggattaggagtttagttcgtgttggtgatgggaaaggtagttttatattataaggaggtagatagtgatttggtgtggggaggcggtcgggttaagcggggtagagtaggcgttttgggaattttgttagaattatttatttatttatttaattaatttatttttggagtattttttggagttagagtagttggtgaataataataataataataatagggttaggtattgtgttaataagtttgttgaataataagagtgaggaggagttagagatagttattgagagttgattttattaggtatgaattgttagtagtagtgacggtaataataagtatttttattgtagtagtaaatttttgaataggattttgttgtggttttgcgtgttttgaaattgttgggtttttgttatggatttggtttttggaaatagtttttatttttgttgttgttttattgatttattggttttttatttattagtggtttattttttatatttgtgtaatgggtagttggatttagattttttttaagatgtttttgggttttaggagtttagggtgttttttttgtttttgggggttataggaatggtggcgttattttgggggttttagttgtaatattgtagaaggttttagagtttagttttatatagttttaggatagagtaagggtgatttttagtttagatttttataaattgtgggatttttattaggtagtttgttttttttgacggataagttttttattttttaattgaaataatttttttatttgtttttagggtttttgtaagggaattatatagatttatggatatagatgttttttgaaaattatttatttggtggtagaagttattatgttttaaatttggatttacgaatatattttaatgtatttatttgtttatttgttttggtttttttatttttattataattcggaaaagggttttaattgttttttaatttgggagattattttagaataaagggtttttatgtgattttagtgtttgagttgat

SEQ ID NO: 1913 - DNA, 2473 bp, Artificial Sequence
  chemically treated genomic DNA (Homo sapiens)
attaatttaggtattgaagttatatggaagttttttgttttaagatgattttttaggttagaaggtaattagaattttttttcgggttatggtagaaatgagaaaattaaagtaagtagataagtgaatatattggggtgtgttcgtgggtttaagtttgagatatgatggtttttgttattaggtagatggtttttaaagggtatttatgtttatgagtttgtgtgatttttttataggagttttggaagtagatggaagggttattttaattgagaggtgaaggatttgttcgttagagaggataagttatttggtgaaggttttataatttatgaaggtttgagttgagagttatttttgttttgttttggagttgtgtagggttgggttttgaagttttttgtaatattgtagttgaggtttttaaagtggcgttattatttttgtggtttttagaagtagaggagatattttaggtttttaagatttaaaagtattttagagaagatttagatttaattatttattatatagatgtgggaagtgagttattggtgggtgagaagttagtgagttagtaagatagtaataaagatgggggttgtttttaaaggttaagtttatggtagaaatttagtagttttagggtacgtagggttatagtaaaattttatttaaggatttgttgttgtaatgaaaatgtttattattgtcgttattattattagtagtttatgtttagtagagttagtttttaataattatttttggtttttttttatttttgttatttagtagatttattagtatagtgtttggttttattattattattattattgtttattagttattttggttttaagaagtgttttaaaaataaattgattgaatgaatgaatgagtgattttagtagagtttttagagcgtttattttgtttcgtttggttcggtcgtttttttatattagattattgtttgtttttttgtgatatgaagttgttttttttattattagtacgaattggatttttaatttattgttttttggtttaagagttattataaagtgtttaattaagtaagtttcgtttaattattaaatgtttgtatgcgaaataagttttcgggaagtagggtatttgatatgttttgtatagaaataattacgtcgaggagggggagggtcgcgggttgggattgggagtttttatattttatttgagggttttatttatttattatcgaaggggaattaaaaggttttagttggagtaattcgagaatttttatatttttgttggatgaattacgggagtggggtcgttgtttgggtttttaaaggcgtagagtaaggggagaggtgggaattcgagaggcgagttgggggttggtggggtttcggggaggggtgttttcggggatataggggagttttgtttttttatagtttatgtgataataatttttttttggtttagtttttggtttgcgtgttttaagtgttgttttagatagttttaattgtttttttttttttattttaggaggaggtttgtaaattgtatatgaatttgtagaatatattggtggtggcggcggtggtggtggtggtggttagtggagtgtgtgtgtgtgtgtgtgtgtgtgtgtgtgtgtgtttgtaggttattatttaatttttttttaattttgtattttttatagagtattggattagttggtataagaatgaatttattttttttattttaatggttttttgtttatatttatatgtattagaaaaaaaaaatatatagaattagtattttattttttgattttaagggtattattaaattaaagttggtataaaggaaaaaaaataaattttttaaggtagaataaggatgtgaattaaattaggaaggagggttatattgaggtttgggatattgttttttagtattttacgttttttacggtatttgttttagtaggattttatgtttttggattgttaaaggtttttattatgtttattttgtagattaagaaatagaggtttaggaaatataatatagttttttattttttttttgggatggtggtggttgtattgtattgttagaaaaaattataaaagatgttgatatgggttaaaaaatttataaagattgttgaatgttttgtttagtataattttttaggatatttatgttttttattatttttgagttattttttaattttcgaagtttaagaaaaaaattaatagtaatataaatgtttggtgttatagaaatgtaaatgaattgtgtttagtggaatgtaattgattattatttttaagttattgatcgatttcgtatttatttgtaaatgaatgttagtatttgtgtttgtttgtatgtttatgtgtggtgtttaaatttttttttgaattagttgtgttattttttttgttttgttattaattaatgtttt

SEQ ID NO: 1914 - DNA, 2439 bp, Artificial Sequence
  chemically treated genomic DNA (Homo sapiens)
aggaggcggaggttgtagtgcgtcgagattgtattattgtattttagtttggatattaagagtaaaatttagttttaaaaaggaaaaaaaaaaaaaaagaaaaaaggaaatagataaagatggtgatttttttggggaggtgatatatggttaagtattaaggatgagtaggttagatggaggagatagtggtggttttagatttttgtaagtattatgggaataagtatttagggtttatttgtatttttttttttcggtatttagttaggtttttagtacgtagtaggtatatgggaaaatggtttattttgatttatttatttaatagttagtaggatgttttataagtatattagttacgttatttttagtttagattttgaatgatatgaggttttgatttattgggttttatgtgtttttttgattttacgttttgttttttttttcgttatttgtgttttagttatatttggtcgtttgttttttaggttttaaacggttgttagggttttggtatttgttgtttttttgtttggagggttttttttttagatgtttatttaaaagttttttttttattaggttttttttgggttttttgaaattttaattttttttattattttagagttttttcgtttttttatttttgtatttattttaatatacggtatattttatttatttgttttggttgtttgtttagaatataattttatgaggataggtatgttttgtgttttgtttagttttgaaatggtagaacggtgtttagtttttagtatgtggttaataaataggtagtgattttatgagttaattaatgagtgaattaatgaatgattagtaaatgaatgaatgagtgaacgagtgagtgattagtaagagtgaattaatgagtgtgtagatcgttgtgtgattaagtgggttagtgcgaaaggtggggggtagaggtcgggtgagttttttgggatgcgggtagtaaggatagggttgtggtgtgaattaagatatggtgttttttgtttttgttttttttttgtagggagaggggttattttggttttgagtatttttaattttatgtgaattacgcggacgggtggatagttggagggttagtagtagtagtaggagtttttgtttatttgggggtttcgagtgttggtatgatttgattttatggtgtgggcggggttcgggtttatttggaggagtaggatatgtcgtcggattatagttgggggtgttagatttaggttacgttatatttggtgttagagtttaagatttaggaatagaaattgtgtatggggttaagttggtcgtagtttaatatttaggtgattttaggtttaaagtatgtttttggttttcgagacgggtttcgtagttgtagtttatgttttggattttgttagttgggtttggtatatttttgttgtttgtttttgtttttaggtttattatttttcgttttgttattagggagttatttttagttagtttgttattgtggttatttttttgttttaagtttttttatggtttttatcgttaggattttttatgatttattttaggtaggaagtgaggagagaggagaggtgtagggtatggtcgggcgcggtggtttacgtttgtaatttcggtattttgggaggttgaggtgggcggattatgaagttaggagattaagattattttggttaatacggtgaaattttatttttattgaaaatataaaaattagttggtatgatggtgtacgtttgtagttttagttatttaggaggttgaggtagaagaatcgtttgaattcgggaggtagaggttgtagtgagttgagatcgtgttattgtattttagtttggtaatagagcgagatttcgttttaaaaaaaaaaaaaaaaaatcgagaggtgtagggtaatggagatagaaggttaaaggttgggttagatttttattagttaggtttttggtattagttttgtagattttaattaggggtattagtattaggggttaggtttaagggtttagaaaaggttttttaagttggtgttttttatttttatataaattgtatttttatttgtttttatagtaagggcgttatttttttagttttgtgtttagtttagtttagtttagtattggttaattatgatttaataaaacggagttcgtattgagttttttatttaggttgagtgttgatagagaggtttttagagtattagggttatgtttttggagatttcgatgttttgacgggaatatagaggtttcgagaggtaaaggtgttagaggcgtgtgagttagattaatattattttaaataggagttgagtaaaatgaggttgatatttattgggttgtatttttagacgggtaaggtattttaagttatagggtgagataggagttt

SEQ ID NO: 1915 - DNA, 2439 bp, Artificial Sequence
  chemically treated genomic DNA (Homo sapiens)
gaatttttattttattttgtgatttagaatgttttattcgtttgggaatgtagtttagtaggtgttagttttattttatttagtttttatttaagatggtgttggtttggtttatacgtttttgatatttttgtttttcggggtttttgtgttttcgttaggatatcggaatttttaagggtataattttggtgttttgggagtttttttgttagtatttagtttggatggagggtttagtgcggatttcgttttgttgggttatggttggttagtgttaggttgagttgggttggatatagggttggaggggtagcgtttttattgtagggataggtgggggtgtaatttgtgtagggatgaaaagtattagtttggagggttttttttaggtttttgggtttagtttttgatgttgatgtttttagttggggtttgtagagttggtgttaagaatttggttggtaggggtttgatttagtttttggttttttgtttttattgttttgtatttttcgattttttttttttttttttgagacggagtttcgttttattgttaggttagagtgtagtggtacgattttagtttattgtaatttttgtttttcgagtttaagcgatttttttgttttagttttttgagtagttgagattataggcgtgtattattatgttagttaatttttgtatttttagtagagatggggttttatcgtgttggttaggatggttttaattttttgattttatgattcgtttattttagttttttaaagtgtcgggattataggcgtgagttatcgcgttcggttatgttttgtattttttttttttttttattttttgtttaagatgagttatggggaattttggcgatgggagttatggaagggtttagagtaggggagtggttatagtaataggttaattgggagtagttttttggtgatagggcgggaagtagtgagtttggaggtaggggtaggtagtaggggtgtgttaagtttagttgataaggtttaggatataggttgtaattgcgaggttcgtttcgggggttaggagtatgttttgggtttgaggttatttggatattgggttgcggttaatttggttttatatatagtttttatttttgggttttgggttttgatattaaatatggcgtggtttgagtttggtatttttaattgtggttcgacgatatattttgtttttttaagtgggttcggatttcgtttatattatggagttagattatgttagtattcggggtttttaagtgggtagaggtttttgttgttgttattggttttttaattgtttattcgttcgcgtggtttatatggggttaaaagtatttaggattaaaatagtttttttttttgtagaagaaagataggggtagggggtattatgttttggtttatattatagttttgtttttgttattcgtattttagggagtttattcggtttttgttttttatttttcgtattggtttatttggttatatagcgatttatatatttattggtttatttttattggttatttattcgtttatttatttatttatttattgattatttattaatttatttattggttaatttatggaattattgtttatttattgattatatattaagagttggatatcgttttattattttagagttgaataaaatataaaatatatttatttttatggggttatgttttagatagataattaaagtaaataagtaggatgtatcgtgtgttagaataaatgtaaggatgaggaaacgagggggttttgaggtgatggggggagttggaattttagggggtttagggaggatttggtgggaaggggatttttgagtgggtatttgagagaagaattttttaagtagaagaatagtaggtgttaaggttttagtagtcgtttgaggtttgaaaaataggcggttaggtgtggttggggtataggtggcggggagagaagtagaacgtgaggttagggggatatatggggtttagtggattagggttttatgttatttagggtttgagttgagaatgacgtggttgatatatttgtaaagtattttgttggttgttgagtgaatgggttagagtgagttatttttttatgtgtttgttgcgtgttgggaatttagttgggtgtcggggagagaagatgtaggtgaattttagatgtttatttttatggtgtttgtagaggtttggagttattattgttttttttatttgatttgtttatttttggtgtttaattatgtgttatttttttaagggagttattatttttgtttgttttttttttttttttttttttttttttttttttgaaattgagttttgtttttgatgtttaggttggagtgtagtggtgtaatttcggcgtattgtaattttcgtttttt

SEQ ID NO: 1916 - DNA, 2188 bp, Artificial Sequence
  chemically treated genomic DNA (Homo sapiens)
ttgtgaaaacgtttttgagagaggggaaggagttgggaggttttgacgtaaagatattgaagagtagttttggaagtttatagaaaacgcgagtttttagaaaataagaaggaaggttggtgtagagggtgggttcggggtatcgtagcgggattggtttttggtcggagggaatttgcggtagggaaggtaggggaggggaagatgtgagtgggtttgtatatgtattgttgtgagatgagagggtttgtattagttagggttttgtagagaaatagagttaataggatatacgtatataggaagagattcgtaaggagatatttcgtgtaattttggaggttgagaagttttacgatttgttgttcgtaagtcggatatttaggaatgttggtagtgtaagttttaagatttgagggtcgggatttaatggagtggacgttagttagagtttgaatttttgagaattaggagtattaacggttagagggaacggatgtttgttttgggttaggtagagagaatttaaacgttttttatttttttgttttgtttcggtttttatagattggacgaggtttatttattttggggaggggttagttgttgtgtttagttcgttattgtaaatacgaagtttttttagaaacgtttttatagatatttcggaagttacgtatttattttgtaggtgtttcggggtataggtaagcggacgagttagttattttttagagtttttgttgtttcgttcgttttttttcggaaacgtgaagtgtggttttagttgaaagtgaggtgagcgtgagtgtggatatgtgttagtgtgcgtgtgtatgggaggagtgtgtgtgcgtttgatgacgatgatggagtttagtgagttatcgttcgtggagtgttagagttttttaggatggttacgtcgaaggtgcggaaggaggcggttggtttagcgttagacgtttttagtattcgcgggagtgaaacggaggttggtgggtggttgtgatgtgtttttttaagaatggattttgtaggtttttttttttttcggttttcggtgtcggaaggaggatatcgcgagtgttgtttgtttgtttatagagagtgtgtagtagtagtagtagtagttcggggttagttttgggaggattaaggatattttagggttttaagttaggggatgatatagtgggtttaaatttaggaaaaaaaaaaaaatgtttttggtggtaaggatagggagagattgaataagtttggggtaagtggtaaaattagagaaagaaaattttttaggaggtttgagtttaggaaagtaattttaaggattcgagttgataaagttattttggaggtggaggtattaggtttagttggagagattgtgagggcgaagaatttataggattttttgtgaaagaaaagaaataagtttagttttgagtattttgtattttttatttggggggaaaaaggagttataaaaattgtaggtaggtgtgtattatgttttggtaatttttaaaggattgtttttaatatgataggtatataaaagattttaaaagtaattgttttacgtgtatattatcgattgtttttggagttttatggtattaaggtagagttttgttattaattatagttttatggtagtagagttacgtcggtaggtagttgagggaacgtgaggatattagaattggggtttataggaggtaaaaatttgtagttgtttgtaggaggttttaggttttttgtattcgtttttgttattttgtggattggggtagttagtatagtaaagagtcggttttcggagtttatagtttgtagggagatagataggaaaatagatgatgagacgtttttttattatagtaggtattattttattacggtacggtaggaaaagtatttagatttgttggggtatttgttgaaatgaggtagagaagtttttttttgtatagttttttgagttttttttaggggaagtgacgaaggggtgacgttgttgttgtttagaaattttttgatagtttgtttggggtagaatgtggggatttgaagggtgtaagcgtgagtataattttttatggattgttgtgtgagatgatgagaaaggaatttatttatttttttggagggaggaggagatatgggggtagggggggagtta

SEQ ID NO: 1917 - DNA, 2188 bp, Artificial Sequence
  chemically treated genomic DNA (Homo sapiens)
tggttttttttttgtttttatgtttttttttttttttagaaagatgggtgagttttttttttattattttatataataatttatgaagaattgtgtttacgtttgtattttttagatttttatattttgttttaagtaggttgttaagaaatttttgagtaataataacgttattttttcgttattttttttggaaagaatttaggagattgtgtagaaggaaatttttttattttattttaatagatgttttagtaaatttaagtgttttttttgtcgtgtcgtggtaaaatagtgtttgttatgatgagagggcgttttattatttgtttttttgtttgtttttttgtaggttgtgggtttcgggggtcggttttttgttgtattggttgttttaatttataggataatagaggcgggtgtaggaagtttgaggttttttataagtagttgtaggtttttgttttttgtgaattttagttttgatgtttttacgtttttttagttatttgtcggcgtaattttgttgttatggagttgtggttaatggtaaagttttgttttggtgttataaggttttaggagtagtcgataatgtatacgtaaagtagttgtttttaaaattttttatgtgtttattatattaaaagtaattttttggaaattattaagatatgatgtatatttgtttgtaatttttatagtttttttttttttttaagtgaagaatgtaaaatatttaaaattgagtttgtttttttttttttataaaaggttttgtaggtttttcgtttttataatttttttagttgggtttgatgtttttatttttaggatgattttgttagttcggatttttaaggttgtttttttgggtttagattttttggaaggttttttttttttgattttgttatttattttaaatttatttagtttttttttgtttttgttattagaagtattttttttttttttttgaatttaagtttattgtgttattttttggtttaaaattttgaaatatttttagtttttttaaagttggtttcgggttgttgttgttgttgttgtatattttttgtaagtaaataagtaatattcgcggtgtttttttttcggtatcggagatcgggaggaagaagaatttgtaggatttatttttaaagaaatatattataattatttattagttttcgttttattttcgcggatgttggaaacgtttgacgttgggttagtcgttttttttcgtattttcggcgtggttattttaggaggttttgatattttacggacggtggtttattgggttttattatcgttattaagcgtatatatattttttttatgtatacgtatattgatatatgtttatatttacgtttattttatttttagttgaggttatattttacgttttcgagagaaagcgggcgaggtagtaggagttttgagggataattggttcgttcgtttgtttgtgtttcggggtatttatagagtgggtacgtgattttcggggtgtttgtgagggcgtttttggaagagtttcgtgtttgtaatggcggattgaatatagtagttggtttttttttaaggtgggtgggtttcgtttaatttgtggaagtcggaataggataaaaaggtggagggcgtttggattttttttgtttgatttaaggtagatattcgttttttttggtcgttggtatttttggtttttagggatttagattttgattggcgtttattttattggatttcggtttttaggttttggaatttgtattgttagtatttttgggtgttcggtttgcggatagtagatcgtgggattttttagtttttagaattgtacgaagtgtttttttacgaatttttttttatgtacgtgtattttattggttttgtttttttgtagaattttgattaatgtaaatttttttattttatagtagtgtatgtataaatttatttatattttttttttttttgttttttttatcgtaagtttttttcgattagaggttaatttcgttgcggtgtttcggatttattttttgtattagtttttttttttgttttttaaaagttcgcgttttttgtgggtttttaaggttgttttttagtatttttacgttagagttttttagttttttttttttttttaaaagcgtttttatag

SEQ ID NO: 1918 - DNA, 2449 bp, Artificial Sequence
  chemically treated genomic DNA (Homo sapiens)
gttttttttgttttttgagtaggggttgagggtgcgttgggagaggagggttggggttagggagggagtgggtacgtagattttagaagtttgggagttagcggttgggttttggattttgttatagtatcgtggaggtttgagagggttaggttagtttttgagttttttggtttggaaagggtttttatgtgggtgggttaggaggtagagatggatattatgtttaggtttggttttatttatttttaatgttaggaggatcgggggaggttattgagttttttagagttttagggattttttcgtgtttttttatatttcggtttttaagggatttagaaagggaggtatagtttatgagttttattttattttattttatttattttttgagagggagtttcgttttgtcgtttaggttggagtgtaatggtataatttcggtttagtgtaatttttattttttgggtttaagcgatttttttattttagttttttaagtagttggaattataggtgttagttattatgtttggttaatttttgtatttttagtagagttagggtttcgttatgttggttaggttggtgttaaatttttgatttaggtgattcgttcgttttagatttttaaagtgttgggattataggcgtgagttattgtgtttagttatgagtttcgttttatagattcgagagttgaggttttgagaagtaaggtttggttaggttttttggtttagggaggtttagggttaggttgtttttaaggttaggttataggattgtttggggtatagggtttgttgttgggttaatatttttttttttgttcgttagtatcgagggggagtacgtgttagtggagggcgacgaggtgatttataagatgtgttttattttttttaagaattagaagttttaggtcgtggaggtggtgtttatttagttggttttttatattttttacgagacgtggtttggttaggtcgtgggtttttaggttgagtggtttataggttagttggtcgggggttggggagttatatagggtgaacgggtagtagtcggttttatgttttattgttttggttgatgagtttttcggtggttttagtgtgtacgtttgtttgttcgtttgtgtttgtggttatgagcgtgtgtttttatttattttacgattcgtgattattgtgtaagttggttaggaggtaggtggagggtaaggttattagatttggtttcgcgttgtttattgtttttttttttttttttttgtcgtagatacgtaggattcgttcgtttttttgtttattcgtttttacggtgattgagttgcgagagtttgcgttgggtttattttttggttttcgtttttgagttgtttcgtgttagtttttggttcggagttaggttttttgtgttatttatattttttttttttggttgaggtttttcgttatagtttggattttttttttagaagtttggtcgatgggtgtttttggggagttttttagtttttggtaggggaggaggattgatacggaggtatataggttttttattgtcgaggttagtttttttttttgttttgtttttttagtgttatggagaggtaggaagaggggtttgagggcggaaggggtttggggtttttatttcgtcggttagttttttttttttagtttggtagtggcgttgggtttttttttttgggttgtattgagtcgagtttaggggtttgtagagggtgggggtttatttttttagtttggttgtagattttttttattttgatttataagttttattgatgttttgggttatgttcggttgacggttgttgtggatgtcgcgagggacggatatacgttcggggtatttacgaggagggtttttagtttgggagattggttttgcggtttttacgttaaattttttttttaaagttttaatagattagtggtcgaggtgtggtttttattgtatttatttttgaagatgtgtggttgttgttgttatttggagtttttttggggttaagatgtgtgtgtattcggggtcgtggttatttatttttaggtaggggtgagggtggtttggtttaggaggttaggaaggagggttttgtttgtttttatttttgggtgtattttttgtttattatttttttttttagagagtatatcgtttgatcggggagaagtggggtcgtggttcgagggagggttggttaggggtgggatttttatgagatttagtttgtgagtaaaattgggggtttaaatgtttaggatgaggggattagtgattgtttaggaggattttttgttttgtaggtgttttaagatcgtagggtagaaattagtcgggatgtttgtattttattttcggttttagggtttattatataaaatttgggagtttagagttgttgaggtgt

SEQ ID NO: 1919 - DNA, 2449 bp, Artificial Sequence
  chemically treated genomic DNA (Homo sapiens)
atattttagtagttttgggtttttagattttatgtggtgggttttggggtcgggggtgggatgtaggtatttcggttgatttttattttgcggttttggggtatttataaggtaagggatttttttagatagttattgatttttttattttgggtatttgagtttttagttttatttatagattgagttttataagggttttatttttggttagttttttttcgaattacggttttattttttttcggttaggcgatgtgttttttagaagggagggtggtaggtagggggtgtatttagaggtggaggtagatagggtttttttttttggttttttgggttaggttatttttatttttgtttgggagtgaatggttacgatttcgggtgtatatatattttggttttaaaaggattttaggtgatagtaatagttatatatttttagggatggatgtaataagagttatatttcggttattggtttgttagggttttgggaagagagtttgacgtggaggtcgtagggttagttttttaggttgggggtttttttcgtgggtgtttcggacgtgtgttcgtttttcgcggtatttatagtagtcgttagtcgggtatggtttagagtattagtggggtttgtgagttagggtaaaggaggtttgtagttaagttggagagatggatttttattttttgtaaatttttgggttcggtttagtatagtttaggggaaggagtttagcgttattgttaggttgaggaggagggattggtcggcgaaatgggagttttaaatttttttcgtttttaggtttttttttttgtttttttatggtattgagagagtagagtaggaaggaaggttggtttcggtagtgagaggtttgtgtgttttcgtgttagttttttttttttgttagaggttgagaggttttttaaaagtatttatcggttaggtttttgagggaagggtttaggttgtggcgggggattttagttaagggagggagatgtaagtagtatagagagtttggtttcgggttagggattgatacgggatagtttaggggcggaggttagggagtgagtttagcgtaggttttcgtagtttagttatcgtggggacgggtaagtaggagggcgagcgggttttgcgtgtttgcggtagggaggggaggagagaggtagtggatagcgcgaagttaggtttggtggttttgttttttatttattttttggttagtttgtatagtagttacgggtcgtggggtgggtggaggtatacgtttatagttataagtatagacggatagatagacgtgtatattgaggttatcgaaggatttattagttagggtagtggggtatggagtcggttgttgttcgtttattttgtgtggttttttaattttcggttagttggtttgtgaattatttagtttaggagtttacgatttggttagattacgtttcgtggggagtgtggggggttagttgagtgagtattatttttacggtttggaatttttggtttttgggagggatagggtatattttgtaggttatttcgtcgttttttattggtacgtattttttttcgatgttggcgggtaggaagaggggtattagtttagtagtaggttttgtgttttagataattttgtggtttggttttgggggtagtttggttttaagtttttttaggttaggaggtttggttaggttttgttttttagaattttagttttcgaatttgtaaaacgggatttatggttgggtatagtggtttacgtttgtaattttagtattttgggagtttgaggcgggcggattatttgagttaggagtttgatattaatttggttaatatggcgaaattttggttttattaaaagtataaaaattagttaggtatggtggttggtatttgtaattttagttatttgggaggttgaggtgggagaatcgtttgaatttaggaagtggaggttgtattgagtcgagattgtgttattgtattttagtttgggcgatagagcgagatttttttttaaaaaataaataaaataaaataaaatgggatttataaattgtatttttttttttgggttttttggggatcgagatgtgaaagggtacggggaggtttttaaagttttgagaagtttagtgatttttttcggtttttttggtattagaagtgggtggggttaggtttagatatgatatttatttttattttttggtttatttatatgaaggttttttttaggttaagaggtttaggagttggtttagtttttttagatttttacgatgttgtaataggatttagggtttagtcgttggtttttaggtttttggggtttgcgtgtttattttttttttggttttagttttttttttttaacgtatttttagtttttatttagaggatagaaaaggt

SEQ ID NO: 1920 - DNA, 2488 bp, Artificial Sequence
  chemically treated genomic DNA (Homo sapiens)
aattttagggaggcggggcggagacggcggcgaggaggaggtcgcggcgcgggacgtatagagttgcggttcgggcggcgtttttttgcggcggttcggttcggtttcggttttcgttggggtaatgtttttcggggtcgcgggatgagttaggtgagcgcggagatttttagtattttttgtttggtgcgtatggacgggggtggggaggcggggcgggaagcggcgttttcggtttttgtttttcggggttgtgtgattttgggcggtttcgtattttttttgggtttagagttttagtatcggtagggtttgcggaggtcgttttgagttttggtttcgtaggtatcggtttggagcgttggggaggttttttggaggaggcggggtttggttttggtttcggatcgtcgagatcggttacgttgcgtcgtttggacgtcgggtttttttatttatagttttgcgatttttacgagttcgattttttttgcgttttagtttttttatttataaaatggagataatgttttcgcgcgttgagttcgagcgcggtcgtgttgttatattattgttgttgttatgtcgttaatgacggtatagtttttatggaaggggggttaaggaaggtacggggattttttcgtaggatatggggtgggtattagttttaagttatgtatataatttattttgaggttaggatttgggtttttttcgtgtttattgggggttttagtcgttgtttttatttttttaggttttagttttttataatgggcgcgtttttttgtttgagagggaggttttagttaagttttagtttttatcgtaaaaagttatatagtaaatatttaatggattttaaatttataaaaattattttatagagttttatgaggtagggaatgttattgtatttatttcgtagatgaggaaatttggggtatcgatattttttagagttaatatgtaaattaggtatttggtttgagtgatagattggtgtaggtggttagtagtttaatttgtattgagcgtttattgggtttttatagcgattttgaattgtgtttttgtttatagtgattcggtcggttcgggtatggtagatttagtggcgggtatcgcgggttcggcggttaagagcgtgcggttatttcgttttagtgaggtttacgtggaggttatgaaggaggatttggtcgagtggtttaatgttttgtacggtttgggtttttcgggtggtggcgatggttttttgatagggttggttacgggtacgattttgtgttaatatgttaacgtcgtgatcgaggttgttcgtgtattggtagtcgttcgttcggttcgaggtgtggttttttaggcgtatagtgtagtgtttggtttttttatggcgcgcgataacgtggttatttttatcggttggtgtcgcgtggagttgggtgtgtcggaggtgtttatgtttgagattgaggatttggtgttgcgtaagaacgagaagagcgtggtgttgtgtttgttggaggtggcgcggcgtggggtacgtttgggtttgttggttttacgtttcgtgtagtttgagtaggagattgagcgggagttgcgtgttgtatttttagtttttaacgtttttgtcgttggggaggatattattgaaatcgttttcgtattagggatttttgttcgcggttttcgtatgatatttagcgatttgcgtaatttcgacgagttggtgagttttttagtattaggtgttagggattcgatagtatagttagtgtttgtaatttgtttttgaattttttagggtttattttgttatttgtagaatagtttgttttataaaaagagtgtatatgttgagtattaaatcgaggaatgtatatttgattttaaggaaatgggtagtttatagagagggaggtgtcggggagatgacgtagtttagtcgggtttgggataggatgcgggtttttggtacgatttttttttattttgtgtgttaattgtgttttaattgagtttgtgtatttttttttttggggggtcgtatgatcggggcgttttttttgtgttttttttgtagttagttttaggtagatgtatttataattttatggaggttcgaggttgagcgggtgttgtgatgttcggttgagacgaggtatggaaaaatttgggtaaggtgtttggtatatagtaggtgttttagggggttttgtaggtttttttattttttaggtatttttgggaagtttagttgggttgttgttgttgttgggagtagggattttgtttggaattataggattcgttttattttaagtataggcgttgttgggttttgtttttaagtttttttttttttaggatttgggtggtttttgttatttttgagggttggattaagagttttttttttattagaaggttaggattataatgtgtttgtttgggaggtagatagcggatggtagtgggt

SEQ ID NO: 1921 - DNA, 2488 bp, Artificial Sequence
  chemically treated genomic DNA (Homo sapiens)
gtttattgttattcgttatttgttttttaggtaggtatattgtagttttgattttttgataagaaggaaatttttggtttagtttttaggggtggtaggggttatttagattttgggagaggagagatttgggggtagggtttagtaacgtttatgtttagagtagaacgaattttgtaattttaaataggatttttgtttttagtaatagtagtaatttagttaggttttttaggggtgtttggggagtggggagatttgtagagttttttggggtatttattgtgtgttaggtattttgtttaggtttttttatgtttcgttttaatcgagtattatagtattcgtttaatttcgagtttttatgaggttgtgggtatatttgtttaagattgattgtagggagggtatagaggaggcgtttcgattatgcggttttttagaagaaggaatgtataagtttagttgaggtatagttagtatataaagtgagggaagatcgtgttaggagttcgtattttgttttaggttcggttgggttgcgttattttttcggtatttttttttttgtgggttatttatttttttggggttaggtatatatttttcggtttggtgtttaatatgtgtattttttttgtggggtagattgttttgtagatagtagggtggattttgggaggtttagggatagattgtaggtattggttgtgttgtcgggtttttggtatttggtgttgggggatttattagttcgtcgaggttgcgtaggtcgttgggtgttatgcgggggtcgcgggtaggagtttttggtgcgggggcggttttagtggtgttttttttagcggtaggggcgttgggggttgggggtgtagtacgtagttttcgtttaattttttgtttaaattgtacgaggcgtggggttagtaggtttaggcgtgttttacgtcgcgttatttttagtaggtatagtattacgtttttttcgtttttgcgtagtattaggtttttagttttaaatatgagtattttcggtatatttagttttacgcggtattagtcgatgaaggtggttacgttgtcgcgcgttatgaaggagttaggtattatattgtgcgtttggaaggttatatttcgggtcgggcgggcggttgttaatgtacgggtagtttcggttacggcgttggtatgttggtatagggtcgtgttcgtggttagttttgttaggaagttatcgttattattcgggagatttaggtcgtataaggtattgagttattcggttaggtttttttttatggtttttacgtaggttttattggagcgaaatggtcgtacgtttttggtcgtcgagttcgcgatgttcgttattgggtttgttatgttcggatcggtcgagttattgtgggtaggaatatagtttaggatcgttgtggggatttagtaagcgtttagtataaattaagttgttggttatttgtattagtttgttatttaggttaaatgtttggtttatatgttggttttgggaaatgtcggtgttttaagtttttttatttgcgaaatgggtatagtaatattttttgttttataggattttatgggataatttttataaatttagggtttattaagtgtttgttgtgtggttttttgcggtggaaattggggtttggttggggttttttttttaggtagggaggcgcgtttattgtgaagggttgggatttagagaagtgaagataacggttaaggtttttagtggatacgaaaggaatttaggttttgattttagagtgggttatgtgtatggtttagggttggtgtttattttatgttttgcgggaaggttttcgtgttttttttggttttttttttataagggttgtgtcgttattaacgatatagtagtagtaatagtgtaatagtacgatcgcgttcgggtttagcgcgcggaggtattatttttattttatagatgaggaaattgaggcgtagaaagggtcgagttcgtgaaggtcgtagagttgtgggtggaggagttcggcgtttaggcggcgtagcgtggtcggtttcggcgattcggggttagggttaggtttcgttttttttaagaagtttttttagcgttttaggtcggtgtttgcggggttaggatttagagcggttttcgtaggttttgtcggtgttggggttttgggtttagagagggtgcggggtcgtttaaggttatatagtttcggggaatagaggtcgaggacgtcgtttttcgtttcgtttttttattttcgtttatgcgtattaggtagggagtgttgggggttttcgcgtttatttggtttatttcgcggtttcggggagtattgttttagcgggggtcggagtcgggtcgggtcgtcgtagggaggcgtcgttcgagtcgtagttttatgcgtttcgcgtcgcggtttttttttcgtcgtcgttttcgtttcgtttttttggaatt

SEQ ID NO: 1922 - DNA, 2379 bp, Artificial Sequence
  chemically treated genomic DNA (Homo sapiens)
ggttattcgtttagttatggattttcgcgtttaattatgagtttttttatatattatttattttttatttatttgtttatattttatttttcgtgtagttacgaatttatttagtatttttttattatttatatttttttaattatttattagtgtttgtttattatatttgcgtatttttttatgtttttaattatttagttagtgatttttttttcgttatttaaggttatttatttgtatatatagatttttatttatttagacgtatattttttggtttatttattcgtttgtttattatttattaagtataggattatttatttattcgtgggttggtgtgggtagttattattcgttttgtttatgtacgtatttattttgcgttgttttttttttgtagtaggagtgggtatcgtatattattttgtttatgaagtttcgagggggtattgtttggttttagttagttttatttgtttcgtttttttttgtaggatagtggtgtttgtttattttttttgttagttgttagttttgttgtttttcgtattttttggtaattttattgtatgaaattttttaaatttttttttacgttaagtgttaaaatagtttagtttaagtgtttttaggatttttacggagtttgatcgtaaagaggtgagtatatttaagtttttatttttagtttagttttttgtattagagttttagggttgattttgtagaggggaagtagtttttttttagaggtaggtatatagtaggtgtttaagtaataggatttttgttatttttatatttttggaagaatttgtttattttttattttttgttcgtttttaaggatcgttattttgaatttggtaaggcggttttttttatttttattgaatgaatgaggaaattgaggtagggtgcgggggtcgggaggagaggagtattgttcgaggttttcgggggaggttagggaaattttagttcggtaggttttcgggttttcggtttttagggttttttttttaatttattttcggtttttttaaggtttttatttacgcggacgagttttttagtttgtcgtagagttagtcgttttgggtttcgggtattaatatttttattacgtttttagcggagaagcgtagtagcgtgtggttggcgtttttcgagtgggagattagggcgcggatttttttggcgttttcgtcgtcgttcgggcgttcgttaaaggagttggagcgcgagttttgggcgttgtcgttgtagagcgaggttgtgggcgggagagcgcggcggtacgtgggtaggaagttttttttggcgtttgttttcgattttttttgttgtagttttattttcgcgtttttttcggtttttttgtcgtttcggggcgggggtatttataggtcgacggcgtgcggggtagggagcgacggtttggttttagttgggacgcgggtttcgcgtcgggttcggtgtcgtaggagtcggagtcgtgtcggttgcggggggagttgaatttttttaggggtttcgggggttgcgggggagatgggtaggggagggtggggcgggggggggggggggcggggtcgcgttttagtttagtttttatttttagttttaggcgtcggcgtaggggttttgggggcggagatcgggttattacgggggcgcggagaacgcgtcggggcggaagggtaggtcgggggatgtagcgtagagcgggagtttggggggtaggaggttttaggttgggggtttgaggtttcgggttttcgcggggggcggcgggggcgcgaacggcggcgggggcgtttagggttttattatgtttaggtaggtgggcgttaggcggttcgaggggtagggcggttttagcgcggggtttagtaggtcgggggagtgggcgcgcgacgggttgcggttggttttagattgttttttttatagtagtacgcggttttggagtatttttcgggtttggtcgggcggggatacgggggttagttaggttcgggcggttttttgaattttggggatttaaaatgatattttcgatttgagagtttaggttttattagttcgggacgatcggattttttagttggaaggagttagaagttagtttatcgtttaattcgtattttttatttttggtaaaggtatttttattttttacgaagagttttttttgatttttcgtttttcgcgttaatgtgtgtgttttgagcggggttgtttttatcgtttagttttaggggtaggggtggtatttaggtttggttatttaattattttatttttttttttgtagcgataggtttaggaatggcgtttagatagaaattacgattaaagaatttagtt

SEQ ID NO: 1923 - DNA, 2379 bp, Artificial Sequence
  chemically treated genomic DNA (Homo sapiens)
gattgggttttttggtcgtagtttttatttaagcgttatttttgagtttatcgttgtaggaaggaggatggggtgattgagtggttaggtttgggtgttatttttatttttgaagttgggcggtgaggatagtttcgtttaaagtatatatattgacgcgggaagcggggggttagaggaagtttttcgtggaaaatggaggtgtttttgttaaaagtagagggtgcgggttggacggtgagttggtttttggttttttttagttagaaaattcggtcgtttcgagttggtagggtttgagtttttaggtcgagggtgttattttgggtttttaggatttagggagtcgttcggatttggttgattttcgtgttttcgttcggttaggttcgggggatgttttagaatcgcgtgttgttgtggaaggagtagtttgaggttagtcgtagttcgtcgcgcgtttattttttcggtttgttgggtttcgcgttggggtcgttttatttttcgggtcgtttgacgtttatttgtttggatatggtgaggttttgggcgttttcgtcgtcgttcgcgttttcgtcgtttttcgcgggggttcggggttttaggtttttagtttggagttttttgttttttaggttttcgttttacgttgtatttttcggtttgttttttcgtttcggcgcgtttttcgcgttttcgtggtggttcggttttcgtttttagaatttttacgtcgacgtttgggattgggggtgggggttggattagggcgcggtttcgttttttttttttttcgttttatttttttttgtttatttttttcgtagttttcgaggtttttgggagagtttagtttttttcgtagtcggtacggtttcggtttttacggtatcgagttcgacgcgaggttcgcgttttagttagagttagatcgtcgttttttgtttcgtacgtcgtcggtttgtgagtgttttcgtttcggggcggtaggagggtcgggagaggcgcgggggtggggttgtagtaggagggatcgagggtagacgttaggaagaattttttgtttacgtgtcgtcgcgttttttcgtttatagtttcgttttatagcggtagcgtttaaagttcgcgttttaatttttttggcgagcgttcgggcggcggcgggggcgttaggagagttcgcgttttggttttttattcggagggcgttaattatacgttgttgcgttttttcgttggggacgtggtggaggtgttggtgttcgaggtttagaacggttggttttacggtaagttggagggttcgttcgcgtgagtgggagttttggaggggtcgggggtgggttgagaagaaggttttgggggtcgggaattcggggatttgtcggattgaggtttttttggtttttttcgggggtttcggataatgttttttttttttcgattttcgtattttgttttagtttttttatttatttagtgggagtaggaagagtcgttttattaagtttaggatgacggtttttgagagcgggtagaggatgggggatgggtaggtttttttaaaagtgtggaaatggtagaaattttattgtttgagtatttattgtgtgtttgtttttgggaggaggttgttttttttttgtagagttagttttggaattttgatgtagggggttgggttgggagtaggggtttaaatgtgtttatttttttgcggttaggtttcgtggaaattttgaaagtatttaaattgggttgttttgatatttgacgtggaggaggatttggggagttttatatagtgaggttgttagaaagtgcggaggatagtagggttggtagttagtagagggaatggataggtattattgttttgtaggggaaaacggggtagatggggttggttggagttaggtagtgttttttcggggttttatgggtagggtagtgtacggtgtttatttttgttgtaggagagaagtagcgtaggatgaatgcgtgtatgggtagagcgggtggtggttgtttatattagtttacggatggatgagtggttttgtgtttaatggatggtggataggcgaatgggtggattaggggatgtgcgtttgggtaggtggaggtttgtgtgtgtaagtggatggttttaaatggcggggggggggttattgattgggtggttagggatatgggaggatgcgtagatgtggtggatagatattgatgggtgattggagaggtgtgagtggtgagggggtgttggatggattcgtggttatacgggggatggagtatagataggtgagtgggggataggtgatgtatggagggatttatagttaggcgcgaaggtttatagttgggcgggtgatt

SEQ ID NO: 1924 - DNA, 2385 bp, Artificial Sequence
  chemically treated genomic DNA (Homo sapiens)
tagggaagatttttcgggatttaacggtttaggtagttgcgtttttatttttcgtttgggtagggaaggatttattttagttataagtagtttggagatggatggtttggtagagaaggggaaattttagtattaatttagttttaggttttattttgtagttaggtttgttttgtttagagttttcgaggggtttagtttgattttgataggtagaagagattttattttaggtttagaagtgagggagtagagtaaagggtttttggtttattgtgtgattattatttgtcgttttgtttagtgggatagggatgtttcgtatttagtttttttattatttaggtggtttgggggtatttaaggtttcgggtagtttttgagttgggtttaggttttatggcggttttagggtaggtagggtgagagttgatagggaatagatgagggaagagtattttatatattcgggggttttattataagatttttttagcgtttttttttttttttaggttttttatttttggttatttttttaggtgatgtttgaagtttaagggattgtgtttatttttaggttagtatagtttgtgaatgttgatgaaaattggggttttttatattttttttttttggttttattttttgtcgggcgtgtttgaaattggatatatatatatatatagtatatacgtgtatatgtattagttttagagttttgggggttaaggagttaggtaggtgtttgttgtttattggtacgggtttagttggatttagttcggttttttgttttttgtttttattagtttttttttgcggttattagtttttttttttttgtaattgagggattagggttttaagtagttgggtttggtttaggtttggttttgttttttgggtttttttttgtttgagttgggtgatatttttgtttgtaaggatttagttgttttaagggttttgggaggggaggttaggggtagtttaggggattagtgattatagggtaatttgtagtatttgttgggggtttagtaggtaagatgttttttgtttgttgttgtttgttatggttgtttggtggttatggtcgggggcgggtttgttatgttgggaattgtttagaggttgcggttagtttgaggtttttcgttttggcgagttagttttcgagtgtagattgtcgtcgatgatttttgttttttggggtattcgtgcggttatgtgggttgggtaggattggtatttttttttttttatcgttgttatggttaggggcgggtttatttttcgaggttgtgcggagaggattttaggttgttgtatgtgagtagagtagtcggtgtttggttcggatttttttgttatttggggttcggcgtgtttataggtcggttttgttcgttagattttgtagacgttgtttcggggtttttgtgtttgtacgtagggttgagttattagtcgagcggagagtggggagggatataggtggggagtagggggaggtttttgggggaattagggaggaggggtaggatagaagagaaaggggatgaagggtaatagaggaaggagaatagcgtggggataggagaggggtagggattggggaagaggagatataaggtaggatagggtagggtagtttttggaattgtggggttgttatagggatattagtttgggggagtagttaattttaggtatttgatagggatttagtgggttttggttaaggcgatttggttaacggaattggggtttttttggtatttattataagtttaggtttgttcgtgggattttattttatttgtatttagttttttttgtatatatagttggttattatttaatgtaatttttttgatattttataggtagtagtgttggtttttagggtttaaatgaaatagattttataggcgtgttttttatataggattgagtatggaatgtgtttttttttgagtttttgatttttaagtttggattgatatgtttagggaggttgtaagggtgtgttttttggattatgggtagggggtatcgtgtgtagttgttgaggtttaggatgtgtgggaaagggtttggagtggaggagaagaggtttgtaggggagtggatagtttagggttgggattagtattttaatatgtatgattcgtggaagatgaggttggtcgtatatagaaggtgtttatttagtgttcgttagatgttagatgttggcgtaattattataggggttatatatttttcgttaggattattagtaaggtagggttatcgttttatattgtttttgtagagacggagattggggattaggagtttggttttattttggtttgtagttttgggggttgttgg

SEQ ID NO: 1925 - DNA, 2385 bp, Artificial Sequence
  chemically treated genomic DNA (Homo sapiens)
ttagtagtttttaaggttgtaggttagagtagggttaggtttttgatttttagttttcgtttttgtaagaatagtgtgggacggtggttttgttttgttggtggttttaacggagggtgtgtgatttttgtggtgattacgttagtatttggtatttgacgagtattgagtaagtattttttgtgtgcgattagttttattttttacggattatgtatattggggtgttggttttagttttggattgtttatttttttgtaggtttttttttttttattttaggtttttttttatatattttgagttttagtagttgtatacggtgttttttgtttatgatttaggggatatatttttgtagtttttttggatatgttagtttaggtttgggagttagagatttagggaggggtatattttatgtttagttttgtgtgagggatacgtttgtggggtttgttttatttggattttagagattaatattgttgtttgtgggatgttagagggattatattaggtggtggttagttgtgtatatagggagggttgggtataggtgggatgaggttttacgggtaggtttgggtttatggtgggtgttaggaaaattttagtttcgttgattagatcgttttggttaagatttattaggtttttgttagatgtttggggttagttgtttttttaggttggtatttttgtgatagttttatagttttaagggttgttttgttttgttttgttttgtgtttttttttttttagtttttgttttttttttgtttttacgttgtttttttttttttgttattttttatttttttttttttttgttttgttttttttttttgatttttttaggggtttttttttattttttatttgtgtttttttttatttttcgttcggttggtggtttagttttgcgtgtagatataaaggtttcggggtagcgtttgtagagtttggcgggtaaggtcgatttgtaaatacgtcgggttttagatggtagaggggttcgggttagatatcggttgttttgtttatatgtagtagtttggggtttttttcgtatagtttcgggaggtgggttcgtttttggttatggtaacggtggggaggggagaatgttagttttgtttaatttatatggtcgtacggatgttttaggaggtaagaattatcggcgatagtttgtattcgggggttggttcgttagggcgaggggttttaggttggtcgtagtttttgagtagtttttagtatgataagttcgttttcggttatggttattagatagttatgatagatagtagtaggtaggggatattttatttgttgagtttttagtaggtattgtaaattgttttgtagttattggttttttaggttgtttttggtttttttttttagggtttttgagatagttggatttttgtaaataggagtgttatttaatttaggtagaagggagtttaaaaaatagggttagatttggattaaatttagttgtttggagttttggttttttagttgtagaaagaaagaggttggtggtcgtagaaagaggttggtaggggtaaggagtaggaggtcgggttagatttagttgagttcgtgttaatgggtagtaagtatttgtttggttttttggtttttagagttttggggttggtgtatatatacgtgtgtgttgtgtgtgtgtgtgtgtttagttttaggtacgttcggtagagggtggagttagaagggagggatgtggggagttttaatttttattaatatttataaattgtattgatttgagggtggatatagttttttgagttttaggtattatttggggaggtggttaagggtggaagatttggaaggaaagagaaacgttgaggaagttttatggtggaattttcgggtgtgtggggtgttttttttttatttgttttttgttagtttttattttgtttgttttgagatcgttatgagatttgggtttagtttaggggttgttcgaagttttgggtgtttttaggttatttggatggtgaggaggttgggtgcggggtatttttgttttattgggtagggcggtaggtagtggttatatagtaggttagggattttttgttttatttttttatttttgggtttggagtggggttttttttatttgttagggttaggttgagtttttcgaggattttgggtagggtagatttggttgtaaggtggggtttggggttgggttggtgttggggtttttttttttttgttaaattatttatttttaggttgtttgtgattggagtgagtttttttttgtttaggcggggagtaaagacgtagttatttgggtcgttaggtttcggaggatttttttta

SEQ ID NO: 1926 - DNA, 2452 bp, Artificial Sequence
  chemically treated genomic DNA (Homo sapiens)
gagtggagttgggtgttttaggaggatgttagtttttattaggtttttataattgtattgagaggttagttttgtttagtttatagatagggatattgaggtttaggtaggggaggttcggggtaggtaggttgtgcggtattggcggggttaggtgggtgtgtttgattgggagttattgtttgtgtttcggatttgagatagtaataataatgattattataattatgagagcggtattttttaggatttaggttatagttttagtgatgatgatagtatagtatgtggtaggaacgtggtaatattttcgggtttggtttaattttgggggtatagtagtttttttcggtgttttttttattgtttgtttttttagtttgaggtgggttttggttgtatagaggtgagatttgggttgttagggtgaggggattagggttcgttatttgaggggagagaaggtttagtttagattttgttttagatttttagtgttgatgtttttgttgtattttttatacgggatttgttgagtagttattatgtgttggggttttgagtcgggttgaggttttggtcgggggagttgtatattattgtataattgataagggtagggagtttagtaggaggacggaggtttagatagtgaggttaggtcggggattggtgggagggtttggttgggttgaatattggtggaagtgtgtgtgtgtgagtgtgtatgtgtgtgtgtttgtgtttgtgtgtgtagggggtagtgttgttttttgtcgcgttgtgaattgagtgtgtaattgtgtaaggagggttaaggtgtttagagaggttttttacgtttgggaggaaaatttaggatttttatagtgcgaaggagatatcgttaggtgacgaaggtattttgtcgtaggtgcggtgtttttggggtgtttgttgggttatattgggttttgggtttttaggggttgttttgattatttttaggaggaaatgacgggtggagttttggggttattagagaagatatagtttagagaatttgagtaagaaattttatagtttgagtttagtagttattaagcggagggaaagtttcgttttttcgtgaaattaaacgaaggtagttgagtattgtgattattgtattatttttgacgtttttgttggtttttaatttagttataaattttacgggcgggggacggtataacgttttatttgtttggttacgcgattcggtagtatttggattttgtttagttagttggtaggaaaattatattttttatgattgatggagtgcgtgtttgtggggattaagaggcgggggttgtgtggggttgagttattgtcgttagggtttttaatattgttgtttagcggtggtttgggggttgtttcggggtttttatttattaaatttaaggggtttttgagaggggaggttgtgtcggttttcgttggggagtcgaaggttttgaggttgggtttagtagtcgtttagtttatttttttgttttagttttgggatttgtttttcgtttatcgtgggttttttcgttgtagtagttagggtgggagttaggggtagggaatttttgggtattgaggtagttttggtttttagtatagttgttttttgtttttattttttttggtattatttgattgttttgttttggtagtgttttggttttttgtttttgttttttttgcggtggtttttgatttattgtttgggttttattaagtttttttagaagtggttggttttattaggagattttaggagtttaggggatgtgggtgtgtttgtagttgttttttttttgttgtttttgtatagggagttttgaggagttggagaagttggatttattcgtaggagaaagagttggggtgggtaggggagaaaggtagagaagttatagaggttgggtttataggagatttttggaggtgaaagtagaagtgaagagagattttgaagagtagcggtatttagtaggaggtttttgagagggttgtgaggggaatagaagtttttttaggggttgatgagtgtttaagaatttttttggtttatattttttgtttggatattttttagtgtgttcgaggagggtcgtagagggcgtttgtaatggttgtttgggtgttaagtggtgttttattgattgggatattatatggaggttgggttattcggggattagggatttagtcgggttatagttagagttataatgttggagatgttttgggttatatagttgggaggattttggagtggtaggaaaggaggtttttttttgatttttaaatgaaatttttttttacgttggttttttaattggtaaaattgaagtttaaaaaggaagttttttatttagagttacgttgcgtgttaaagagtatagcgggagtgggacggtgttcgtgaatttag

SEQ ID NO: 1927 - DNA, 2452 bp, Artificial Sequence
  chemically treated genomic DNA (Homo sapiens)
ttggatttacgggtatcgttttattttcgttgtgttttttgatacgtagcgtgattttgggtgaggagttttttttttgggttttagttttgttagttgaggaattaacgtgagaggggattttatttggagattagggaggagtttttttttttgttattttaaggtttttttagttgtgtgatttaggatatttttagtattatagttttgattgtaattcgattaggtttttggttttcgggtggtttagtttttatgtggtgttttagttaatgaaatattatttggtatttaaatagttattataaacgttttttgcggtttttttcgggtatattggagaatgtttaggtaaggagtgtggattagggaggtttttgaatatttattagtttttggaaaggtttttgttttttttatagtttttttaggagttttttgttgagtgtcgttgttttttaaaatttttttttatttttgtttttatttttagaagttttttatgagtttagtttttgtggtttttttgttttttttttttgtttattttagtttttttttttgcgaatgaatttagtttttttagttttttagggttttttgtgtaggggtagtaggaggaagatagttgtagatatatttatattttttgagtttttggagttttttaatgaggttagttatttttggggaggtttagtgggatttaagtagtgggttaaggattatcgtaggggggatagagataggaggttaaggtattgttaggatagggtagttaggtgatgttaggggaggtggaggtaaggggtagttgtgttgggggttaggattgttttagtgtttaggagttttttgtttttggtttttattttggttgttgtagcgggagggtttacggtgggcggggagtagattttagagttggggtagaggagtaagttgggcgattgttgggtttagttttaaggttttcggttttttagcggaggtcggtatagtttttttttttagaaattttttgggtttggtgggtgagggtttcgaggtagtttttaggttatcgttgaatagtagtattgaaggttttggcggtagtggtttagttttatatagttttcgttttttggtttttatagatacgtattttattaattataagaaatgtgatttttttgttagttggttgggtaaaatttaagtgttgtcgaatcgcgtggttaggtaggtggggcgttgtgtcgtttttcgttcgtgggatttataattgagttaggagttagtaggggcgttaggagtggtgtaatggttataatgtttagttgttttcgtttaattttacggagaagcggggtttttttttcgtttagtagttattgaatttagattgtgaagttttttgtttagattttttggattgtgttttttttggtgattttaagattttattcgttatttttttttgaaagtagttaggataatttttgagggtttagagtttagtgtgatttagtaggtattttagggatatcgtatttgcgataaagtgttttcgttatttaacggtgtttttttcgtattgtggaggttttgggttttttttttaggcgtagagagtttttttaagtattttggttttttttgtatagttgtatatttagtttatagcgcggtaggaggtagtattattttttatatatatagatataaatatatatatatatatatttatatatatatatttttattagtatttagtttagttaggtttttttattaattttcgatttgattttattatttggattttcgtttttttgttggattttttatttttgttagttgtgtagtggtgtgtagttttttcgattagaattttagttcgatttagggttttagtatatagtagttgtttagtaaatttcgtgtaagggatgtagtaggagtattagtattaggggtttgggatagggtttgggttgagttttttttttttttaggtggcgggttttggtttttttattttgatagtttaggttttatttttgtatagttagggtttattttaggttaaaggagtaagtagtggagggggtatcgagggaagttgttgtgtttttagggttaagttaggttcgaggatgttgttacgtttttgttatatgttgtgttgttattattattgaggttgtggtttgggttttgggaggtgtcgtttttatggttgtgatggttattattgttgttgttttaaattcggggtataggtagtggtttttagttagatatatttatttggtttcgttagtgtcgtataatttgtttgtttcgagttttttttgtttgagttttagtgtttttatttgtaaattgggtagggttggttttttagtgtagttgtgaggatttgatgggggttgatatttttttgggatatttagttttattt

SEQ ID NO: 1928 - DNA, 2482 bp, Artificial Sequence; identical to SEQ ID NO: 1454
  chemically treated genomic DNA (Homo sapiens)

SEQ ID NO: 1929 - DNA, 2482 bp, Artificial Sequence; identical to SEQ ID NO: 1455
  chemically treated genomic DNA (Homo sapiens)

SEQ ID NO: 1930 - DNA, 2499 bp, Artificial Sequence
  chemically treated genomic DNA (Homo sapiens)
gggaggggtaaagtgagagttaaggattttgttttttttgggattttattttatttttaattatattataggagaggtggatgtttagggaggttagtgagttgtttaggggtttatatttttgagtggttgtaatagtattgaatatttatagaggtttatttattatattgagttgtttggtggtattgttattttttagtatttgtaaattatgttttaggttatatagtatttttatattttagttttatgagaaaggagggtatttttatgtaatagaggttgttggggttggtagaaagtaggaataggattagaatttaggatgagaattaaaggggtttagagattttgaattagagagattttgtttaagttttagtttcgtttattacgttttttgaaattttaggtaagttattgttagaggttttagtttttttatttttagtggaattggtaaggtttttttttgtttttgtgaagtttaaaatggtatataggaaaggattaatagagatgaattattattattattattattatgttagttattatttttattatcggatagtgtttagaagttgaatttttttgtaatttgagggtataatgaggttttttagagaattattcgtgggtgggggagggggaggcggaaatttgttgaaaattttgttgttatttgagatttagtgtatttttttaaaatgcgtgtgatgaggacgtttttttttttggtaggcgtttgtggtagtggagatattagtgtgttataagattttttttttttttcgcgagtggtggtttaggttggggagtagttttgttttttttgtttaatatgcgtttttttaatttttagtattttcgatcgcgaggattaggttagtttacgggtcggtagtttggcggcgttcgagaaacggtaggtcgagaagaagaaagagttgatgaaggcgtagagtttgtttaagattttagttttttaggcgcgtaaggttatgattgagaagttggagaaggagggcgcggtcgggtgagttgtagaagtgggttgggtagtggggggcggggcgtgataggtagtggggggcggggtttgatagttggttcggtagaggcgggaagatcgcgcggttagatttgtggtgtaaaggttcgaaggttatggaaggcggggtttgggatttattgggtgggtttatcgaggtatgttttttatagtcgtgtgatttggttttgatatcgtttttatagtagttttggcggatttcgcgtagtcgtgtagcgatttattagtttcggggtttttaacgttaatagtattaagtagatgttgttggattggtgtcgagttaagattcgcggttacgaggtgagtttcgggaggttagggggtttggaggtttttttagattttagtttaatattttttttttagtagagtttttattatttagtatattttttgttattgtgtggttttatagggaatatggaaaggtttttggggtgaggaaattgaggtttaaagaggatataaggtaagttttagattttagaattagtgatgaagtaatagggttttttgggtggtgggtagggtttaaggtcggattttatttttggagttttttttttgttgttttgtaggaggttttgagttaatttttttaaatgagggaaggagtgatgaggtatgattatagttttagttgggtggcgttgggttttttagtagttttgttttttgaaattgtaaatatgggagttgataggttgatttggaggaggtttatgttttaattatttatttattgtgtaagttacggggtttttttgtgtttagtgttttaggtttggaataatagaatgttgaggggtagatagtaggggggagttgtttttaggtttttgattagtttttttacggtttatagtacgtcgatatttagaattttttttttagttggagtgatgggatggttttttgtgttttggtgtataattttttttttgaggttttcgattatgggtagtttagtttttagaatcgacgttagaatttcgaggtggtttttttatttgcggagtaagtgtgggttttggttttgttaatgttgttgtatatttggggttggatatcgggattaggtttagttgttttgagaatttttggagcgggttagttatattgttagttagcggttgagatttttttttttagagagttttcgtttttttttatttttattttttcgttgttgagcgtgttaggtgttcgtcggaacgaaggagtcgtaggtcggtttattagttcgggttaaagtttattaggtggttttgtttatattttttttattttttttttgtttttttttttttttttttttttttttttgttttgttttttttttattattattagagttttttgtttttacgggatttcggttggagattttaaaaggaggtttttggttcgggtatcgt

SEQ ID NO: 1931 - DNA, 2499 bp, Artificial Sequence
  chemically treated genomic DNA (Homo sapiens)
acggtgttcgggttaggagtttttttttggaatttttagtcgggatttcgtgggagtaggaagttttggtgatagtgggaggagagtaggatagagaaagggagagagagggagaagggggtagagggaggatggaggggatatggatagggttatttggtgggttttggttcgggttggtaggtcggtttgcggttttttcgtttcggcgggtatttggtacgtttagtagcgggggggtggggatggagaaggacggggattttttggggaagggggttttagtcgttgattgataatgtggttggttcgttttaggggtttttagggtaattgggtttggtttcgatgtttagttttagatgtgtagtaatattagtagggttagggtttatatttatttcgtagatgagaaggttatttcgaagttttggcgtcggttttgagggttaagttgtttatagtcgaaggttttagggaagaagttgtgtattagggtatagaaggttattttattattttagttggaggagaagttttggatgtcgacgtgttataagtcgtaggaggattggttaggaatttgggggtaatttttttttgttgtttattttttagtattttgttattttagatttagggtattgggtataaagaggtttcgtagtttgtataatgagtgaatagttggaatatgagttttttttaagttagtttgttaatttttatatttgtaattttaagggatagagttattgagaggtttagcgttatttagttaaggttatggttatgttttattatttttttttttatttagagaaattgatttagggttttttatagagtaataaggaggggattttaagagtgggattcggttttgaattttgtttattatttaagaggttttgttattttattattgattttggaatttagggtttgttttgtgttttttttgagttttagtttttttattttaagagtttttttatgttttttgtgaggttatatagtggtaggaagtgtattgggtaataggagttttgttaagaaggaggtgttgagttggggtttggggaggtttttaggttttttggtttttcggggtttatttcgtagtcgcgagttttggttcgatattagtttagtagtatttgtttgatgttgttggcgttggggatttcgaagttggtggatcgttgtacggttgcgcggggttcgttagggttgttgtaggggcggtgttaggattaggttatacgattataaggggtatgtttcggtgggtttatttagtggattttaggtttcgttttttatgattttcgggtttttgtattatagatttagtcgcgcggttttttcgtttttgtcgggttaattattaagtttcgttttttattgtttattacgtttcgttttttattgtttagtttatttttgtagtttattcggtcgcgttttttttttttagttttttaattatggttttgcgcgtttgggaggttgaggttttgggtagattttgcgtttttattagttttttttttttttcggtttgtcgtttttcgagcgtcgttaggttgtcggttcgtgggttggtttggttttcgcggtcgaagatgttaggggttggggaggcgtatgttaggtagggagagtagggttgttttttagtttggattattattcgcgaggaggagggggggttttgtagtatattagtatttttattgttataaacgtttgttagggagggaggcgtttttattatacgtattttagaggagtatattgagttttaaatgatagtaaggtttttaataggttttcgttttttttttttttatttacgagtagttttttgagaagttttattgtatttttaagttataggggagtttagtttttgggtattattcgataataaaaatgatgattagtataataatagtaataataataatttatttttgttgatttttttttgtgtgttattttaaattttataagagtagggaggggttttattaattttattaaaggtgaggaaattgagatttttggtagtaatttgtttaagattttagaggacgtgatgggcggaattagaatttgaataaggtttttttgatttagagtttttggatttttttggtttttattttggattttgattttgtttttgttttttgttagttttaatagtttttgttatatgggggtattttttttttttatggggttaaggtataaaggtgttgtgtgatttgggatatggtttgtagatattgggaagtggtagtgttattaggtagtttagtgtggtaggtaggtttttgtaagtgtttaatgttattgtagttatttagagatgtgagtttttaagtaatttattggtttttttgagtatttattttttttgtggtgtggttgagaataaaatgagattttaaggagagtaggatttttaatttttattttgtttttttt

SEQ ID NO: 1932 - DNA, 2397 bp, Artificial Sequence
  chemically treated genomic DNA (Homo sapiens)
gggaggtagaggcggaggcggagttaagagcgtatcgtcgcgttcgtcgtgtcgggtttgagttggagtcgggcgtgagtcgtagtaggagtcgtagtcggagttatagtcgtagttagagtcgtagttaaagttttagagagtaggagttggagcgtaggttttgttggattcgcgtttagttcgtcgttaggtatcggtcggaggacgggtcgtggtgttagtttattgttcgggcgttgtgggaggtagcgagttcgcgatttttcgggtcgggtatcgttaggcgcggagtttagatcgtttttttgttaggtttggttacggttagagtacgtaggagtttttagggtttggatttgcgcgtattttaatgatttggggattgaagagaaaaaaggaacgaggattttatttaaaagtataacgtgggtattaggcgaggaggaaagtggagattatttggtacggggtagaggtgtttggagtttacgtttgagtatcggagattttggtattttagtagtcgcgattttggttttgttttgtttgagttggaaatatagtttagtttttagatatcgttggtataggtttggtataagtaagtagtgtttttatttgtttgaaacgggatacggggtcggaggaattaggatttagtttggttttaagcggaattttttggtggtttagaggtcgttattggggagttcgttttttgttttagttttattggtgcggatgtgtcgttgttcgtcggagtattatgatggtaggatgattttagtcgaagtaggagtagtagttggtggtgtttaggcggttgggtttttcgagtggttttttggtagtttttaggtttttcggtagtttggtcgggttcgagtggttatggtagtattggtgtggttgttggcgggagttagtatgttaagttttaataagtggatttttatagtgtacggttttgggcggtttttgttgttgtcggttttgtatatgttggtggtagttttggtatgttatcggggggtacggcgttttatgttaggcggtattcgttgtcgagttttattgtttagttttatttttggtacgtttatggtttgcggtaacgtgggtttaagggttgtgtttttggatttggtataattggttattattattatatttttgtttattttggttttgtcggcgttgttgttgggtcgtcgttattatttattttagttggtcgttatgggttcgttttgtttgggggtcgtttgtagtttggttggagagtttcggatattttttatcggttgtggttttttgttcgtagttatttgttttcgcggatttaagtcggtttagtaaagtaagtgtttgggtggttaattgagaaggtgggggttcgggtgggtgtatggtttggatggttttgtgaggggtatggttgttgttttattttataaatgaggaaattgaggtttatggttgtggaggaagtagaattgaggtttagagagggttaatagtttagtgagttttaggttttagatttaggttttggaggtttaattcgtgtttatttgtttatttatttatttagatagggtttggttttgttatttaggttgtattggtgagattttagtttaatatagttttcgtattttgggtttaagtgatttttttgttttagttttttaagtaagtgggattataggtgtatattattacgttaagttaatttttgtatttttagtagagatagtattttattatgttggttaggttgattttgaatttttgattttttaaggtgttaggattttaagcgtgagttattttatttggttagttaattttttttttttatagatatagagttttgttatgttgttaaggtaggttttgaatttttgtttttagcgattttttttttttagttttttgaagttttggaattataaattagtatttagtgatagttagtgatttgtgtttgattagttttttattttattgtattgtttttatttgatagatgaagaggtttgttttgggttacgtggttagtgagtagtagaggtaagatttaaatttagatagttagattttatgtttttaagagatgtggtttgaggttttggatataaaggaaagttagaaagtatgggttagggagagaaaaggagggtttgggatgagttgggatttggaaggttaggggttaggtttaagtttggggagggttgttgtttattgggagttatagtgtgataggtttggtgttgagtgttgattttgagttgttatggtaattattaattttatttttattttatagatgatgggattaagatttagagaagtttatgatttgataggttgggtatggtattttat

SEQ ID NO: 1933 - DNA, 2397 bp, Artificial Sequence
  chemically treated genomic DNA (Homo sapiens)
atgagatattatgtttagtttgttaaattatgaatttttttgggttttagttttattatttgtaaaatggggataaagttggtggttgttatgataatttaaggttaatatttagtattaagtttgttatattgtagtttttagtaaataatagttttttttagatttagatttgatttttgattttttaaattttagtttattttagattttttttttttttttttggtttatgttttttggtttttttttgtgtttaaagttttaggttatattttttggaagtatggagtttgattatttgggtttagattttgtttttgttgtttattggttacgtggtttagggtaagtttttttatttattaaatgggaataatatagtgagataaaaggttagttaaatatagattattggttattattaaatattggtttgtaattttagaattttaggaagttgaggggggaagatcgttgaggataggagtttaagatttattttggtaatatagtaagattttgtgtttataaaaaaaaaaaattagttgattaggtggggtggtttacgtttgaaattttagtattttgggaggttaggagtttaagattagtttggttaatatggtaaaatgttgtttttattaaaaatataaaaattagtttagcgtggtggtgtgtatttgtagttttatttatttgggaggttgaggtagaagaattatttgaatttaggatgcggaggttgtattgagttgagattttattaatgtagtttgggtgatagagttagattttgtttaaataagtaaataaataaataaatacgagttgggtttttagagtttgagtttggggtttggaatttattgaattgttggttttttttgagttttagttttgttttttttatagttatgaattttagtttttttatttgtaaaatgggataatagttatattttttatagggttatttaggttatgtatttattcggatttttatttttttaattggttatttaggtatttattttgttgaatcgatttgagttcgcggaggtaggtggttgcgagtaggaagttatagtcggtagggggtgttcggaattttttagttaggttgtaggcggtttttaggtagagcggatttatggcggttaattgaagtgggtggtggcggcggtttagtagtagcgtcgatagggttagggtgaatagaggtgtggtggtagtaattagttgtgttaggtttaggggtatagtttttaggtttacgttgtcgtaggttatggacgtgttaaaggtgagattgagtagtaggattcggtagcgagtgtcgtttggtatggggcgtcgtgtttttcggtggtatgttagggttgttattagtatgtgtagggtcgatagtagtaggggtcgtttaaagtcgtgtattgtgaagatttatttgttgaggtttgatatgttggttttcgttagtagttatattagtgttgttatggttattcgggttcggttaggttgtcggagggtttgagggttgttagggggttattcggggggtttagtcgtttgagtattattagttgttgtttttatttcggttgaggttattttgttattatggtgtttcggcgggtagcggtatattcgtattagtgaggttagggtaggaggcgggttttttagtgacgatttttgggttattagagagtttcgtttggggttaggttagattttggttttttcgatttcgtgtttcgttttagataggtgaggatattgtttatttgtgttaggtttgtgttagcgatgtttagaagttaagttgtgtttttagtttagatagggtagagttaaggtcgcggttgttaggatgttagggttttcgatgtttaagcgtgggttttaggtatttttgtttcgtgttaggtggtttttattttttttttcgtttagtgtttacgttatgtttttagatgaaattttcgttttttttttttttttagtttttaggttattagggtgcgcgtagatttagattttgggaatttttgcgtgttttggtcgtgattaggtttggtaggggggcgatttgggtttcgcgtttggcggtgttcggttcggggggtcgcgggttcgttgttttttatagcgttcgggtagtgagttgatattacggttcgtttttcggtcggtgtttggcggcgagttaggcgcggatttagtagggtttgcgttttaatttttgttttttgaggttttggttgcggttttggttgcggttgtgatttcggttgcggtttttgttgcgatttacgttcggttttagtttaggttcggtacggcgggcgcggcggtgcgtttttgatttcgttttcgtttttgtttttt

SEQ ID NO: 1934 - DNA, 2353 bp, Artificial Sequence
  chemically treated genomic DNA (Homo sapiens)
agtaggtgtttggggtgagtgatatgataatatacggtattggtagataaagtagttgtgttagttttcgagtttttgggattttgttagatgggttgaggttgtagttttatattttaattttagtagttttaagtttgggttagggtattttgagcgggttcggttggggtggggatggggttcgagggtttaggcgtattaggtttttgttgttagttgtttaagtagataaagaggatgtttttatttgtgttatagttggttttggtttttttaaagttattgatgttggtgttgtatatttttgttgggggtggggaaggtagaacggggttagtgggttgtgagagagtatttatattatcgatatagtgtttaggggagttgagtgaggtttgttttttatttatatggttattttttttaatttaagttttttatttttaggaagttttttttgtttattttggtttttatgaggtttttttgatttttttttagtaaagtagttggagaaaggtttagagaggggtagaaacgtgttttaggttatatagacggggtaagtttatgtggttagggcgtttaggggttgtttatgtgaatttagtttatgagagttagggtagtttttttttgtgttcggagggtagtaggtaggttaggatgggtttagagtaggggttgggtttggtcgggtttttttttttgaggaatgtgtcggttattttggtggttgggggaggggtgtagtttgggtagtatgaaagggtaaggtagggatttgggtagtggcgtggggtttgtggtgtgagagggaggggtggttagggtgtagaggaggttggtatagtttgcggtaggtttgtttgtatggtttgaggggtggttatagtgataagagtttaggaggagtaggggttttggggaaaaggtagggagggaggttttggttatattagattgaatgggtgggaattgtgggtattgggtatatagaatagtgaatgtggattattttgttttatttattttatttagtatttacggtcggtataggttgggttgttgtagaagatgtagttagtggttcggttgtagttacgtagtacgatgaagtggttttggtagttaggagtgcggtagaagtagtggtggttattgggggtgaagtagtagtatttgatagggttggagtataggttatagtgtagtattttcgagtttattagtacgatggttatatggttttgagttaggtgcgtttggatgttttttatatttattgtgttgtgggcgggaggggggttagttggtgttgttgggtttttattttttattttttaaatggatttttgtttgtgtttgtttttttgttataaagtttggggatcggttttttttttttttgttttgaattttttgttttgttattgtggtttaggtttagtttagagttaagtaggagatcggtggggggggtgtgtgtgtgtgtttgaatgtgtataaagatgagttggttttgttaggttttttacggggagagtatttagttttaggtgggtttagttaagggttattagagtagtatatagaaattatttttttattgtattttagtttggttagtgaattttttttgtttagttttgttttttttttattttaaattatgtgtggtttatattgaaaattgttagttaagtatggtttagatatttttaaaattaaatgtttttttgaaagagttattttattttttttttaaggtttttggtggtagaaggggttgtttaggaagggttgggttatattgtttttaggggagttttagtttagtaatgatatttatttggagttttttttattggtagaaggtattgttttattttgtgttttttattaggtagtaaatttaaatgaaaatttagagtagggttgggtatagtggtttatatttgtaattttagtgttttgggaggttaaagcggaaggatcgtttgagattaggaattagagattagtttgggtaatatagtagtattttgtttttataaaaatatttaaaaatttattaggcgtggggcgtggtggtatgagattgtggttttagttattcgggagattgaggtaagaagattatttaagtttggggttgtagtagtgagttgtattgtaatattgcgttatagtattatagtttgtatgatagattaagattttgttttttaaaaaaaaaaaaaagaaaagaaaagaaaatatttagagggatagagggtagatggggttgtgggtagggggagttttaggttaggggtttttgtatttttgttggaggggttgtttattt

SEQ ID NO: 1935 - DNA, 2353 bp, Artificial Sequence
  chemically treated genomic DNA (Homo sapiens)
gggtgagtagtttttttagtaaagatgtaggagtttttggtttagagttttttttgtttatagttttatttgttttttgtttttttgggtgtttttttttttttttttttttttttttttaagagatagggttttaatttgttatataggttgtagtgttgtggcgtaatattgtaatatagtttattgttatagttttaggtttaagtgatttttttgttttagtttttcgagtagttggaattataattttatattattacgttttacgtttggtaaatttttaaatgtttttgtaaagatagggtattgttgtgttgtttaggttggtttttaatttttagttttaagcgattttttcgttttggttttttaaagtattgggattataggtgtgagttattgtgtttagttttgttttaggtttttatttggatttgttgtttagtggaaggtataggatggggtagtgttttttgttagtgagggaggttttaggtagatgttattgttgaattggagtttttttggaagtaatgtggtttagttttttttgggtagttttttttgttattaggagttttagaaaaaaagtaaaatagtttttttagagaagtatttggttttgaaagtgtttgagttatgtttggttggtagtttttaatgtaaattatatatgatttagggtagaggagagatagggttgggtaaaaagaatttattaattaggttggggtgtagtaggaggatggtttttgtgtgttgttttagtggtttttgattggatttatttggagttgaatgtttttttcgtgaagggtttgatagagttagtttatttttgtgtatatttagatatatatatatattttttttatcggttttttgtttggttttaggttgagtttgggttatagtgatagagtagggagtttagggtaaagggaaaaggagtcgatttttaagttttgtaatagagaaataggtataagtagggatttatttgagggatggggaatgggggtttagtagtattagttgatttttttttcgtttatagtatagtgagtgtgaaggatatttaggcgtatttggtttagggttatgtggttatcgtgttggtgaattcgggggtgttgtattgtgatttgtgttttagttttgttaagtattgttgttttatttttagtggttattattgtttttgtcgtatttttgattattagggttattttatcgtgttgcgtggttataatcgggttattggttgtattttttataataatttagtttatgtcgatcgtgagtgttgggtggggtgggtgaggtagagtggtttatatttattgttttgtatgtttagtgtttatagtttttatttatttaatttagtgtggttagggtttttttttttattttttttttaaagtttttgttttttttgggtttttgttattgtggttattttttaggttatgtaggtaaatttgtcgtaaattgtgttagttttttttatattttggttattttttttttttatattataggttttacgttattgtttaggtttttgttttatttttttatgttgtttaggttgtattttttttttaattattaggatggtcggtatattttttagaaagaaaagttcggttagatttagtttttgttttagatttattttggtttgtttattgtttttcgggtatagggaagggttgttttgatttttatagattggatttatatagatagtttttggacgttttgattatatagatttatttcgtttatgtggtttggagtacgtttttgtttttttttgggtttttttttaattgttttattggggaggagttagagaaattttatgaagattaggatgggtaaggagggttttttgggggtggaggatttgagttgagaggaatggttatgtggatgggaaatagattttatttagtttttttgggtattgtgtcggtggtgtaggtgtttttttataatttattgatttcgttttgttttttttatttttagtaggaatgtgtagtattagtattagtaattttgaggaggttagaattagttatggtatagatgaggatattttttttgtttatttggatagttgatagtaggagtttggtgcgtttaggttttcggattttatttttattttagtcgggttcgtttaggatgttttggtttaggtttggggttgttggggttggaatgtggaattgtagttttagtttatttggtagagttttaggaattcggagattggtatagttgttttgtttgttagtgtcgtgtgttgttatgttatttattttaagtatttgtt

SEQ ID NO: 1936 - DNA, 2483 bp, Artificial Sequence
  chemically treated genomic DNA (Homo sapiens)
taggttttttatgtggttgttggttagaagtatatttgataaggtgtttcggttgttttggtcgtttttatatgaagtttgtttagttaaggtatttttaggggtttaatgagaagggaattgtggttgggtgatttcgaaggtgatgggaaagacgttgttttttatttataaagttgttagggttagttggggaaaagtagaggaaagggaaattataagaaagtagatttaaagaaatagaatttgaaagagttttttaggttgttgtttagaatatttggaattaagttaatgggtatggagggagagtagttgttaagttattttttggtacgagttttgagagtcgtttgagggagttggagtagacgtcgtgggattttttttttgagttattgtagtttttttttggagtcggttcggggtggcggtttaaatatggaaatgtggtttgaattttttttttagtaatcgttgttgggttttagtttttttttgtgaggcgggtagttgagcgaaatgaaattataatatttaattataatattgcgagtgttagatattgcgttgagttttgtatgtggatttttttaatttttaaaataattttagaggtggtaatgattgtatttattttatagatagaataattggttagagagggtgtgtgtgtgttatttaaggttacggagttagtaagggtatcgggtgagaatttgaatttagagttattggttttttaattatagcgtttttttgttgagtagggataagtatttatttttttagttttttttgtagttagggagttagaatattttgggatcggaaattgttgtttggatgattttagttagttatttcgtttcgtagacggggaaagtgagaattagagaaggtcggtgattggtttaaggttacgttgtgttttatattttttttttattttcggacgtttagttttttaatagttttagtatagagttggggaaaaatttttagagatatttttttgggaagatagttggaaggtagggttgagtcggggttatttgtgatttagcggtgaggtgatgaggtattgacgaaagtattgtattttttttttttgagaaacgttttggtattagatgagttttgggggagggaggagaggaatttggtagggatttggttataagttatttggagggtggcgtgaggatcggaaaagtcgttgttcgttttgtttggttttattttttgaatgaggttattgaatgtgtacgggaggtttagcgttgttttattttagtttgatggagaaattttattcgaaattttaaagtagggtagggatatttttattagatatttttgtagtttttgttttgtgggacgaagtaagggatgatgatatattcgtttgtttattcggaagtgagttttaggttattgtattagaagggtgataatttaatataagttattgttaagtaattttcgcgtgtttagtatttatatttttttgttttattttgattattatattgtataggagttattatttttatttttcgtttttatttatagatgaggatatcgagatttagagagttttttgttttgttttgttttttgagatggagttttgttttgttatttaggttggagtgtaatggtacgattttagtttattgtaatttttgttttttgggtttaagagatttttttgttttagttttttgagtagttgggattataggtatttgttattatatttagttaattttgtattagagatggggttttattatgttggttaggttggtttttaatttttgatttcgtgatttatttgttttagttttttaaagtgttgggattataggtatgagttatcgcgtttggtttgttttattttttgttttgtttgtttgttttgttttgtttttagagatagggtttggttttgttttttaggttagggtgtagtggtgcgattatagtttattgtagttttaaatttttgggtttaagtaattttttcgttttagtttattaggaattggaattataaatgtatgttattatttttagttaatattttttttttttggaaaaatgaagttttattatgttgtttaggttggttttaaatttttgggtttaagtgatttttttgtagtgttgggattataggtatgagttattttgttcggttaattttagagagttttgatgaagttataaaattttgattatggagttagaatttaaatttaggtatgtgaggtttgagtttaggtttttattagggttattgtgttgtaattgttattattttttggtattttaagtgatattcgagtattatttaagggaaatggtttatatttcggtaatttttttattcgttttatttttttttttgaattagggatttcggtagagatagagttttagtagtttttattcgttttttcgtgtcggttttgttt

SEQ ID NO: 1937 - DNA, 2483 bp, Artificial Sequence
  chemically treated genomic DNA (Homo sapiens)
gagtaaggtcgatacgaggggacgggtggaggttgttggggttttgtttttgtcgaagtttttaatttagagaagaaagtggggcgggtgggggaattgtcgggatatgggttattttttttgaatgatgttcgggtgttatttgaggtgttaggaagtggtggtagttgtagtatagtggttttggtggaagtttgggtttagattttatatatttagatttgagttttggttttatggttagaattttgtaattttattaaaattttttgagattggtcgggtagagtggtttatgtttgtaattttagtattgtaggaggattatttgagtttaggagtttgagattagtttgggtaatatagtgagattttatttttttaaaaaggaaaaatattagttggggatggtggtatgtatttgtagttttagtttttggtaggttgaggcgagaggattgtttgagtttaggagtttgaggttatagtgagttatggtcgtattattgtattttaatttggaaaataaagttagattttatttttgaaaataaaataaaataaataaataaaataaaaaataaaataggttaggcgcggtggtttatgtttgtaattttagtattttgggaggttgaggtaggtggattacgaggttaggagttggagattagtttggttaatatggtgaaattttatttttaatataaaattagttgggtgtggtggtaggtgtttgtagttttagttatttaggaggttgaggtaagggaattttttgaatttaggaggtagaggttgtagtgagttgagatcgtgttattgtattttagtttgggtgatagagtaagattttattttaaaaaataaaataaaataaaaaattttttgggtttcggtgtttttatttgtaaatggaggcggggggtgagaataatggtttttgtgtagtgtagtggttagaatgaagtaagaaaatgtgaatattgagtacgcgagagttgtttagtaatgatttgtgttaggttgttatttttttgatgtaatgatttgagatttattttcgggtgggtaggcgagtgtgttattattttttgtttcgttttataggataaaggttgtaaaagtatttggtgggaatgtttttgttttgttttgggatttcgggtaggatttttttattaggttggagtggggtagcgttgagtttttcgtgtatatttagtgattttatttaggggatgagattaaatagaacgggtagcggttttttcggtttttacgttattttttagatggtttataattagatttttgttaaatttttttttttttttttttaagatttatttgatgttaaagcgttttttaaaagggggaaatatagtattttcgttagtattttattattttatcgttgggttataaatgatttcggtttagttttgttttttagttgtttttttaaggggatgtttttgaagatttttttttagttttgtgttggggttgttggggagttggacgttcgggaatgagaggaggatatgggatataacgtgattttgggttagttatcggttttttttggtttttatttttttcgtttgcgaaacgaggtagttggttgaggttatttaggtagtagttttcggttttagggtgttttggttttttgattgtagggagagttgggaagatgagtatttgtttttgtttagtaggagagcgttgtggttaggaagttagtggttttgggtttaaatttttattcggtgtttttgttggtttcgtgattttaggtaatatatatatattttttttgattagttattttatttgtaaagtgggtgtaattattgttatttttggagttgttttaaggattaagaggatttatatgtagaatttagcgtagtgtttgatattcgtaatattataattaaatattataattttatttcgtttaattgttcgttttatagagagaaattgaggtttagtagcggttgttgggaagaggatttagattatatttttatgtttgagtcgttatttcgggtcggttttaggaggaagttgtaataatttaggggaaaagttttacggcgtttgttttagtttttttaggcggtttttagagttcgtgttaagagatggtttggtagttgttttttttttatgtttattagtttagttttagatgttttaggtagtagtttggggagtttttttaggttttgtttttttggatttatttttttgtagttttttttttttttgtttttttttaattggttttggtagttttataaatgaaaaataacgttttttttattattttcgaaattatttaattatagttttttttttattagatttttggaaatgttttggttagatagattttatgtagggacggttaggatagtcgggatattttattaaatgtgtttttgattagtaattatatgaaaggttta

SEQ ID NO: 1938 - DNA, 2498 bp, Artificial Sequence
  chemically treated genomic DNA (Homo sapiens)
aattgttttttttattggttaggaaaagaatattttatagggaattcgataggttaatttataatagtgttaggttgtaatgttattttttaagaattttttttagtaaatatttgttatttttttaaagtaattgggagttgttgagtgtggaagcgaaaattaagttaagaagttttgttatttgggtgagtttagtttttataaaagttttgttggatgtgttttaaattgttcggtgtattttagttttttttcgtagggattcggagaaattgcgttattgttgttttatagagaaataattttttaatatttttttcgtcgttattttttttaagattttaaattgaaaatattttttttgacggtttttgttattatgtttggacgttttaattttaataaaacgaaataatagtgttaagttttttgagttaaattcgatattatagaggtagggattttaggatattagaattttattataatataaatgaaatataaagttttttatgtttaatagtgtattttagaaaattttgtttgagtgaattagttttgtattttataatgaaacgaggaattattgagagatatttaggtaacggattttaaatgagtgaataaggaagggaaaaattttaggaaaatgtagaaaaaagtagcggagattttggaaaaaaaattttaaagtattttttaacgtaaatatattcgattttttatagttaaataggataatagattagtttattaagttaaatgattaatgtttttgtaggttatggtttacgtgaaatattaaagaaatttgtaacggaaaacgatttgtttgaaagagttagttttttatttaaatttattaattagaattttgtattgaaaaaataaattaatcgtgaatttttacggttattttcggaatttagtaatcgattattaatagggatcgtttataatttaattagagtgattttgtttttatatagaggggtaaattaatttttttaatttatttattttgtagatgaattatggcgcgtattaagtagacggttcgtaaatttataggcggtaaagtatcgcgtaaatagttggttattaaggtagttcgtaagagcgtttcggttacgggcggcgtgaagaagttttatcgttatcgttttggtatcgtggttttgcgcgagattcgtcgttattagaagtttatcgagtttttaattcggaagttgtcgttttagcgtttggtgcgagaaatagtttaggattttaagatcgatttgcgtttttagagtttcgcggtgatggcgttgtaggaggtttgcgaggtttatttggtggggtttttcgaggatattaatttgtgcgttatttatgttaaacgcgtgattattatgtttaaagatatttagtttgttcgtcgtattcgtggggagagggcgtgaattgttttgagtataaattttaaatttaaaggttttttttagagttaattattttgttcgtgaaaagggttgtaattttttgagacgtattagattattaaattgtattgatttaaatagatatttgaaatagtggtatttagttttttcgatgttttatttaaatttttaaatttaagcgtttttttaggttttcgtttagggttgggtttttttacgttgttttttattggtttagttggttttgttttgttgtttaggttttttgttgtttttttgtatattgttttcgttttttaaatttttggttatttaattgtattttgtttaatttatttttttgttttttggtttaacgtttttttatgtggtggtttgtattttaggttttaattgtataggtttttaacgttttggttttgtttttttttgatgtttatttgattttgttcgaggggttagcgtttttgatttgtattaggttgttttattttattagtgttttgagatttagttatttgtcggcgacggtcggtgttttgggtgcggttaacgttattttttgtgcgtttgatattggtttaaggttaaggttattagttggaatatttagattcgtggtattaatatatagtttttgtagatttgatagttttgtataggttttaaattgtaggagttaaagtaacgaaggtgtagatgggtgtgttttaaatttgagtgcgaaaggaaaatgtagaaattatgagtttttttaattttttagttgatattttttgtttgtttttttttttttttatttatttatttatttatttatttatttatttatttatttattttgagacggagtttcgtttttgttgtttaggttggagtgtattggcgcgatttcggtttatcgtaattttcgtttttcgggtttaagcgatttttttgttttagtttttcgagtagttgggattataggtatgagttatttcgttcggtttttcggttgatattttaaaagaattttttaattttagtaaatattttgttttaattaaa

SEQ ID NO: 1939 - DNA, 2498 bp, Artificial Sequence
  chemically treated genomic DNA (Homo sapiens)
tttgattaagatagggtatttattaaagttgaaaagtttttttaagatattagtcggaaggtcgggcgaggtggtttatgtttgtaattttagttattcggaaggttgaggtaggagaatcgtttgaattcgggaggcggaggttgcggtgagtcgagatcgcgttaatgtattttagtttgggtaataagggcgaaatttcgttttaaaataaataaataaataaataaataaataaataaataaataaataagaaaagaaaaaagtaaataaaagatattaattggaaagttgaaaaggtttatgatttttgtatttttttttcgtatttaggtttgagatatatttatttgtattttcgttgttttgatttttgtagtttagaatttatgtaaggttgttaagtttgtaagagttgtgtgttagtgttacgggtttaggtgttttagttaataattttagttttagattagtattaggcgtatagagagtaacgttgatcgtatttaaggtatcgatcgtcgtcggtaagtagttgggttttaaaatattagtggagtaaggtagtttgatgtagattaaaagcgttggtttttcgggtaaggttaaataaatattaaggaaaggtaaaattaaggcgttgaaagtttatgtagttaagatttaaaatgtaggttattatatgaaagagcgttgagttagaaaataagaggatgggttaagtagggtataattaagtggttaggagtttagaaaacgagaataatgtataagaaagtagtagagggtttgaatagtaaaataaagttagttaaattaatggagaatagcgtagggaggtttagttttaggcgaaaatttgagggagcgtttaaatttggaaatttaaatgaagtatcgagggaattgaatgttattattttaaatgtttatttggattagtgtagtttagtggtttaatgcgttttaaaggattatagttttttttacggataaagtggttggttttgagaagagtttttggatttaaggtttgtatttaaaataatttacgttttttttttacgaatgcggcgggtaagttggatgtttttaggtatgatggttacgcgtttggtatgaatagcgtataggttggtgttttcgaaaagttttattaagtaggtttcgtaggttttttgtagcgttattatcgcggaattttggaagcgtaggtcggttttgaagttttgagttatttttcgtattaggcgttgaaacggtagttttcggattagaagttcggtagatttttggtagcgacggatttcgcgtagagttacggtgttagggcggtagcgatggggtttttttacgtcgttcgtggtcggagcgtttttgcgagttgttttagtggttagttgtttgcgcggtgttttatcgtttgtggatttacgagtcgtttgtttagtacgcgttatagtttatttgtaaagtaaatgagttaggaagattggtttgtttttttatataggaatagaattattttgattggattgtggacgatttttgttagtgatcggttgttaaatttcggaagtggtcgtagagatttacgattggtttatttttttagtgtaagattttgattggtaaatttggatagagaattggtttttttaaataagtcgtttttcgttataggtttttttgatgttttacgtagattatgatttgtaaagatattgattatttaatttaatagattgatttgttattttgtttagttataaaaaatcgaatgtgtttgcgttagaaagtgttttagaattttttttttaaaattttcgttgtttttttttgtatttttttgaagttttttttttttttatttatttatttaaaattcgttgtttaagtattttttaatgatttttcgttttattatagagtataaggttaatttatttaaataaggttttttaagatatattgttaagtataaggaattttgtgttttatttgtgttatagtaaaattttaatattttggaatttttatttttgtaatatcgggtttgatttaaagaatttaatattattatttcgttttgttgaaattaaaacgtttagatataatggtaagagtcgttaaaaaaagtatttttaatttaaaattttgaaaaagatggcggcgaagagagtgttagaaggttgtttttttgtaagataataatggcgtagttttttcggatttttgcgggagagagttgaggtgtatcgaataatttaagatatatttaatagaatttttataggaattggatttatttaaataataggattttttaatttggttttcgtttttatatttaatagtttttaattattttgaaaaagtaataaatgtttattggaaaagatttttaaagaatgatattatagtttaatattattgtgaattaatttatcggattttttgtaaggtgttttttttttagttaataaaaagagtagtt

SEQ ID NO: 1940 - DNA, 2433 bp, Artificial Sequence
  chemically treated genomic DNA (Homo sapiens)
aagttttttgtattattgattgatgtcgggtaagtaggtgtgtattttagatagatattgttagtgttgtcgttagaatggtttaggtgaggtcgagtgttaaggggttggtggggaatttggttttttgtgtaagttttttttgtaagtgttggtagatagggtattatgtatttttggtgttgattataggtaagtatttgtttgtaggaggtttcgtttttggtttttttaatttataggtagggaattatttaataatgatttttttagttatatagtttggagaaagttgtttttttttaaaatattaaaaaatgatttataaatttaatagaaataattagagtagaattatttttatgaaatataggttttattggtaatttgagaatttatagagttgttttaattttaggatatagatagtaaataattgtttttgatattttttttaaatgtgtatatattttattttttagaatttattttttatttaggataatttataaggaattttaaaaatgtattgataaaatgatttaatttagtattattttaaaagaaaacgtaattttaattttttaaaaggggagtagtaggagaataaagggaaggggaagaaaaaggtatttatataaaatattatacgttggaaatgatgtttagtttttagaagaatattgtaagtttattttgtgtattttttttttttaaattttttatttttaaatgtttatttatttgttttttttagatatttcgtggatttttttttcgggttagtgtattttgtttttagtggttaaaatttatttttattataaaagaaagatgttaaattttatatttgggatagttaatatgggtttttaaatttaaatagttttttttagaaatagtaaaaaggaaaagattgtttttttttttttttaagatattattggtttgtttattattagaaggatgtttatttatgtaaaaaaaaaattaatttataggatgtaatttggagagtaggagaaagtaatttttattaaatttataaatttttttacgttagatgttagggattttttgaattgaggttgaatttttgtgttttagtggaataattattttagtcggtttaaattagtttatcgttaaatgtagtaaaaatgttggtaaaagttttattttttggtgcgtcgaataaaaggaagtaaaaatggattaaagtaatttttaagaggagtaaggttagaggtgcggaattgttttttatgtttacgttaatgagtttttttttggatttattttaagtttacggttattattatttgttttagttgagggttggatttggatagttttttgtttttattttttgtggttgaatttttgaaattttagggttcggtatttgcgtgggttgtttatatggttgagattgggagggtaattggggaagaggtttttttgtttttgtttggcgtagaaataagtaaatttttttgttagttgtattgtttttattatgaattttgttgtattgtttatatttgaaaaatattagtaataaattaattgtagttttaagtttgtgttatttgtagatagttttttttttgttttgatgtttattttaagattttgttataatttataggtcggattttgtgtttttattaaaagatagttttagagtttcgtggaagagatcgtattaggtattttaaattattgattttttaaagttgagttgatatggttttggtaatttttagattgtatcggtaaattgagttaggatttttataattttatagttgaaaagcggttttatataattgttaatttaagatttaatagaatgagaattaattatataagattgaaaaaaaattgatgagagaaatttttttcgggttatttgaaatgtagttgttttaaggttttgtttttagatcgtaagaagttttttttttttttttttgtgttatttgtaatttataataagtttttaaattttgtttttataaattagaatgaagtatttttaaattatatatgatttttattaatacgattttttttatttgaatttagaaatttttatttagtttttttatattttttggtaatatagttgtttgtataggtttagtaagaatttgtttttttttttgttaaaatataattggaagtattaattatgtaatgaaagttttgttttgaatgttttatttgagaataatgtttatttaacgaggtgtgataagttattttaaggaataaaggttggttgtatttacggaattaatgtttataatgtttttttaggaaatttgacgtaggtttagtttatagtgtttagttttatagttagtaaggaaagttatttttaggtaagtatttggaggtatttttttgaaatttttagaagaaagg

SEQ ID NO: 1941 - DNA, 2433 bp, Artificial Sequence
  chemically treated genomic DNA (Homo sapiens)
ttttttttttagaggttttagaaaaatatttttaagtatttgtttagaagtgattttttttattaattgtaagattggatattataaattggatttacgttaggttttttgagaggatattataggtattggtttcgtaagtatagttaatttttattttttaaaatggtttgttatatttcgttaaatgaatattatttttaaatagggtatttaaggtaaggtttttattgtataattgatgtttttagttgtattttggtaaaagggaggatagatttttattaaatttatgtaaataattatattgttaagaaatgtagagagattgggtaagagtttttgaatttaaataagaagaatcgtgttagtgagaattatatataatttaagaatattttattttggtttataaaagtagaatttaaaagtttattgtgaattatagatagtataagaagagaaagaaaaggttttttacgatttgggaatagaattttaaaataattgtattttaaataattcgaaaaaaattttttttattaatttttttttagttttgtgtaattaatttttattttattggattttgggttagtagttgtgtgaaatcgttttttagttatagagttatgggaattttgatttagtttatcggtatagtttgaaagttattaaaattatgttagtttagttttgaagagttaatagtttggagtatttaatgcggttttttttacgaggttttgagattgttttttgatgaagatataagattcggtttgtagattatagtagagttttaaagtaagtattaaagtaaaagaaaaattgtttataaataatatagatttgaggttatagttaatttattattggtattttttaaatgtggatagtgtagtaaggtttatgataagaataatgtaattgataaggaaatttatttgtttttgcgttaaataaagataaaaaaattttttttttagttgtttttttaattttagttatatagatagtttacgtaggtatcgagttttggggttttagggatttagttataggaagtgggggtaggaagttgtttaaatttagtttttagttaaagtaaataataatggtcgtaagtttaaaatagatttagggaggagtttattaacgtgaatatagaaagtagtttcgtatttttggttttattttttttggaaattgttttggtttatttttatttttttttattcgacgtattagaaaataagatttttattaatatttttattgtatttgacgatgaattaatttagatcggttaaaataattgttttattgggatataggaatttaattttagtttagaaaatttttgatatttgacgtaggaggatttataggtttagtggaaattgtttttttttgttttttagattgtattttgtgggttgattttttttttgtatgagtaaatatttttttaataatgaatagattaataatgttttaagagagaaaaagaataatttttttttttttgttgtttttggagagagttgtttgaatttggaaatttatgttggttgttttaaatatgagatttggtattttttttttgtggtggggatgggttttggttattgaaagtagaatgtattggttcggaagagaagtttacgagatgtttaagaaaggtaggtgagtggatatttagggatagaggatttaggaaaagaggatgtataaagtgagtttatagtgtttttttagaaattgagtattatttttagcgtatggtgttttgtgtggatgttttttttttttttttttttttgtttttttgttgttttttttttagaaagttagaattacgtttttttttaaaatgatgttagattagattattttattagtgtatttttaaaattttttatgaattgttttgggtgaaaggtagattttggaaaatagaatatatgtatatttaaaaaaaatattaagggtaattgtttgttgtttgtgttttagggttagaataattttgtgaatttttaaattattaatgggatttgtattttatgagaatgattttgttttaattatttttgttagatttgtgaattattttttaatattttaaaagaaagtagttttttttaagttgtgtgattagaaggattattattagatggttttttatttataaattgggagggttagggacggagttttttgtaggtaagtgtttgtttgtggttaatattaaaggtgtatggtgttttgtttgttagtatttgtagagggagtttatataggaaattaggttttttattagttttttagtattcggttttatttgggttattttgacggtagtattggtaatgtttatttgggatgtatatttgtttgttcggtattagttaataatataggagattt

SEQ ID NO: 1942 - DNA, 2461 bp, Artificial Sequence
  chemically treated genomic DNA (Homo sapiens)
attaatagtaatagtggttttaattttagataaattatttgttatttataattttatgaagaaaaatgttatgaaagataattatatatttgatttttgttattttataatttggtttatgtttttagatgtaagtaaaaatgtaaaataatatttgtattttttatttatatatattattttttatattttgtttttgtgaaaaatgttatattttaagtttatgattataagcgttaatgttgtgaattggaaattataatatattttattgtatattttattaattgtttttatttttttaataatcggaagttagaaaggtttgatttttagttaaaaagtaaagcgagattgagggaagtttagagacgttatgaaggaattggtgattagagttttttgttgtttatggaatttataagaataaagatagtcgtttttcggaattacgattttaatttaggatttgtggagtttattttaatttggtgttgttttggaaaaggttatgtcgaaaagaatttgtttttagagatttttaggaaagtagttaatttaaattgtttaattttgtgagattatttttggttggtagtaagaattttttgttatgtggggtttgtttgagagtgaagagtattcgtatatttattgtttttgaatttatatttgttggggtttatatgtatacgtatatattagtatttgggtttttatattcgttttttatattgatcgtgtgaattgatttataagtttttaagtgttttagttagattaatttagtttagttttgaaagaatagataggtaagatagattgttatattttattaagttaatttttaattttataattgaggttttaataggacgtttggtttattaaggttttttattttgtttaagagtaattaaatatcgttgttaattttattattaagattaagttgttgtttagcgatttttttttcggttgttttttcgttttggggtttttttagtttgtttatggttaggagtcgtttaaaaagttgtatttattttagttatattttgttatatttttaagtttgtggatgatttcgtttgagtttttagtagttttaaagttttgttaatagtagacggaggtattacgttgagttttgtggagagaaagttttgtattgtgtaagtgatttatttggtattagagagggggaggggaagagaaattttgatgggttttagggattttttatttatttattttttttcgggatttttttttggagggtttttgtaaatatagttgtttcgttacggtggaggattattaatagaaatttacgaaataaggttatgtttcgtggtattttgagttagtttcgtagcgtgatttattagttttttgaaaaaagaaatttgttaggatttgggttggaatcgtaagatgtaaagatgttaagttgaaaaatttagggtgggtttaaatttttaattttttagtttcgatttttattttgggaaaattattttagtgtaaatatttttttttatatttagtatatttgtgtaagaaaaattattttattatttaatattaataatatttattttgaattttaattttgaaaattatagaattttttaaatgttgtaaatagttgatacgggtgttttttttttgtttttaaaggaattgtttttgtaattattgagtagggtgaagttgaattttttttgtagtaaataggagagtgtgtaatgagatattttaattaaaaatattaattatatttagattaattaataatagaaaatttttaggatatttttaatgttttaaaaataaaaaagtttttattttttgaagttgttaggtttttattttagttttgagtataaataaatgtttgatatatggtttaagttaaattttaaaatgtagtaaaaatagtgtttgtatatttggtaggaatttaaattagtttaggttagtgtttttttttgtttaaagaagagtttttgtatttgtattgagttaggaaaataatataggaaaatatggggaataatacggaatattgtaagttttagtattcggttggttaaagaataatgtttggggtaattttgaaattatcgtttaggttgtagtttgggtttgtataacgttttggaggattgtgagtaagatagaaagtatcgattgtattgttgtaaggaaattgtttttttttttttaaagtttttattttgtaaattatttttttttagtaaaagtatattttatttgttaattttttttttgttattaatttttttaattatttttttttattattgtagaatggtttttggaataaagtagtattttaaagttttttttattaaaagtttgtttttttttttttttaaagaggtagtgtgggggtaattttttttttttttttttttttttgtgtttttttttt

SEQ ID NO: 1943 - DNA, 2461 bp, Artificial Sequence
  chemically treated genomic DNA (Homo sapiens)
aaaaaaaaaatataaaaaaagaaaggaagaaagaaaattatttttatattgtttttttaaagggggggaggggtaaatttttagtgggaaaggttttaaaatgttgttttgttttaaaggttattttgtaatgatgaagggggatgattgaaaaggttagtagtaggggaagagttaataagtaagatgtgtttttgttaagagggggtgatttgtaaggtgagagttttagaagggggaaggtaatttttttataataatgtaatcggtattttttgttttgtttatagttttttaagacgttatgtaaatttaaattgtagtttgggcggtaattttagagttgttttaaatattattttttggttagtcgggtattggagtttataatatttcgtgttgttttttatgtttttttgtgttatttttttagtttagtgtaaatgtagaaatttttttttgggtagaaagagatattgatttgaattggtttaaatttttgttaaatatgtaggtattgtttttgttatattttggaatttggtttagattatatgttaggtatttatttgtatttagaattagaatggagatttaataattttaaaaaataaaagtttttttgtttttaaagtattaagaatgttttgaaagttttttattattaattaatttgaatatgattaatgtttttagttaagatattttattatatatttttttgtttattgtaggggaaatttagttttattttgtttagtaattataaaaataatttttttgaaagtaagggaagaatattcgtgttagttatttatagtatttaaaaaattttgtggtttttagaattaaggtttaaagtgaatgttattaatgttgagtaataaagtagttttttttgtatagatatattaaatgtaaaaagaaatgtttatattggaatgatttttttagggtgggaatcggggttggggagttggaggtttgggtttattttaggttttttaatttgatatttttatattttacggttttagtttaggttttagtagatttttttttttagagagttggtaaattacgttacgggattgatttagagtgttacggggtatggttttgtttcgtgggtttttgttgatgattttttatcgtggcggggtaattgtgtttgtaagagttttttaggagaggatttcggggagaagtagatggatgaggagtttttggagtttattaggatttttttttttttttttttttttggtgttaaatgggttatttgtatagtgtaaagttttttttttatagagtttagcgtgatattttcgtttgttgttggtaaagttttaagattgttgggaatttagacgaaattatttataggtttggaggtgtggtagggtgtaattagaatgagtgtaattttttaaacggtttttaattataggtaggttgggaaggttttaagacggaagggtagtcgaggggagggtcgttgaatagtagtttgattttaatgatagaattggtagcggtgtttggttgtttttgaatagagtaaaagattttaataggttagacgttttattaaaattttaattgtgaaattagaaattaatttgatggaatgtgatagtttattttatttatttgtttttttagagttggattaaattggtttaattaggatatttgaaggtttgtgaattagtttatacgattagtgtgaaaagcgggtatgaagatttagatgttggtgtgtacgtgtgtatataagttttaataggtatgaatttagaagtagtggatatgcgggtattttttatttttaagtaagttttatatgatagaaagtttttgttattagttaggaatgattttatagggttgagtagtttgaattggttatttttttgaaaatttttagaaataaatttttttcgatatagttttttttagaatagtattaaattagagtaaattttataaattttgaattagaatcgtaatttcgaaaagcggttatttttatttttgtgggttttataagtagtaagggattttggttattagtttttttatggcgtttttgaattttttttaatttcgttttgttttttagttagaaattaagtttttttggttttcgattgttggagaagtggaaatagttaatggagtatgtaatgaggtatgttgtaatttttaatttatagtattaacgtttgtagttatgaatttgaaatgtagtattttttatagaggtaaagtgtggaaagtagtatatatgagtaaggagtataaatgttgttttgtatttttgtttatatttgagagtataggttaaattatagagtgataaaagttagatatataattgttttttatagtatttttttttatagaattataaatgataaatgatttatttaaaattaaaattattgttattattaat

SEQ ID NO: 1944 - DNA, 2440 bp, Artificial Sequence
  chemically treated genomic DNA (Homo sapiens)
tttttttttttagtaatttttttattttttttttgtaggtataattttgatagtattttttttagaatttcgttaaataagcggattggaataatatttagattatagatttttacgtaattttttttttttaagaaatgaattatagtttttatttgggttcggtttttttgtatttagggtttttgttattttgtattgttagaaagtaaaattttagtttgttaaggatggggaaggggttatttttgagtatttagggtgtaggtttttatttgttttttaaatagaattttagttaatatttatggatttttagttgtatattttatttttataagtatttaatgatttatgttttaaggatttttagaattttagtgttatttggtttaattttaaggtttttttaaaatagtttggggtttttattgtgttatttattatttatttttttgttttttgatttttttattaaaataaaattttgttatttttttttttttttttattaattttttaaacgtgttttttatttttttttaaaatacgtttattgttaattttggaagaaaaacgtggtaaatggtatgtttttatttttttatattgatttggaattttttttttgttttaatttggtttagtttatatttatatatattaaggttagatttaaagataaaattaattattttaattttattagttttggttaataattttgtttttatgtttttttgatttagttagtttttatgtaagttaaggtggttgagtattataagtttttattattataatgattttatatttaaatattggataggaaaaattgattatgggtttggtatttatttatacggttttatagaaagagagaaaaaaatatttttagatagtggtattaaaaaaggttgatatatattttttattattttttttttttttttgtttgtaagttattaatagttatatttaaggataaaatatttttatgtatttataattttttattagtaaagatttgattattaaataaaggtagtttgattagattacggttttatgatgggtttgagaggggttttgttttatattttggttgtatttttagtggggtttatttttaattgttttatgatttggggagatatattgttgattttattgtttagagttttttttttttttttttttgtggaatgagtgatgttttatacggaagattaagatatataataataaaatagaaatttttacgtttagttgtagttagatttatggttaagtttatggagattatttagggttgggaatatacgtttaagaacgtttttgtagttataattgtgtatggagtgagatgttgttatagattatggatagtaaatatttttgaggttgtgtgttattttttgtaggtttatgagtttttttgatttaagtaggaaggtgtttgttagtaatgtaaataaaatttagtttaatttttgatttttaatatttggaatatttatttttttggtaattgtgcggtttattgaatatttattattttagtggtttattgaagaaggattttggtttgaaaagagatcgttatgggaaaaaaaaaatttaatttagagtagttattattgagaatattaaaaggatttgtgatagtaatatttttttgattttatagttggtttgcgtggattgtgttttagtgagagtttgtttttttaatgtcgtgagaaaagatatagattttttttttggattttattataatataagattttttttattgtatattttaaagattttttaattcgaaaatttagttttaattttttatttttttgtatgtttttgaatggaatttaaataatttaatatcgttttttttttttttttttttttagaaatggatgagagatttaagtatatttttttgatgttttgtggatatttttgtatttttatattttttattaaatataaaataaagagttttggttttgaatataagagaatataagttgttaagattattaataattcgttaatggttataggtattttggatttttttttatagtttttggggatatatttttttttaaatgttgggtagaatagtaagtgtggttaaggttgatttgagaatgaagttggaattggatgtagtagttttataatgatattaaggtttaaggttagggaagtggtaagatttttatttagtagagttaattataagttataaaagtatttaggagtagatttgagtgaagtacgtgtttagttagttattgaaataaaagtatgtagtttgttttaagtttttggtaattattttagggttgattgattaggtatttttgtgtgtatgtaattgtttttttttatttaagaataaattataaggaatagatattatatagttttt

SEQ ID NO: 1945 - DNA, 2440 bp, Artificial Sequence
  chemically treated genomic DNA (Homo sapiens)
agaagttatatagtatttgttttttgtagtttatttttaaatggagaaaagtaattatatatatatagaaatatttagttaattagttttgaagtagttattaggaatttgagataagttatatatttttgttttaataattaattgaatacgtgttttatttaggtttgtttttagatatttttatggtttatagttaattttgttgggtaaaggttttgttatttttttgattttggattttgatgttattgtgaaattgttgtatttaattttaattttatttttaagttagttttaattatatttattgttttatttagtatttgagaaagagtgtgtttttagaagttatgggaaaagatttagaatgtttgtgattattaacgagttgttaatggttttaataatttatatttttttgtatttagaattaaagttttttgttttatgtttaatgaagaatataaaaatgtaaaaatgtttataggatattaaaaaagtatatttgaattttttatttatttttgaaagagaaaaagaaaaaaaaacgatgttgaattgtttggattttatttagaggtatatagagaaataaaaagttgaaattaagttttcggattaaagagtttttaaagtgtataataaaaaaaattttgtgttgtaataaggtttaaaggaagaatttatgtttttttttacggtattaggaaaataggtttttattagagtataatttacgtagattagttgtggagttaaagggatattgttattataaatttttttggtatttttagtgataattattttgaattagatttttttttttttatggcggtttttttttaagttaaaatttttttttagtggattattggaatggtgagtgtttagtgaatcgtataattgttaaagagataaatattttagatgttgggaattagaggttaaattaggttttgtttgtattattaatagatatttttttatttaaattagaaagatttatgggtttataggaagtgatatataattttagaggtatttattgtttatagtttgtaatagtattttattttatgtatagttgtaattgtagagacgtttttggacgtgtgtttttagttttaagtaatttttataaatttaattataaatttaattatagttaaacgtgagagtttttgttttgttattatatattttaatttttcgtgtggaatattatttattttataagaaaaaggagaagaaaggttttgaataataaaattagtaatgtgtttttttaaattatgaaatagttaagaatgagttttattgaaaatataattagaatgtgaaataaagttttttttaagtttattataaaatcgtggtttggttaagttgtttttgtttagtagttaggtttttgttagtgaaaagttgtaaatgtataggaatgttttatttttgggtgtgattgttagtagtttgtaaataaggaaggagaggagatgataaaaaatatatattaattttttttgatattattatttaaaagtgtttttttttttttttttgtaaaatcgtatagatagatgttaagtttataattaattttttttatttagtgtttgaatatgaaattattatagtaatagaaatttataatatttaattattttgatttatataaaaattgattaagttagaaaaatatagaaataaaattattgattaaagttggtaaaattaaaataattgattttatttttaagtttagttttggtgtatgtggatataggttgaattaaattaagatagagaaggaattttagattaatgtggaggaatgaaggtatgttatttattacgttttttttttaaaattggtagtaaacgtattttaaaagaagataaaaagtacgtttaagagattaatgaaaaagggagaggagataataggattttgttttaataagaaaattaagaagtagaaggatgagtagtaaatgatatagtagaaattttagattattttaagaaaattttaaaattgagttaaataatattaggattttggggatttttgaaatataaattattaagtatttatggaagtagagtatatagttaaaagtttataggtattagttaaaattttgtttaagaaataaatagagatttatattttaggtgtttagagatagttttttttttatttttgatagattaaaattttattttttaataatatagaataataaaaattttggatgtaagaaaatcgggtttagataagagttgtgatttattttttaaaaaaagaaggttacgtgaaagtttatagtttgaatattattttagttcgtttatttggcgaagttttagaaagaatgttattagggttatgtttgtaagaagaagatgggagaattattaggggagaaaa

SEQ ID NO: 1946 - DNA, 2334 bp, Artificial Sequence
  chemically treated genomic DNA (Homo sapiens)
attatatttttatattttatagttgaagaatttaaagttaaaaaagagtgagtagtttaatattatttagagttagttaataaagattttttttagtattttttataaagtattttatagtaaggagaaaggttttggtttttaatatagttgtatgaaaattttagttttattattttaaaggtattattttttattagtagattttttttgtgtgtaatggggttatttggataaaataaaatcgatttttatttttattattaaattgggattgatgtgtgagtataaaattttagggtaatgtagtttttaattttttttatttttttatttttgtttttttttgttttagttaatcgaaaaagggagttatttgtatgttgttggagggagattatttttaattgttttggtttattaatagtagatgtatagtaaagtttttaaagaaatatatgtttttaggattttatagagttttaagagtagtattttatgggtttattttggattttaggtgattaatggatgtggacgaaatttttaatttttttaattgtttgtttttgtttttttagttttttttttaagtttttttaattagttaaatttaaagtttttttgaattatttaatgttatataaaagtatttgttttaggtagagaaagagaagtaatttagtttcggggtaattgatttattatatgtagggaaattttttgttagttttttaaaagttatttttttttttgttatttggaaagtatagtagttttttattttattttttattgatggaaaatagatttgtttgacgtttagaagaagttttatttgtattggcgttttatttatttatttatttttttttttggtagattattataattattggttgtgtatatttatattggatttggttattgtattatattgtatttgtaaaaatgtttttttttagatatggtaagaaaagtttttataagttgaattaatattatttgtttttttaaaatgttttaattgtattggtaaaaggagtattttttattttttaaagtttattgtaattggattgttagagtagtattattaaaaggataatgacggtgttatttttaaatagatttttttaaaataattgtttttttttattgagtgttggtacggtattcgtgaaattttgatggggttagcgggttttttgatgttgtttattagaagattgttttttttcgatttattttttttttttttgttttttttttatttatatttacgttggttttatttagttattgtaatttgtttttgtatttgaattaagttaattttttttaatgatataaataggtagtttttttattgggttagtgtttgttgtttttttattttgttttgatggaaatttttttattgtaggagttaaatattgattatgagagtgttattattttagaaattgataggttgattatgaaattataggtttgtatattttgttttttattttgggttattttaagaagttggtaatgattggtatgaatgggggtatttgatttttgttaggagggagtggattttaggttttttaggttgtttgttagggttgttattttggagttggagagggaaatgagaagtttggtttgtatgaggtttgattgaggttgtggatatgaagtaatagggaagcgaagtttatgtttttgataaaagaagatattagaaagggaggtttgaaatattaagttaaaggtgtttggtagagaattgtagagaagtaagatagagaaaagtagagagtttaaagagattttcggagacgaatgtatgtagatagagaggattttatagttatttattgtttttattttgggtaaggagaaagttgttttaagagttaatttatataggagaaaaataggagtatatatttattgttttattttatgtttaatttaaattgaggtagtttataaattaatatagaatagatttaatttttgtgttaatattgtagtttagtaatggtatatatatagttagaaagtggaaagtattagtttaatttttttgacgtcgggttttagtttagttaatgttattgaattgatagattatttttttaaatttgtttaaagttattaaattaatggtttttataatgtaatataaagttatttttttttttttttcgtttagaatgatattttaaatatagatggagtttttgaatatttggtttttttttaagtgatgtatggaggacggatgaaggaaaattgaaatatttttttgttatgttatttttttaatttatttgt

SEQ ID NO: 1947 - DNA, 2334 bp, Artificial Sequence
  chemically treated genomic DNA (Homo sapiens)
ataaatgggttgaaaaggtaatatagtagaaaagtgttttaatttttttttattcgttttttatgtattatttagggagaaattaagtgtttagagattttatttgtatttagaatattattttaaacggagagaaggagggaataattttatgttatattatagaaattattagtttaataattttagataggtttgaagaggtggtttgttaatttaatggtattagttaaattgaagttcgacgttaaaaaaattaagttaatgttttttattttttgattgtatgtatattattattgagttatagtgttggtatagagattaagtttattttgtgttagtttataggttgttttagtttgagttgggtataaaataaaataatgaatatgtatttttattttttttttgtataaattgatttttgaaatagttttttttttgtttagagtaagggtagtgggtggttatgaaattttttttatttgtatgtattcgttttcggaaatttttttaagttttttatttttttttgttttgtttttttgtagttttttgttagatatttttagtttagtgttttagatttttttttttagtgtttttttttattagagatatgggtttcgtttttttgttgttttatatttatagttttaattaagttttatataaattaggttttttatttttttttttagttttagagtaatagttttggtaggtagtttgaggagtttggggtttatttttttttagtaggggttagatatttttatttatgttagttattgttaattttttaggataatttaagataagaagtagaatatgtagatttgtgattttatggttaatttgttaatttttgagatggtgatatttttatagttaatgtttgatttttataataaaaagatttttattaagataaaataaagaagtagtaaatattggtttaatgagaaagttatttgtttatattattaaaaaaaattggtttgatttaggtgtaaagataagttgtagtagttaaataaaattaacgtgagtgtagatgaggaaaaaataaaaggagagagagtggatcggaaagagataattttttggtgggtaatattaaagaattcgttgattttattagaattttacgagtgtcgtgttagtatttagtaaggaaaagtaattattttaagaaaatttatttgagggtaatatcgttattatttttttaatggtattgttttaataatttagttatagtaggttttaaaaaataagaagtgttttttttgttaatataattaaggtattttggagaggtagatggtattagtttagtttatagaggttttttttgttatgtttagaaaagaatatttttgtaagtgtagtatggtgtagtagttaagtttaatataggtgtgtatagttaatgattgtagtggtttattaagaaaaaaaataaataaataaataaaacgttagtgtaaatggagttttttttaggcgttagataaatttgttttttattagtggagaatgaagtggaaaattgttgtgttttttaaataataagagaagagataatttttggaaaattaataagaagtttttttgtatgtaataaattagttgtttcgaaattgggttatttttttttttttgtttagggtaagtatttttgtgtgatattaggtgatttaaaagggttttaagtttagttaattaaaggaatttggagagggagttggagaagtaggagtagataattgaaaaggttaaaggtttcgtttatatttattaattatttgaaatttaaaatgaatttatagaatattatttttgaaattttgtgaggttttgaaggtatgtgtttttttggaagttttgttatatatttgttattaataggttagaataattagaaatagtttttttttagtaatatgtaaataattttttttttcgattaattagggtagaaagaagtaaaagtagaaaagtgagagaaattgaaaattatattgttttaaaattttgtatttatatattaattttaatttggtggtaaaagtggagatcggttttgttttatttagataattttattatatataaaggaaatttattgataaggaatgatatttttgaagtggtagggttggaatttttatataattgtgttgaaaattaaaatttttttttttattgtaaaatgttttgtgaagggtgttgggggggatttttattaattaattttggatgatgttgagttatttatttttttttggttttagattttttagttgtaagatgtaaagatgtagt

SEQ ID NO: 1948 - DNA, 2308 bp, Artificial Sequence
  chemically treated genomic DNA (Homo sapiens)
tagtatgtattttaaggaaggaagaatagtaagggtaggaaaatagtgagtttttagggtatttggtgagtttgatataatatttgttgaataaatgaatgaatgattgatatttaaattttattgtatatatataagtattttattgagaaaatgttagtgttttgtttggattagttttaatttgtttgattttgattgtagtttttttgatagtgaaacgaggattttattatttttaattatttatggttaaagttaataaattattaaaaatttttatttagtgaattattttaatttttttattgttaaaatttttattagagttgtgatttaaggtaattgggttgagatatgttattgttaattttttagttgtatgtaggttaatgttgtatttttgtggggaaataaataaagggtatagtggttaggagtaaaaggttttttgataattagtttttgaataatttagagttgattgtattatgtaagtgtattttttaagatagggaagatgaggattatgtgtatgttttggatttttgtgttagtgtttaaattatttttattttattgtaaattggttatgtgaaaatgttaataataataatattttttattaaaatttttagagtttatgaaatttatttatattgattattttatttaatatggtttttatataattttgggaaatagtatattagatattaaatttaaagagttgaagtttaaataggttaaatggtttttttaaggttatatggtttttaagtatttgagttaagattagtattaaggttttttgatttttaatttaaaattttttttaatgtaaattgttttttagtatatttttataaaatttttttagattgtattagaataataatgtttgttaatatattatttttagatattttaatgataggatatatattttttttttgttaaaagttatttttttaagtttatatttttggggatatttaatgagtttttttttaattttgagaatttgtggttttaaaagcgtggatggtttagtaggggtaaaattttagttttgttttatagtttttgtcgttatgaggcgagttgtttttttttgagggtattagagggttttatttagttaggtattgttttttaagtatgtgttttatgtgttggggtaggtttattattggattttatttatgttttggtagttagtgggtttagtggaatattcgtgattgggaatacggtgatattgtattgatttggatttttattttttttttttatagttgtatatagaattgtgggtgtagtttatttttgggtttggagaattgtttttttggttttgtttttttttttttttggagaaggggagttttcgtgttttggtggttattatagtattgattttgttttggttatatatgtgtgtatttattttttaattttgtgttgtttttttttttatagagatagtttttggtttttggtatggtttgtgatagtataggtattattatggtaatagacgtgttataaatataggataatagttttgtttttgttttttttttttttcgtttttatgtagtgaagggaattattatgatttttaaataataattatagatttttttgtagattttaggaaatgaatagaataaggttttgttatataggtaagttatgaagaaaatttataagaatattagaaaataataaaagtattgattaatattttttttttgtgtaaatatgtttttatttttttagtttgaataaatgtaaaaatttttttttttgttaatttaaaaaattatattatgaatataatttgaagtggtaaaaaatatgttagtaagaattttgaaagataggttaattaaacggtaattttgttgtaatttattttatgttagagattttagtatgggtttaattttttgagattttattcgaagatgattatgtttttaaagggtttgggtatggattgtaagaattgtgttgtagtgagtttttattaagatatttggttttttttggttttaattgagttttaaatttggttttttttaagtttgatgattgaggtaaagtatttagaagggattttgaatatatatttttgataaaggttttataatggtttttattgttttataagtgtaatagtttttggttgtattgattggttattaattttttgtagaggtagggtaggtttgggtttttttattttgttaatttttggttaaagtagttagggtagattttggtttagttgagatttaga

SEQ ID NO: 1949 - DNA, 2308 bp, Artificial Sequence
  chemically treated genomic DNA (Homo sapiens)
tttgagttttaattgggttagggtttattttggttattttgattagaagttgataaggtggggagatttaaatttgttttatttttgtagaaaattgatggttagttaatgtagttaagggttattatatttgtaaagtagtgaagattattataaggtttttgttaaagatatgtatttaaaattttttttgagtgttttattttaattattaaatttggagggaattaaatttaaagtttaattaaaattagagaaggttaaatattttaatgaagatttattatagtatagtttttataatttatgtttaagttttttaaaggtatgattattttcgaatgaagttttaaagggttgaatttatgttaaaatttttaatatgagatgaattatagtaaagttatcgtttaattaatttattttttaaaatttttgttgatatattttttgttattttagattatgtttatgatgtgattttttaaattagtaaagaaggaggtttttatatttgtttaaattgaaagaataaagatatgtttgtataaaaagaaagtgttggttaatatttttattattttttaatatttttataagttttttttatggtttgtttatatggtaaagttttattttgtttattttttagagtttgtaaaaaagtttgtgattattatttaaggattatggtgattttttttattgtatgggggcgggggagggggaaagtaaaagtaaagttattattttgtatttataatacgtttgttattatagtaatgtttgtgttgttataaattatattaagggttagaggttgtttttgtggggggaaaggtagtatagagttggaagatgaatgtatatatgtgtggttagagtagggttaatgttgtggtaattattaagatacgggagttttttttttttagagaaaagggagggtagggttagaagagtagttttttaggtttagaagtaagttatatttataattttgtatgtagttgtgagaaaggagagtggaaatttaagttaatgtagtattatcgtgtttttaattacgagtattttattgggtttattggttgttaagatatggatgggatttagtggtgagtttgttttagtatatgaaatatatgtttgggaaatagtgtttgattggatggagttttttggtatttttaaagagaagtaattcgttttatgacggtaagaattgtaaaataaagttaggattttatttttattgggttatttacgtttttagaattatagatttttagggttagggaagaatttattgagtgtttttaaaaatgtggatttgaaaaagtaatttttagtaggaagagagtgtatgttttgttattggggtatttggaagtagtatattaataggtattattattttgatataatttagggaaattttgtaggaatatgttaaaaggtaatttatattaaaaagaattttggattaggagttagaagattttagtattagttttggtttaagtatttagaagttatgtgattttgaaaaagttatttaatttatttgaattttagttttttaaatttaatatttaatatgttattttttagagttatatgaagattatattaaataaaataattaatgtgaataaattttataaattttaaaaattttaatgaaaggtattattattattagtatttttatatagttagtttataatgggataggaataatttgaatattaatataggaatttaaagtatatatatgatttttattttttttattttgagaggtgtatttgtatgatatagttaattttaaattatttaagggttgattattaaggggttttttgtttttagttattgtattttttatttgtttttttataggaatgtagtattaatttatatatagttagaaaattgatagtagtatattttaatttaattattttgaattataattttggtaaaagttttagtaatggaagagttaaaatgatttattagatggaagtttttgataatttgttgattttagttatggataattaagagtgatggaattttcgttttattattaaggaagttgtagttaaggttaaataggttgggattaatttagataaaatattagtatttttttagtgaaatgtttatatatgtgtaataagatttgaatattagttatttatttatttatttaataaatattgtgttaagtttattaaatattttgaaaatttattatttttttgtttttgttgtttttttttttttgaaatatatattg

SEQ ID NO: 1950 - DNA, 2496 bp, Artificial Sequence
  chemically treated genomic DNA (Homo sapiens)
attttgagttggttgtaaataaaatattttaagttatcgtttttttttttatttgattgagttagttattgtatagggaggtgatataaaataaaatttcgtgtttttgaagtcgagattttgggattgtattttatgtaaagttatttataagttttgattattttgagagaaaaatattatagtatttttaggaagttttatgtatttgttttaaagttaagtattattttttttttagttaaaaaaaaaaaaaagtttggaaaatagtgatatgttagtataaagggaatattgttttataataagaaggaatacgttatagatatatagtatggatgaatgttaaaaatattgtgagagaaaaatgtttgaataggagagtaattattgtttgattttatttttgtggaattttagaaaaggtaaaattaatttatggtaataggaagtagattagcgattgttaggggtgatggggattggaggaggttgattgtaaaagggtagaagggaattttttagggaaatatgaaatgttttatattttaattgtggtggtgtttatattggtgtaaatatatttgtttaaattcgtgtaagtatatgtttaaaatgggtgtagttttttgtatgtaagttatattttataaagttgatttgaatcgaaaaaaggggttagaaaaggttgtggttggaattttttgtgtaatttaaggttaaatagtttatttacgttagtttttatagtattgtaagttatgttttttgtgtttatatttttttagttatttttttattcgttattatttaggagattttgtattttatttgttttttttttagttttatgatttgagtaatagaagtttttggtttttaggaattttatagtttttgttagttataagtaagaatgtattttaaatttattttaaattattttttaagtaggggttttggtggttttttggaatggaggtgtggtggaagtttgagtgtgtgtgggaagaggttgggtgttttttagattattgtattatgtttttttatatttgtttaagtttttgtgcgaatattgaaataaagtgttatgaattttgtttttggtatttgtcggttatagttgtggtttcgggttgtatatttgttgtggttttagagtttttgagaagttattggttgggagggcgttaagaatggttggtgtacgtggtaattgagtgtttaaggggaggaggatgatttttagtgtatttattgttttttagtttttattttaattttgttataatttagagagacgtttttttggtgtgtttatagagagatggatgcgtgtttaggaatgtataatttagtgagtagtttgaatatttagatgttgggaatattgttgagtatttatttttaaagtttaagttttttatgtttagttagtgttagtttgtaagaaagaattagttgtttttaatggattatgttagttggatttggtataagtgtttttttttagaagggaggattatacgtttatagtaataagatgtttttttattttttagtttattaaaagattgtgaaatagggtgtgtagatattttaggtagtattattttttaaatagatgagtttgaaagagtgagaaaaggttgtgttaggttaattgggtttaaggaaagttaaataattggtgggagaaggaaaagtaaatattaatttttttttttgttgtgtattttttttttttttttttttttgagatggagtttcgttttggttggagtgtagtggtacgattttagtttattgtaatttttgttatttgggtttaagtgatttttttgttttagttttatgagtagttgggattataggtgtttgttattatatttagtttatttttatatttgtagtagagatggggttttattatgttggttaggttggtttttaatttttggttttaagtgatttttttgttttagttttttaaaatgttgggattataggtgtgagttattgaattcggtcgttttgttgtgtattttttttttttttttttttttttttttttttttttttttttttgagatgtagtttcgttttgttatttagtttggagtgtagtggtttaattttggtttattgtaatttttgttttttgggtttaagtgatttttttgttttagtttttcgagtagttgggattataggtatgtgttattataattagttaatttttgtatttttttagtagagatggagttttattattttggtagggttggttttgaacgtttgattttaggtgatttattcgtttcggttttttaaagttttggaattataggtgtgagttatcgtgatcggtttttgttgtgtattttttttggatattttttggttttgtgtttgtgtaaattttgaggttttttaaaattattaaagtagtgaggagaagatggtagaaagttgtgtgttgatatttttttt

SEQ ID NO: 1951 - DNA, 2496 bp, Artificial Sequence
  chemically treated genomic DNA (Homo sapiens)
aaaaagaatattagtatatagttttttgttattttttttttattgttttggtagttttaagaaattttaaagtttatataaatataaagttaaaagatgtttaaaagaaatatatagtaaaggtcggttacggtggtttatatttgtaattttaggattttgggaggtcgaggcgggtagattatttgaggttaggcgtttaagattaattttgttaagatggtgaaattttatttttattaaaaaggtataaaaattagttggttgtggtggtatatgtttgtaattttagttattcgggaggttgaggtaggagaattatttgaatttaggagatagaggttgtagtgagttaagattgagttattgtattttagattgggtgatagggcgagattatattttaaaaaaaaaaaaaaaaaaaaaagaagaagaaaagaaaagaaaaatatatagtaaggcggtcgggtttagtggtttatatttgtaattttagtattttgggaggttgaggtaggaggattatttgaggttaggagttagagattaatttggttaatatggtgaaattttatttttattataaatataaaaatgagttgggtatggtggtaggtatttgtaattttagttatttatgaggttgaagtaggagaattatttgaatttaggtggtagaggttatagtgagttaagatcgtgttattgtattttagttagagcgagattttattttaaaaaaaaaaagaaaaaagaaatatatagtaaaggaaaaaattaatatttattttttttttttttattaattatttagttttttttaagtttaattaatttgatataatttttttttatttttttaagtttatttatttaaaaaatagtattatttaaaatatttgtatattttattttataattttttgataaattaggaaataaaagaatattttgttattataaacgtgtaatttttttttttaagaaaaaatatttgtattaagtttagttaatatgatttattaagaataattagtttttttttataggttaatattgattagatatggagaatttgaattttaaaaataaatatttaataatatttttaatatttagatgtttaaattgtttattaaattatgtatttttaagtacgtatttatttttttgtggatatattaggaaaacgtttttttaaattataataggattgagataaagattggagagtaatgagtgtattaagaattatttttttttttttaagtatttaattattacgtgtattaattatttttagcgtttttttaattaatggttttttagagattttgaaattataataaatgtgtaattcgaagttatagttgtggtcgataaatgttagaagtaaaatttatgatattttattttagtattcgtatagaagtttggataggtgtgaggaagtatggtataatgatttgaggaatatttagtttttttttatatatatttaagtttttattatatttttattttagaaaattattagaatttttatttaaaaaataatttgaagtgaatttaaaatgtatttttgtttatgattaataagaattgtgaggtttttgaaagttaagaatttttattgtttaaattatggagttaggaggaaggtagatgagatgtaaagttttttaagtgatgacgaataaaggagtaattgaagaaatgtgaatataaagggtatagtttataatattgtaaaaattggcgtaaatggattatttggttttaagttatataaaaaattttaattatagttttttttaattttttttttcggtttaaattaattttatgaggtgtaatttatatataaaaaattgtatttattttaagtatatgtttatacgaatttgggtaaatatatttatattagtgtaagtattattataattaagatataaaatattttatatttttttgaaaagtttttttttgtttttttgtagttaattttttttaatttttattatttttggtaatcgttgatttgttttttgttgttataagttagttttgttttttttagaattttatagaaatggaattaaataatagttatttttttgtttaggtattttttttttataatgtttttgatatttatttatgttatgtatttgtggcgtgtttttttttattgtagagtagtattttttttgtattgatatgttattattttttaaatttttttttttttttaattaaaaagagggtggtgtttagttttaaaataaatatataaaattttttaaggatattgtaatattttttttttaaagtaattagaatttataagtaattttgtataaagtataattttaaaatttcggttttagaaatacgaagttttgttttgtgttatttttttatataataattggtttaattaaatggaaagaaaaacgataatttgagatgttttgtttatagttagtttaagat

SEQ ID NO: 1952 - DNA, 2472 bp, Artificial Sequence
  chemically treated genomic DNA (Homo sapiens)
taggtgtatttttgaggggtttatatggtttatatagtgggaattgatattttggatgtaatatatttattatatttgtgtaaattttttagagaaaatttaaagttagttaaaaaaatattaattaaatgggttattaaaatataataaattagttatgtttaattatatattttagaaaagattttatatttatagagatgagagtaggaatagttttaatataggtaaataatttttaaagtatataattttaatgtatagaaaaattaaaaattaattttaagtatgatattgaataagtattattttttataaaattattttttttttttattagttaaataaaattaaggttaaataaaggtttaattgattgtttgtaaatatatttaaattatttttaaaaattgaaaaatataattttagaattatagaattttatgttatttgattgattataaattatattatttgtaaatagagatggcgtattttaagttttagattaaataaatttttaaaacggttaatttttaatgattaaaaaattttaataagcgaatgaaaagtatataaaatttatgatttaaaaagaaaaaaaaaattataaagaaaaaaaaaaattatgaaaaaaaaatttaattagtaagtgaaaattatataaaatttttgatttttaaattgtatgaaggatacgaatgttaagaaaaataagatttttttgatcgggaatcgaattcgggtcgcggcggtgagagcgtcgaattttaattattagattattagggaatttgtataacgtttttttttaaatatatttgttgtgttaaaaatttgtatttaatttttttaattagtaggggatagagtattgcgtttaagttatatttattttgtttttgttttgagttttggtttttgaatttattttttgaaattgaagtaaattttcggaagcgtcgggatggttttttaaggaaaaaatttatattttttaaatttaattttttttttattgttatgttggaaaatatattttggaaatttttattttttacgtaatatgtaaatttttttattaagataagtgttgtttggacgcgtattgtttagagttttgtaatttgttttattattttattaattattttagttgttttttttaaatttaagttttgttttttttcgttttttttcgttttttgttacgcggatgttaagtttttttaaatattttattaaatttaacgatagattgttattagttgagagcgtttttcggcgaagagtcggagcgacgcgttgttttgggtgtagagcgcgtgtttaataaatatgggtgatgaagggttacgtagttttatagtacgcggttttattttatttatttggtatacgtaggttaacgaggttgagagagttgtgggtggtatgtttagtgaaggattaggatatttgtttaaggttttaagtaagttttttaaatttattgtgtttgttatttttttattttttaaattgtgttattatttgggtaattgttttattttttcgcgttatatattagatacggttaggaaatgatgtaattattaaaggagttaagatattttatagtttagttttaatttagaaatttttataaagtagatgtagagggtagtaagatataatttaattttgaaaatgttagtcgttatagttgaagaaatttgatttaagagatttcgtttcgttgtaagatggaaggaagtttaagtaagatataaatttgtaatgaatttgtttataatattcgtcgttattgtgatttgtagttattatttattattataaaattaggtgagtttgtgtttgaatttcgtttttttttttttagtagtttagagatggagtttaaattattgatatattttatttgaaaatatgtaataatatgagaataggaagatttaaaggggttattaagataataagatagaaaaattattagaagaaatttttatattttattgtattttaagtgggattttttttttttattttaaggaattttagattaagtttagtaggtggagtttttaatttttatttaaggggttgttagattttagtattagattatttggttttgaataaaaagattaagtagatattagtttaaatttgtataggtttagttataatattttatataaagtataaaagggtatggtgaaaattatttttttatttattttttttttttttttagaagtaattagtgttattagttttttttgtattttttagaaataatttatgtatatataatatatatttggtttatttttttttaattttttggtttcgaaatatgttaaagtaatagaaagttgtaattatagaatattgaatatatatatattttttatttatatttttgttttttaatttagagttttagtaatttgtggttattaggtatta

SEQ ID NO: 1953 - DNA, 2472 bp, Artificial Sequence
  chemically treated genomic DNA (Homo sapiens)
tagtgtttaatagttataaattgttggagttttaaattggaaggtaaaggtatggatgaagggtatatgtgtgtttaatgttttatagttgtaattttttgttgttttgatatgtttcgaaattaaaaagttggaggaaaatgaattagatatgtgttgtatgtgtatagattatttttgggagatatagaagaagttggtaatattggttatttttgggaagaagaaaggagtgagtaggaggatggtttttattatatttttttgtattttgtgtaaaatattgtgattaaatttatataaatttaaattaatatttgtttaatttttttatttaaaattagatggtttaatgttgaggtttagtaattttttaagtaagagttaagagttttatttattgaatttgatttaagattttttgggataggaaaaaagggttttatttaaaatataataaagtgtagaaattttttttgatgatttttttattttattattttaataatttttttaaatttttttgtttttatattattatatatttttagataaagtatattaatgatttaaattttatttttgagttgttgaaaaaaaagaaacgagatttaagtataggtttatttaattttgtggtaatggatgatgattgtaagttatagtggcggcggatgttgtgagtaagtttattataaatttatgttttatttaagtttttttttattttgtagcggagcgaagttttttgggttagatttttttaattataacggttgatatttttaaagttgagttatattttattgttttttgtatttattttatgagggtttttgaattaaggttgggttgtaaggtgttttgatttttttggtaattgtattattttttggtcgtgtttagtatataacgcggagaagtgaagtaattgtttagataataatatagtttggaaagtaggaggataataaatatagtgggtttgaaggatttgtttggagttttgggtagatgttttgattttttattaggtatattatttatagtttttttagtttcgttagtttgcgtgtgttaaataaataaaatagaatcgcgtgttatgaggttacgtgattttttattatttatatttgttgagtacgcgttttgtatttaggatagcgcgtcgtttcggtttttcgtcgagaaacgtttttagttggtggtaatttatcgttagatttagtaaaatgtttagagggatttaatattcgcgtgatagagaacgaagaaagacggagagggatagaatttagatttggaaagagtagttaaaatggttaataaaataataaagtaaattataaggttttggatagtacgcgtttagataatatttgttttggtaaagagatttatatgttacgtaaagaatgagaatttttaggatatattttttagtatggtaataggaagaggattagatttggagggtataggttttttttttaaggggttatttcggcgttttcgagaatttgttttaattttaggaaatagatttagggattaggatttagaataagaataaagtgggtgtggtttagacgtaatattttattttttattggttagaggaattaagtgtagatttttaatataataaatatatttaggaagaagcgttgtgtaagttttttggtggtttagtggttaggattcggcgtttttatcgtcgcggttcgggttcgattttcggttagggaagttttgttttttttgatattcgtattttttatgtaatttagaagttaagagttttgtgtagtttttatttgttggttgggttttttttttatagtttttttttttttttatagttttttttttttttttaaattataagttttatgtattttttattcgtttgttggggttttttaattattaaaaattgatcgttttaaaagtttatttaatttaaggtttaaaatacgttatttttatttataggtaatgtaatttataattaattaaataatataaagttttgtgattttaaaattgtattttttagtttttaaaaataatttggatgtgtttataagtagttagttaagtttttgtttaattttgattttgtttgattaataaaagaggaagatagttttatgaggaataatatttatttagtattatgtttagagttaatttttagtttttttgtatattaagattatgtattttggagattatttgtttatattggagttatttttatttttatttttataaatatgagattttttttgagatgtatggttggatatagttagtttattgtgttttaataatttatttagttaatgtttttttggttaattttaaattttttttaagagatttatataaatatggtaaatgtgttatatttagagtattaatttttattatataaattatataggttttttaaaaatgtattta

SEQ ID NO: 1954 - DNA, 2241 bp, Artificial Sequence
  chemically treated genomic DNA (Homo sapiens)
ttttaaaggaaatgttagttttgaaatttttttttagagttagagttagatattggtttttagttgtttaaagatatatatatagtaaatagtagtattaatttttatttgttatttaaattttaaagtaattatttttttgttatatttttagagtagatgaagtagagaatgtgaattgggggaagatattttggatgtttattttgtgggtattattagttgttttgaggaagtagtatgagattttgggaagtaattgtagtattaattagattttttagatgtttttgaatatttttatttttgtgttagaaggaaaagagttttttggaattcgattattttttgtagtttttgtagttgttgtgtttgaggagtagaggatggagttgggataaagtttagttgtaggagttataaggaaaatatatttttttttatagggttttgagtaattttgtgaggaaaaaaaggtttttaattttattttatttgaatatttttagggattatataattggataattatggaattggaagattttttagatgtttgattttttagttttgtaggtaagagaattaagatttaaagagggtaaagaattgttcgattgtggagttaagtttgcgtaggggttgatgatttagtttttattgatttttgaataatttttatttagaaaagagttttaattggtaaatataggaatttgggttttttattatgttatgttatgttatgttatgttttgttgtgttatgttatattattatattatgatttatgttattataatgttcgattgttgaaagtaaataaaatattatttttggggttgtttttatagtttagagtttatataataattaatatttgtttttttaataatagagttatttttttttttttttttaaaaaagtttttcgtggtattaaatattaagtagagtttaaataagaagtagagtgttatggtttttaaaatgtggttttttttttttgttaatatttgttttagagtgtatatataggtttttgttagagatattcgtttgttgggtttttacgtaaatggtagattgaagggtagcgtgattgttttagtttttaatgtcgtattatatattttgagtttttggttttttattagattttaaggaatgattttatgttttgtggtttggggttttacgtatttagttttgtttgttttttttgttttttttttttagttaggttttttattatttagtttgttttttttcgtttattgagagagtgaatgtattttttttttgtttttatttttgtaaaagttattttttaaaatgttttattatgatagattattttatgtttttgtaatgaaatagttgaattttatattttttgttattttgttaatattattagaattatattaatgagaattggtaaaataattttatttgtttaattttagtattagtataaatttagagggttttgtttttttttaataatttgatataatttaattataagttaaattattgattttgtttttatttaaatagttttaattattgttataaatgataatttatttaagattgatagtttaaaggtatagttagttatttttatagaaatttttattttattttaaagttatggtgaattgatatttttttgagaattgtttatgtttttttgtttttaattattataatttttattttagatttagtgagtatatgtgtaggtatgttatatgggaagattttgtgatgttgaggtttggggtatggatgattttatgatttagtaggtagtattttagttttttatttttttgtttttttttttttttagtagttttcggtgtttattgtttttattttttttttatgtgtatattatgtttagtttttatttataagtgagaatatgtggtatttggtgtttttttttagttttaatttgtttaggatgatagtttttagttgtatttatgttgttgtaaaggatatgattttgtttttttttacggttgtatagtattttatggtgatgtattatatgttttttatttaagttattgttgatgggtatttaggttggtatttaggtatgatagattgattttatgtttttgttattgtgaatggtggtgtgatgaatataagtatatgtgtgtttatggtagaatgatttatttttttttgggtttatatttagtaatgggattgtta

SEQ ID NO: 1955 - DNA, 2241 bp, Artificial Sequence
  chemically treated genomic DNA (Homo sapiens)
tagtaattttattattgggtatagatttaaaggaaaataaattattttattataaatatatatgtatttatgtttattatattattatttataatagtaaagatatggaattaatttattatatttaggtattaatttaggtatttattaatagtggtttggataaagaatatgtggtatattattatggaatattatgtagtcgtaaaaaagaataaaattatattttttatagtaatatggatgtagttggaggttattattttaagtaaattaagattggaagaaaatattaaatattatatgtttttatttataagtgagaattaaatatggtgtatatatggaaaaaagatgaaagtaatggatatcggggattgttggagagggaagagagtaaggaggtggagggttgaggtattgtttattgggttatgggattatttatattttaaattttagtattataaagtttttttatgtgatatatttgtatatgtatttattgaatttaaaatagaagttgtaatgattaaaaataaaaaaatataaatagtttttaaaagagtattaatttattatgattttagggtaaaataaaaatttttataagggtaattggttgtatttttgaattgttaattttaaatgggttgttatttgtagtaatagttggagttatttaaataaaggtaaaattaataatttaatttgtaattaaattgtgttaggttgttaaaaaagagtaaaattttttgaatttatattaatgttgagattaagtaaatgaggttattttattaatttttattaatgtagttttgataatattaataagataataggaaatgtgagatttaattgttttattgtaaagatataaaatagtttattatagtgaagtattttaaaggataatttttgtagaaatagagataagagaaggatatatttatttttttagtgaacgggaaagagtaggttgagtggtgagaagtttgattggagggagagaataggaaaagtaagtagaattaaatacgtaggattttaaattataagatatgaagttattttttgaggtttaatagagaattaaggatttagagtatgtgatacggtattaggaattagaataattacgttattttttaatttgttatttgcgtaagagtttagtaggcgaatgtttttggtaaagatttatgtgtgtattttgggataagtattgataagagaggagaattatattttagggattataatattttgttttttgtttaagttttatttaatgtttaatgttacgaggaatttttttagaaaaggaaaagaaagtagttttgttgttggaaaagtaggtattaattgttgtgtgaattttagattgtgagaatagttttagaaatgatattttatttgtttttaataatcgagtattataatagtatgaattataatgtggtaatgtaatataatataataaaatataatatagtataatataatatggtagagaatttaaatttttgtgtttgttaattaagatttttttttaaatgaaaattatttaaaaattaatgaagattaaattattagtttttacgtaaatttggttttatagtcgggtaattttttattttttttggattttaatttttttgtttataaaattagagagttagatatttgaggaattttttaattttataattgtttaattgtataatttttagaaatatttaaataaggtaaaattagagatttttttttttttatagaattatttaaagttttatgaaaggaaatgtgttttttttatagtttttgtaattagattttgttttagttttattttttgttttttaggtatagtagttgtaaaagttgtagaaagtggtcgggttttaaaaagtttttttttttttagtataggggtgagaatatttaagagtatttggaaagtttggttagtgttgtagttgttttttagggttttatgttgtttttttagagtagttaatgatatttataaaataagtatttaagatgtttttttttagtttatattttttgttttatttgttttaagggtgtgatagagaaatggttgttttaggatttaagtggtaggtgaaaattagtattgttatttgttatgtatatatttttaagtagttaaaaattaatgtttaattttaattttggaagaaagttttaaggttaatattttttttaaga

SEQ ID NO: 1956 - DNA, 2395 bp, Artificial Sequence
  chemically treated genomic DNA (Homo sapiens)
ttatggtttcgaggatttttaaagtagggatttttatattgataaaaataattttttagtgtttttgtggaggaggtgaggtaaacgataaattgatatttattttgttttaaattaagtgttaaagtttggttttttaaagagaatggttagtattttgggcgtagttgttaaatttttttaatttatatagatgtaatagaatttgtgaattaatttgtggtatttattaaagttaatttttgttaaaaataaatttttttttttttggtatattgaataagagatagggatgtattaaatatttacgaagatattttaagagagttttaggtaataggaagtgttttgagattgatttgttatgttttgagtgtatagaagatagagggagatatatagggaatgtttttgagattttttttttttaattatttttttttgtgatttttattttataatttatttttaaagaggtattatagttttttgggtgttataataaaatttaaaataaatgtttttatttagataagtattattaaaaggaaaggatattgaatttatttgaatatatttatagaagattgatttttttaagggaatgtatttattttatttttttaattatttttgaagttttgtttattaattgataattttttatagaaaggaagtaaaatagtttggttttcgtgatagcgaagaattataatattagaataaaaataggtttgttattttttttattttttttaatgtttgagttattgggagttagaaatataataattttattttagtaatatagttatttagaatatgttaaatcgaaaggtaaatttaaagttaaatttttttattttttgaagattagtatatttatttttaattataagtatttagtatgattagttataaaatattagagaaaatatggttatatttattttatttttttaattgattattatttgattagaaagaagattattttgttttatatgatttatttttagtaaaaaaattgtttatttaagtataggaaagttaattttcgtattaaaagagaattgagaaatttaaatagtttatgatttttattgttttggtttttgttgtaaagcgttattgtgaaaaattggttttgattttagtaattaatgtttttttattgtatagagatggtttggcgttattgtgttattgtggttgttaagggtagggttttttagtaatgtataatggttagaataagttttttttaattttgtattaagggtaggtttttagttttaaattatttttttattttattttagttttttttcgggagttgtggtttttttttgtggttgaacgtggtttagttttttttgaattttgtttttttttaaaaataattatttgttggagagtggtggtggttggataatattgtgaatgtaaaatattattgaattgtgtatttaaatgggaaattttatgttatgtgtattttattatagaaattatttttaatgtgtatttttaggtagtcgagaggtcgtttttttagaggattttgagttgttttttttagtaggtttattatttttgtatttttgtatgttaataaagattttttttttttttttttgagatggagttttgttttattgtttaggttgaagggtagtggcgcgatttcggtttattgtaatttttgttttttaggtttaggtaatttttttgttttagttttttgagtagttgagattataggtatttgttaatatatttagttaatttttgtatttttagtagagatagggttttgatatgttgattaggttggttttaaatttttgattttaggtaatttatttattttagttttttaagtgtcgggattataggtatgagttatcgtagttggttaataaagattttttgtgttaattatagatatattaaatgaaattgtttttttttgtttttttttttttttattaagggatgaaatataatttttttttttttgaatttatgtagatttatgatatatttgatattaattaaatgtagtagatatgatgttggataatttttgaggtttaatgattataagtaattaatttatttttttttttatttgtttgaatttttatattggatttttgaattgtaattgtagtagtttaattgttttgtagttattatgttgtaagaaagtttagattaaagtatataaggaaattaatggagaaatattaagattatatgaagagttacggagaggtgtagttttttgttttagttttcgtcgtcgtttgattgtaatttataaaatttatagttagaattatatagttaaatttttttttaattttagattggttgaaattatgaggta

SEQ ID NO: 1957 - DNA, 2395 bp, Artificial Sequence
  chemically treated genomic DNA (Homo sapiens)
tattttatggttttagttagtttggaattggggaaggatttgattatgtagttttagttgtgggttttataagttgtagttagacggcgacggaagttggaatagagggttgtattttttcgtggttttttatgtagttttagtgtttttttattggtttttttgtgtgttttagtttgggtttttttgtagtatggtggttgtagggtagttgaattgttgtaattgtagtttagagatttagtgtgggagtttaagtaagtgagaaagaggatgaattaattgtttgtaattattgagttttagaagttgtttagtattatatttgttatatttgattggtgttaagtgtgttataagtttatatagatttaaggagaggaaaattatattttattttttgatggagaagggaaagggtagaaagggataattttatttggtatatttgtgattagtataggaagtttttgttggttagttgcggtggtttatgtttgtaatttcggtatttgggaggttgaggtgggtggattatttgaggttaggagtttgagattagtttggttaatatgttaaaattttgtttttattaaaaatataaaaattagttgggtgtgttggtaagtgtttgtaattttagttatttaggaggttgaggtaggagagttgtttgaatttgggaggtagaggttgtagtgagtcgagatcgcgttattgttttttagtttgggtaatagagtaagattttattttaaaaaaaaaaagaaaaagtttttgttagtatgtaaagatatagaggtggtggatttgttgaaaaaggtagtttagggttttttgagaagacgatttttcggttgtttgggaatatatattagagataatttttgtagtaaaatatatatagtataaaattttttatttaaatgtataatttagtggtattttatatttataatgttgtttaattattattattttttaatagataattatttttgggggaggatagggtttaggaaaagttgaattacgtttaattatagaaagaaattatagttttcgaagagaaattggaataagatggggaaatgatttgggattgggggtttgtttttagtgtagggttggggaggatttgttttggttattatgtattgttaaggaattttgtttttagtagttataatggtataatgacgttaggttatttttgtgtagtgggaaagtattgattgttgggattaggattaattttttatagtgacgttttgtagtagaggttaaagtaatgaagattatgggttgtttaaattttttagtttttttttagtacgaaggttggtttttttatgtttaagtaaatagtttttttgttgagagtaaattatgtgaaataaaatggttttttttttaattaggtgataattagttgaaaaaataaagtgaatatgattatattttttttaatgttttataattaattatattggatgtttgtagttaggaatgagtatattgatttttaaaaaatagagaaatttgattttgaatttatttttcgatttaatatattttgaataattgtgttattgggatggggttattatatttttgatttttagtaatttagatattagaagagataaggaaagtgataaatttgtttttattttagtattataatttttcgttgttacgaaagttaggttgttttgttttttttttgtaagaaattgttagttgataggtaaaattttaagaataattaaagaaataggataggtatatttttttgggaaaattaattttttgtaaatgtatttaaatgaatttagtattttttttttttaatagtgtttatttaggtgaaaatatttattttagattttgttatggtatttagaaaattatgatgtttttttaaaaataaattatagggtaaaagttatagaggaggatgattgaaaagaaaaagttttaggaatattttttgtgtgtttttttttgttttttgtgtatttaaagtatggtaaattaattttagaatattttttgttatttgagatttttttgaagtgttttcgtaaatgtttaatgtatttttattttttatttagtatgttaggaggagagagatttgtttttggtaggggttggttttggtaaatgttataggttaatttataggttttgttgtatttgtgtaaattgggaagatttgatagttgcgtttaaaatattggttattttttttgggaagttagattttgatatttggtttaaggtaaaatgaatgttaatttgtcgtttattttattttttttataaaaatattaaaagattgtttttattaatataaagatttttgttttgagaattttcgaagttatag

SEQ ID NO: 1958 - DNA, 2258 bp, Artificial Sequence
  chemically treated genomic DNA (Homo sapiens)
agttaagatcgcgttattgtattttagtttgggcgatataaatttcgttttaaaaaaaaaaaaaaaaaaaagaagaaattttgtgtttttttttttgatatagtgtttagggaattagtaagattttattaatataagtattatatttttttatttttttgtaaaattattagtagtaagtgtttttttttaatattaaaatatatttattttggttgcgtacggtggtttatgtttgtaattttagtattttgggaggataaggtaggtggattatttgagtttgagagtttaagattagtttgggtaatatggtgaaattttgtttttataaaaaaaaaaaaatataaaaaattagtagggtgtggtggcgtatatttgtggttttagttatttgggaggttgaggtgggaggattgttggaatttttgaggtcgaggttgtattgagttgagatcgtgttattgtattttagtttgggtgatagagtgagattttgttttaaataaataaataattgaaagttaattatatttttgtttatggaattttttattttatataagttgagagaagttaaatttgggttattgaaatgttttagaaaattgttaaattgtttatttttttaagtttttagtttgttttagttatatgtgtgtgtgtatatatgtgtgtgtgtatgtgtgtgtgtgtatatatatatatatatatatatatatatatatatatatatgtatgttattgtattttaattttggtaatagagtgagaatttgtttttaaaaaatagtaaaaaataagttaataataaaataagttggttaggtgtagtggtttatgtttgtaattatagtattttgtaaggttgagatatataataatgtttaagagtaaaaattaagtaaatagttataatatgattagttattttatttattttattttgttggattggagtttgttgttatattatataaaatatttgttaggattttgtatttttaatatttatgtatatttatgggaatttattagagggggaagtttggatttaaaatttttttttatgaaatagttaaagattaagaggtgaatcgtgtgggatatgaagtatgttatggttgagttgttgacgaggtttcggttgtgttttgtattatgtaagggtttagtattttgagaaggtgtttggtaaatgttattggttgatcggacggtagttttcggaaggtttgttgattagaaatagagtttttggtagaattttaatggtaaagttataaatagtaatagtttttaaaataataattgtaattttagtaaaatgaaaattttttatgtgggaggtataatgggaaatgtattgattggtatttttttttagatatatgaatagtgattataagtagagatgttttttttttttataaaggaaaaggtgtaaaatattggttttataatgtaggaaaattaataaaatggtggtataaaatattgattattattagtagatttttttagtaagaatggtagtttaagttaatagatatgttttatgaattttgtggttgtaagtggttggaatggaatgaaaattagtttttacgaatttatttttttattttttttattttaatgagtatttattgtatgttaggtattgttttaggtatgtgtaggatattagcgagtttagttaagattaaattttttttgtttagatatagaaaataagggatatatattatataaaaatatataatatgttagaaagtggaaaaagtaagtagaaaaaagaaaaagtatagtagtaagggaaatttaagagtgttaggtcgggcgcggtggtttacgtttgtaatttcggtattttgggagtttaaggtgggcggattacgaggttaggagatcgagattattttggttaatacggtgaaatttcgtttttattaaaaatataaaaaattagtcgggcgtggtggtgggcgttatacgggaagttgaggtaggagaatggcgtgaattcgggaggcggagtttgtagtgagttaagatcgcgttattgtattttagtttgggtgatagagcgagatttcgttttaaaaaaaaaaaaaaaaaaagagtgttaaaaaatggtgggtatggagtaggggtattaggtgggtagaggtagttttgttgagatggtgataagtgaatagagttttggagtagaaaattagtggatgatgggggaagagtatttcgggtaaagg

SEQ ID NO: 1959 - DNA, 2258 bp, Artificial Sequence
  chemically treated genomic DNA (Homo sapiens)
tttttattcggaatgttttttttttattatttattggttttttgttttaggattttgtttatttattattattttagtagagttgtttttgtttatttaatgtttttgttttatgtttattattttttggtattttttttttttttttttttttgagacggagtttcgttttgttatttaggttggagtgtagtggcgcgattttggtttattgtaagtttcgtttttcgggtttacgttatttttttgttttagtttttcgtgtagcgtttattattacgttcggttaattttttgtatttttagtagagacggggttttatcgtgttagttaggatggtttcgattttttgatttcgtgattcgtttattttggatttttaaagtgtcgggattataggcgtgagttatcgcgttcggtttggtatttttgaattttttttgttgttgtatttttttttttttttatttattttttttattttttaatatattatgtatttttgtatgatgtgtattttttattttttgtatttgagtagagagaatttaattttggttaggttcgttgatattttgtatatatttagaataatgtttagtatgtagtaggtgtttattaaaatgagaagaatgagagaatggattcgtgaaagttgatttttattttattttagttatttgtaattataaaatttatgaaatatatttattggtttgaattgttatttttgttagaagaatttgttgatggtgattaatgttttatattattattttattggtttttttatattgtaaaattaatgttttatatttttttttttgtagaaaaggggagtatttttatttgtgattattatttatgtatttggagaaaaatattaattaatatattttttattatattttttatatagaaggtttttattttgttgaggttgtagttgttattttagggattgttattgtttgtgattttgttattgagattttgttaaaggttttgtttttgattagtaggtttttcgagaattgtcgttcgattagttagtggtatttattaggtatttttttagggtgttgagtttttatatgatgtaaagtatagtcgaggtttcgttagtagtttagttatgatatgttttatattttatacgatttattttttgatttttaattgttttatggagggaaattttaaatttaggtttttttttttaatgaatttttataaatgtgtatgggtgttaaaaatataaaattttagtaaatgttttatatgatataatagtagattttaatttagtaaaataaaataaataaaatgattaattatgttataattgtttatttaatttttatttttgggtattattatgtgttttagttttgtaaagtgttgtgattataggtatgagttattgtatttggttaatttattttattattaatttattttttattattttttagagataggtttttattttgttgttaaggttagagtgtagtggtatatatatatatatatatatatatatatatatatatatatatatgtatatatatatatatatatatatatatatgtatatatatatataattaagatagattaaaaatttaaaaaagtaaatagtttaataattttttaaagtattttaataatttaagtttgattttttttagtttatgtgaagtaaaaaattttatagatagaagtataattaatttttaattatttatttatttgagataggattttattttgttatttagattagagtgtagtgatacgattttagtttaatgtagtttcgattttaagggttttagtaatttttttattttaattttttaaatagttgggattataggtgtgcgttattatattttgttaattttttgtatttttttttttttgtagagatagggttttattatgttgtttaggttggttttgaatttttaagtttaagtgatttatttgttttgtttttttaaagtgttgggattataggtatgagttatcgtgcgtagttagaataaatatattttaatgttaggaaaaagtatttgttgttgatgattttgtagaaaaataagagaatatgatgtttatgttgatggaattttattgattttttaaatattatgttaagagaaagaatatagggtttttttttttttttttttttttttttgagacggagtttgtgtcgtttaggttggagtgtagtggcgcgattttggtt

SEQ ID NO: 1960 - DNA, 4090 bp, Artificial Sequence
  chemically treated genomic DNA (Homo sapiens)
ggtttttaataattattgaatgaaatgttttttaatatggtattttttgtattgttatttagttttttttagtgtaggtttgattttgatttttttagacgtgaaattcgttgggataaggattagattttatttatttttttatttttattattcgtttttttgtttaatatttatttaaaggggaaagaaaggaaagatagtgaatttagggtattgataatttagaaagcgtggaggtgggggttagtgagtagagagttatttggattttaagggtgtgggtaattttggagaggaataagttattatatttatttgtttacgaatttatttatatttgtttttttttagaaagggtttgaggtggttgataaaaatatatataatataaggtaaaaaataagtcgttgaggaaattaggtcgagaggaaaataagagtaggaaaaataagatcgagtcggtttgttataagtgggttaaaaagttggttaagttttttatagtttattcgaggcggaagtttttttttttttttcgttttaggggcggttatacgttttatacggacggggagagatgtattcgagagagagggcggataggatttttttcgtatttttttagtcgttaggtcgttagttcggtgttcgggtttagtagttttcgcggttttggagagcgcgaagtggaggggcgcgcggttttggggggtagttcgagtttagatttgggttttaaggtgttggcggggagtttgtgatttgggacggggtgttggaggttgaggaatcgcgtttttatgttacgtcgtagaggttttcgcgttcgaaatcgaacgttttttagttattattatttacggtttattaagcgcgcgtttcgggtttagggtataaagatggagggagcggcgcgatttattcgttttatttttatttattagataaaggggtaggtcgttttttttttagtttttttcgcgggtttcgtcgttttttgttttttttttttcgggtcgttttttggtgatttttttttttttttaagggcggtttcgggattttttaggaattgcgttttatttggacgtggggcggggagtcggcgcgtagagggcggttttcgggtttatttttaggtcgagtcggttttaggttcgcgtttttttttttgaattcgcgttttcggtttttggcgttttttcgtttaggcgttttcgtttttattcggttaagtacgtgttgttcgggtttcgagcgtttttcgtcgtacgggtgggggttgggtttatttttcgttcgttttttatttttatcggaaatatttttgttatatttttgtaattgtaaggtttagttcgtcgttttttatttcgttttcgcgtcgggtttagggtttttttgcgttttttttatcgtcggttcgttttttgaggagggggttgggttagggtttcggttgatcggggaggaagaaggggagtagagaaaaatatgagttatagtcgtgtgttattggagcgtattttaattttttgtattataggaggtgtggaaggtcgtttcggggatcgggcgcgggaggtgcgttcgagaaggtttcgggtcggtttgtagggcgcgtcgtttcgtttgcgttttttttttttttatcgtttttttcgttatttttttttttggtttttttttcgttcggtgtaataagtttttgttaagtcgggcgtcgggcgggttaggcgtggcggagatggtttgcgtgttcggtttttgtttttaaagcgtttttaggcgatttttggtttattttttatttttatttatagttttaacggaagggtttaggtttttaagtgggtttgcgtatttttagaatattatttaagttattttaaggtatgaagttttttttgggtgtatttgttaacgagttaatcgttggtttcgttggaaggttttattttgattatggttcgttggtggttattaataaaatattttggattttataagttttacgtttgaattttataagatttgtattttattaattagttatacgcgggttgatattgaaaggtatatgttgatatttgttcgtttaggggaaatttattatttttttattttagttagggggcggcgtgtaggtcgcggaattttttaacgagcgcgtttttttttattttttgggttcgcgtggattttcgtttatttttatacgttttggggggggggtcgggtttatacgttttggaagtttttagaggtgattttttttgggatttttgtattagggaggaaggatatcgttattcgttattatttttcgttagaagttttttcgtgatttttttgcgcgtgtttttttatatttttttcgttcgggattgcgaggagtgggcggtcgattcgagttcgtagtttaggttttttatacgtttttttttgtcgttagtatttattcgcgcggtagcggcggcggcggttggcgggcggtcgtttttttaaattttcgggtttatttgtatggtttcgttttttgagtgatacggttggcgcgggcgggttcgttttttttgtttttgggtcgttttttttaagtttttttgagtcggtgttgcgtttttttaattgggatttcgagtcggggttatttttggcgttggcgcggttttaagaaggcgtgagttcgcggtcgtttcggtggttttttttttttatatttataatttaattaaattatttatttattgaggtcgcgtacgggtcgtgtttagttttttgtttttcgttatttttcgggggagggggaatatttttgttttttcgtttggttgtgatatataaatatttcgcgggggtttgggcggcgagtacgcggcggcggcggtttttgagcgtttttgttttttttcggttttagattcgtatttgttattagcggcggtcgcggcggagttaggtcggtttttagcgtttagtatcgtcgttttcggtaattcggagcgcgtatcgtaggtcggcggtcgagttcgcggtgagtcgttttcggggttcgcggcggcggcggcggaggggggcgttcgcgttttcgttcgtacgtcgttttttttgcgagtcgttcggggttgtagcgcgcgtcgtcggttttatttttaggtcggggcggcgcgagtcggcggcgggggagggtcgcgcggcgcgggggcgggcggcggggttcggcggcgcggggaggacgttcgtattttttttttcgcgtcgcgggcgttttgcggggggcggggattcgggaaaggcgcgcggtgggggagggggcgcgtagttgcggcgagcgcgagttgtgtattcggcggagttcggaggagttcggcgtatttcgcgcggcggtcgttttcgttggagtcggagttcgagttcgagttcgggttcgggtgaggggcggggagagatacgggttgcggcgcggtaggagagtggggggtcgggcgtttttcgtagtttagggaagttttggaagtgagggagatggggaggaatttttaaattcggttttacgttttttcggtttttttttcgcgtttttttcgtagatgaggtcggagcgcgggtttgggtttggggttttatttcgattttatttttggtttggttcgcgtttttttagttttaggggtcgggtttgtttttcgtttttataaattggtttcgttgttttgttgggttttgttggaattagtttttttgatttttcgtttttattttatttttttttggggttttattttgcggggaggggacggagggagggggttttttttttttttttcgcgttcgcgcgcgttaggttttttgttttaaggcgggtttgggtgttttttttggtaggaagtggggtcgggtgtattcgcgtggcggtgtatgcggtcggggtgcgttgttttttcgcgtttgtaggagcggtttgcgttttttttttcgcgcgttttggtttcgggtttcgtcggtcggtttgtaacggtcgggcgtagatatttgtagagttattttcgggtcgggtttggagtttgatgtttcgggggtttag

SEQ ID NO: 1961 - DNA, 4090 bp, Artificial Sequence
  chemically treated genomic DNA (Homo sapiens)
ttaaattttcgaggtattaggttttagattcggttcgagggtgattttgtaagtgtttgcgttcggtcgttgtaggtcggtcggcgggattcggggttagggcgcgcggggggaggggcgtaggtcgtttttgtaggcgcgggaaagtagcgtatttcgatcgtatgtatcgttacgcgggtgtattcggttttattttttgttagagggggtatttaagttcgttttggggtaggaaatttggcgcgcgcgggcgcgggggagaggaagaaagtttttttttttcgtttttttttcgtaaaataaagttttagaagaaaataaaatagaaacggggagttaaagggattagttttaatagagtttagtaaagtagcgaaattagtttgtgggggcggagggtaggttcggtttttggggttgaagaggcgcgggttaggttagaggtggggtcggggtgaagttttaaatttaggttcgcgtttcggttttatttgcggagggggcgcgagagaaaggtcgagagggcgtagggtcgaatttgggggtttttttttattttttttatttttagaatttttttgagttgcggggggcgttcgattttttatttttttgtcgcgtcgtagttcgtgttttttttcgttttttattcgggttcgggttcgggttcgggtttcggttttagcgggagcggtcgtcgcgcgaggtgcgtcgggttttttcgggtttcgtcgggtgtataattcgcgttcgtcgtagttgcgcgtttttttttttatcgcgcgtttttttcgggttttcgtttttcgtagggcgttcgcggcgcgggggaaggggtgcgggcgtttttttcgcgtcgtcgggtttcgtcgttcgttttcgcgtcgcgcggttttttttcgtcgtcggttcgcgtcgtttcggtttgggaataaagtcggcggcgcgcgttgtagtttcgggcggttcgtaggaggggcgacgtgcgggcgggggcgcgggcgttttttttcgtcgtcgtcgtcgcgggtttcggggacgatttatcgcgagttcggtcgtcggtttgcggtgcgcgtttcgggttgtcgggagcggcggtgttgggcgttgaggatcggtttggtttcgtcgcggtcgtcgttggtagtaaatgcggatttgaaatcgggagagagtagaggcgtttagagatcgtcgtcgtcgcgtgttcgtcgtttaggttttcgcggggtatttatgtgttatagttaggcggggggataaaaatattttttttttttcgaaggatggcgaggggtaggaagttgggtacggttcgtgcgcggttttaataaataaataatttaattaaattatagatataaaaaaaagaagttatcggagcggtcgcgaatttacgtttttttggagtcgcgttagcgttagaaatagtttcggttcggagttttaattagaggagcgtagtatcggtttaggggagtttaaaaagagcgatttaggggtaggggggacgggttcgttcgcgttagtcgtgttatttagggggcggggttatgtaaatgagttcggggatttaaaagggcggtcgttcgttagtcgtcgtcgtcgttgtcgcgcgggtgggtgttgacggtagggaggggcgtgtgggaggtttgggttgcgaattcgagtcgatcgtttatttttcgtagtttcggacggaggaggtgtgggaaggtacgcgtagaggagttacgaaggagtttttggcggggggtggtgacgggtggcggtattttttttttttggtataggggttttagggagagttatttttaggggtttttagggcgtgtgggttcggttttttttttagggcgtgtgggggtggacgggggtttacgcgggtttagggggtgaagagaaacgcgttcgttagagaatttcgcggtttatacgtcgttttttaattaaaatagagagatggtagattttttttgggcggataggtgttagtatgtgttttttagtgttaattcgcgtgtggttgattggtgagatataagttttgtgaaatttaaacgtgaaatttgtgaaatttaaagtgttttattaatggttattagcgagttatgattaaggtggagttttttagcgaaattaacgattggttcgttggtaggtatatttaagggaggttttatattttgaggtgatttagatggtgttttggagatacgtaggtttatttggggatttgggttttttcgttgggattgtaaataaaaataaaaggtgggttagaggtcgtttggaagcgttttgagggtaggggtcgagtacgtaggttattttcgttacgtttggttcgttcggcgttcggtttaataaagatttgttgtatcgagcgagaaggaagttaaaggggaagatggcggggagggcggtgggggaggaaagggcgtaggcggagcggcgcgttttgtaggtcggttcggggttttttcgggcgtatttttcgcgttcggttttcgaggcggttttttatattttttgtgatgtagggaattgaaatgcgttttagtgatatacggttgtgatttatgtttttttttgtttttttttttttttttcggttagtcgaggttttggtttagttttttttttagggggcgagtcggcggtggaggggacgtaggaaagttttgggttcggcgcggaggcggggtggggagcggcgggttgggttttgtagttgtaggaatgtggtaggaatgttttcggtgggggtggggagcgggcggggggtgggtttagtttttattcgtgcggcgggaagcgttcggggttcgggtagtacgtgtttgatcgggtgggggcgggggcgtttgggcgggaaggcgttaggggtcgggagcgcgggtttaaaggggagggcgcgggtttggggtcggttcggtttaggggtgggttcggaggtcgttttttgcgcgtcggtttttcgttttacgtttaggtgaaacgtagtttttgagaagtttcggggtcgtttttggaggggaaaggaagttattaaagggcggttcgaggggaggggagtagagggcggcggggttcgcgaagaaggttgggggaggggcggtttgtttttttgtttggtgggtgggggtggggcgggtggatcgcgtcgttttttttatttttgtgttttgggttcggagcgcgcgtttagtaggtcgtgagtggtggtggttggagggcgttcggtttcgagcgcgggaatttttgcggcgtggtatggaggcgcgattttttagtttttagtatttcgttttaggttataggtttttcgttagtattttgggatttaggtttgggttcgggttgttttttagagtcgcgcgtttttttatttcgcgttttttaaggtcgcggaggttgttaggttcgggtatcgggttggcggtttggcggttggggaggtgcggagagggttttgttcgttttttttttcgggtatattttttttcgttcgtgtgggacgtgtggtcgtttttgagacggggaggggagagggattttcgtttcgagtgggttgtggaaaatttggttaattttttggtttatttgtagtaagtcgattcgattttattttttttatttttatttttttttcggtttgatttttttagcgatttgttttttattttgtattgtgtgtatttttgttagttattttaaattttttttggaaggaggtaggtataaataaattcgtaggtaaataaatatagtagtttgtttttttttaggattatttatatttttgaaatttaaataattttttatttattgatttttatttttacgttttttggattgttaatgttttgaatttattgtttttttttttttttttttttaaataagtattaagtagaagagcgagtggtagagataaaaagatgggtaggatttagtttttgttttagcgaattttacgtttagggaaattagaattaggtttgtattagagaaaattgaatagtagtataggagatgttatgttagaaaatattttatttagtagttattgagaatt

SEQ ID NO: 1962 - DNA, 2380 bp, Artificial Sequence
  chemically treated genomic DNA (Homo sapiens)
ttattttaaaaagttttgtgatttttaaggaaatagttggattaaggatgaaaaagaatattagaatttttgataattttttaaatattagtatatataagaatatagggtagttacggtagtttatgtttgtaattttagtattttgggagtttaaggtaggtggattatttgaggttaggagtttaagtatagcgtgggtaatatggtaaaattttatttttataaaaaatataaaatttagttgggtacggtggtatgtatttgtggttttagttattttggagattgtagtgggagaattatttgagttcgggaagttaaggttgtagtgagacgtgattatattattatattttattttgggtgatagagtgagattttaatttaataatataaaagaatatatatttatagatatatgtaatatatatttatttatgatttttattatattttatgtatttttggtttatatttaatcgattaatagtttttaaaataatatttgtgtaaattataatttatattgtatgattaattttaaattgaaatttttattaaatttaaggatttataatgtattatatatatttttattttgtaattagaatgaagtgtgaagtatataatgtatgttggtaaggaattgaaaatttaaatttgtttttagattataaatttattcgaaaatttgtaaagttttaatagtatatgagtatatgaaggttattaatattttgaaaatagtatttagtttttgatttatttattttttattttttatttgtattagaaaaggggaataaagatgttgaatttatggttagttttttaaaggtttgttgttttttgataatgagtaaattgttttttttttaattttgtttttatttttagggaagtttttgttttaattttgagaggaaagtagaattttaattgtaaaataaaggtttttggttattttgatatatatattatttaaaagtgtaattgattttgatagtggttttgttttttaggattttttttttttttatagaatttagtatattggagagatggtagagatggtatttgatttgttgttgatgtgatcgttttttttaaaatgtttagatttcgatttattaatgttaaagtttttttacgagatattggtgttagggtggtattgggtaatatcgttgtatgtttataaatagttgtagtgaaagtgttttggtagttggtttttgagatatagaaaagtaaaattgttacgtaagttggtaattgagtagttatgttgaagtttaatgagtgttgaaaaatagagtatgttttggtatttatagaaagaagatacgtggtgtttagaatttagtattttaaattacggaagttaattaagaaaacgttatgattttatagtattgttatataataaaagattttattttattgtagtaatttgtgaagattaatttaagaattttatgtatattagttcgttagggttgtttaataaaatataataaattgggtggtgtaaaaaataaaaaatttattgttttgtagttttggagggtgggagttttagatgaaggtgttagtagagttggttttttttgagggcggtgaaggaaagatgtgttttaggtttttttttttgatttatagatggttgttttttttttgtgtttttttatatgttattttttttatgtgtgtgtttgtatttaagttttttttttttgtgaggatattattttaatttttaatatagggaaagggaaaattttagttttagttttttttgttatcgttgttgtttgtttattgttgttgttgtttgagatggagttttatttttgttatttaggttagagtgtagtggcgaaatttcggtttattgtaattttcgtttttcgggtttatgtgatttttttgttttagttttttaagtagttgggattataggcgttcgttattacgttaggttaattttttgtatttttagtagagatagggtttcgtcgtgttgggtaggttggttttaaattgttgattttaggtgatttatttgttttgtttttatgttaaataagggtagaagaaaaaagttaattgaaggttataaatttaggggtataggtttattgaaagattgagatttaattataggattaattcgatttagtgtttattgtattttagtataattttattttaattaattagatttgaaatgattttttttttaaaaaagttatattttaagatattgatagttaggattttaatatataaatttttggaatttatatattttggaatgttaatataagatatttaaataattttaaaattttattattatttttatgtgaatatt

SEQ ID NO: 1963 - DNA, 2380 bp, Artificial Sequence
  chemically treated genomic DNA (Homo sapiens)
aatatttatatgaaaataataataaagttttaaaattatttgaatgttttgtgttgatattttaaaatatatgaattttaaaaatttatatgttgaagttttaattgttagtattttagaatgtaatttttttggaaaaggggttattttagatttaattagttaagatgaagttatattggagtatagtgggtattaaatcgaattggttttatgattgagttttagttttttagtgagtttgtatttttgggtttatgatttttagttggttttttttttttgtttttatttggtataaaaataaagtaggtggattatttgaggttagtaatttgagattagtttgtttaatacggcgaaattttatttttattaaaaatataaaaaattagtttggcgtggtggcgggcgtttgtaattttagttatttgggaggttgaggtaggagaattatatgaattcgagaggcggaggttgtagtgagtcgagatttcgttattgtattttagtttgggtgataagagtgaaattttattttaaataataataataataaataaataataacgatgataaaaaaagttagagttgggattttttttttttttgtgttaaagattagagtggtgtttttataaaaagggaaaatttggatataggtatatatatggggagaatagtatatgaagagatatagggagaaggtagttatttatgggttaaggagagaggtttggaatatattttttttttatcgtttttaggaggaattaattttgttgatatttttatttgggatttttattttttagaattgtaaagtaataaattttttattttttatattatttagtttattgtattttgttaggtagttttagcgaattaatgtatatagagtttttgagttaatttttataaattattgtaataaggtagggttttttgttatgtaataatgttatgaaattatagcgtttttttaattaattttcgtagtttaaggtattaagttttggatattacgtgttttttttttataaatattaggatatgttttgttttttagtatttattggattttagtatgattatttagttgttagtttacgtggtaattttgtttttttatgttttaagagttagttgttaggatatttttattgtagttgtttatgagtatgtagcgatattgtttaatgttattttaatattagtgtttcgtgaggaggttttggtattaatgaatcggaatttggatattttggaaggagcgattatattagtagtagattaggtattatttttattatttttttagtgtattggattttatgagaaaggagggggttttaggagatagggttattgttagggttagttatatttttagatgatatatgtattagagtagttaagaatttttattttatagttagaattttattttttttttaaaattagagtaaggatttttttaaaagtaagaataaagttaagaaaagaataatttgtttattattaagaagtagtagatttttgaggaattggttataaatttaatatttttgttttttttttttggtatagatggaggatggaggataaatgggttagggattaggtgttatttttagagtattagtggtttttatgtatttatgtgttattaaggttttgtaggttttcgaataaatttataatttgaaaataaatttaagtttttaattttttgttagtatgtattatatattttatattttattttaattataagataaaagtatatgtaatgtattgtgagtttttaagtttagtgaaggttttagtttgaagttaattatatagtataaattgtggtttatataaatattattttaaaagttattgatcgattaggtgtagattaggaatatatgaagtgtgataaaagttatggataaatgtgtattatatatatttataaatatatatttttttgtgttgttgagttaaggttttattttgttatttaggatggagtatagtggtgtgattacgttttattgtagttttgatttttcgggtttaggtgatttttttattatagtttttagagtagttgggattatagatgtatgttatcgtgtttagttaagttttgtattttttgtagagatgggattttgttatgttgtttacgttgtatttgaatttttgattttaggtgatttatttgttttgggtttttaaagtgttgggattataggtatgagttatcgtgattgttttatatttttatatatattaatatttaaaaggttattaggagttttgatgtttttttttatttttagtttaattatttttttgaaggttatagagttttttaaggtga

SEQ ID NO: 1964 - DNA, 2405 bp, Artificial Sequence
  chemically treated genomic DNA (Homo sapiens)
tagttaaaatttttgaagtatatatttttttaaatttttaaattttaaattatgttcggttttttagttttatttttgtttgagtttaatattagtattttattattatatatggcgtaaggtttttttttgatatattttatttatattttaagaaataattttattattttttataaagtacgtgaaattataggtattaaatatatatgtttatttaaattttaagattaatttatttatatgttatatttaattatgagtatttcgtgaaattattatatttgaaaggaaattttttaaaatgtattttaattagttagattgatgttatttggatttaaataggaagattatattttttttgtttgtaatgtaatttttatttttatgtgtaatttttaatataattaatatatataaatttagtttgagatagtttcgtttatgttatttagattggagtgtagtggagtaattaattttcgtttattgtaattttcgtttttcggatttatgaataatttttttatcgtagtttttcgaatagttgggattataggtttgtattattagatttagttagtttttgtggggatagggttttaattatgttaacggttaagttttaggtttgaacgattttttcgttttaatttttattgaagtgtaagtattgattgtttataagcgttaagttatttcgtttagtgatatatataattaaaattattttaaattaatggtcgatggaacgttttttgaaaatttagttttcgtatattttcgaaatgcgtttaaacgggtatttgtgataggtaagtaagatggttggttaatagtagtaacgttttgtaacgtatagtttttttttgagacggtaggtggttttgaaaagagttttttgttttttttgatatagaagtttttttattaatgataattttaagttatttgttttgggttttatggtggtgatttttagtttttttgggtagtagtattgtttgaatgttaggtaggatttcgttttgggtaatggttacgtcgtttaaaagtttattgagttttttattattgcggatcgttagttgtaggtggcggggaataatgcgagtttttttgttatcgcgagacgtattgtttgttagtttaaggatttttgttgtgagatattttaatattgtcgttaaatatattggtgcgtttgtttttattcgttttgtatagttttttttacgaagtagacgatggattcggtttacgggaaattgtaaattcgttttagaagagcgagatttagatttggcgcgtgttttttttttttgtttttttcgtttagatattttttcgtattaaattgtagtaatacgagaattatatttttagggttgttattgggtttatttatagtttgattgaggttggtatttgttatttgattggttgatggtcgtttatttaattagaaagtcgtattagaatcgttttatttgtatttacgttattttttattgtttaattagattttggatatcgaacgcggcgtttgagggtcgtgtttataaatatcgtattttttattttttagttttgtttgtttatttggcgagatttggagttgaggttatttggagttgtttaatattgaagagttgttgagtattggaaagtgttgtgtaattttggaaaagaatcgtgtaacgttgtagaagtgtgtggtagttatgtcggaggtgttatttaaaggtgttattatttttaagaagggttttaagaaagttgtcgttaagatttagaaaaaggaaggtaaaaagcgtaagaggattcgtaaggagagttattttatttatatttataaagtgttaaagtaggtttattcggatattggtattttttcgaaagttatgagtattatgaattttttcgttattgatatttttgagcgtatagcgagcgaggtattacgtttggtttattatagtaagcgttttattattttttttagagagatttagatagtagtgcgtttgttattgtcgggagagttggttaaatatgttgtgtttgagggtattaaggttgttattaagtatattagttttaagtaagtttgttaagtaaacgttatttttaatttaaaggttttttttagagttatttaaatatattgaaatagttgtgggtttcgtttttgtgtagtttttaatcgtaagggttttttttttttttgaggcggagttttatttttttaggttggagtgtagtggcggaatttcggtttattgtaagttttgttttttgagtttacgttatttttttgttttagttttttgagtagttgggattataggtttttattattatattcggttaatttttgtatttttagtagagacggggtt

SEQ ID NO: 1965 - DNA, 2405 bp, Artificial Sequence
  chemically treated genomic DNA (Homo sapiens)
aatttcgtttttattaaaaatataaaaattagtcgggtgtagtggtgggagtttgtagttttagttgtttaggaggttgaggtaggagaatggcgtgaatttaggaggtagagtttgtagtgagtcgagatttcgttattgtattttagtttgggagagtgagatttcgttttaaaaaaaaaaaaaatttttacggttagaaattatataaaaacgaagtttatagttgttttagtatgtttaagtggttttgaaaagagtttttgggttagaaatgacgtttatttagtaggtttatttggagttggtgtatttagtgatagttttggtgtttttagatatagtatgtttagttagttttttcggtagtagtaagcgtattgttgtttgaatttttttggaagaaatggtggagcgtttgttgtagtgagttaaacgtgatgtttcgttcgttatacgtttaaagatattagtgacgaaggaatttataatgtttatagttttcgaagagatgttagtgttcggatggatttgttttagtattttgtagatgtaaatagaataattttttttacgggtttttttgcgttttttgtttttttttttttgggttttaacgatagtttttttaaagttttttttggaaatggtagtatttttagatgatattttcggtatagttattatatatttttgtagcgttatacggtttttttttagggttatatagtattttttagtgtttaatagttttttagtattaaatagttttaaatgattttagttttaagtttcgttaagtaaataaatagaattggaggatgaaagatgcggtatttataggtacggtttttaaacgtcgcgttcggtatttaaaatttgattggataatgggaagtggcgtgaatgtaaatgaggcgattttagtacgattttttgattgggtagacggttattagttaattagatagtaaatgttaattttagttagattataaataggtttagtagtagttttagaaatgtggttttcgtgttgttgtaatttgatgcgaggagatgtttggacgagggaagtagggaggaaaagtacgcgttaagtttaagtttcgtttttttagagcgggtttgtagtttttcgtaggtcggatttatcgtttgtttcgtaagggaaattatgtagagcggataggggtaggcgtattagtgtatttggcggtagtgttagagtattttatagtagaaatttttgagttggtaggtaatgcgtttcgcgataataaaaaaattcgtattatttttcgttatttgtagttagcgattcgtaatgatgaggaatttaataagtttttgggcggcgtgattattgtttagggcggagttttgtttaatatttaggtagtgttgttgtttaagaagattgagagttattattataaagtttaaagtaagtaatttaaggttgttattggtaaaaagatttttgtgttagaaaaaataaaaggttttttttagagttatttatcgttttagaaaaaggttgtacgttataaaacgttattgttgttaattagttattttatttgtttgttataaatgttcgtttaagcgtatttcgggaatgtacggggattgaatttttaaggagcgttttatcggttattagtttgaggtaattttggttatatatgttattgggcgaggtggtttaacgtttgtgagtagttagtatttgtattttagtggaggttggagcgggagggtcgtttaagtttggggtttgatcgttaatataattgagattttgtttttatagaaattagttgggtttggtgatgtaggtttgtagttttagttgttcgggaggttgcggtgggagggttgtttatgagttcgggaggcgaaagttatagtgaacgaagattgattgttttattgtattttagtttgggtgatatgagcgagattattttaaattagatttatgtatgttagttatgttaagggttatatatggaagtgaaaattgtattataagtaggagaggtgtaatttttttgtttaaatttaggtaatattagtttggttggttaaagtatattttagagaatttttttttaaatatggtagttttacgaaatatttataattaaatgtggtatgtaagtaagttaattttaaaatttgggtaagtatatatatttgatatttgtggttttacgtattttgtaaagaataatagaattattttttaaaatgtaagtaaaatatgttaaaaagaagttttacgttatatgtgatggtgagatattagtgttagatttaggtaggaatgggattagaaggtcgaatataatttgaagtttagaaatttggaagagtatatgttttaaaagttttgattg

SEQ ID NO: 1966 - DNA, 2500 bp, Artificial Sequence
  chemically treated genomic DNA (Homo sapiens)
tagtgtttattaaattttatattggattaagtgtttatttttttgttttttatgtaagggttgttaaatataattaataaattttagtgattaattgggttaaatgagagatgtaataaattttttatttttttacggaatttaaataatgttttaaatttattaagtaaggaggtaagtttatttgattattttttttataatttaatgtagtaattattaaattgttaacggatatattgttgtaatatttgatgtagtaatttgaaatagtattttagtaaaaattatatttagatatattttttttttaaagaaaagtagttttaatagaagtttttatagttttaataaaattattggtttgttttaattttattttaggagggttgtgaggaaattataaatatatagaattgaagtagaggtattggtttaagtttaattttagaaagtatttttaaattattaatagtttggtttgtattgtaaatagtaaatgtgttaatgttatgtttatttagaaattattttaaattgtatttattgataattaaattagaatttaaataatgtattatttaatagtttcgaaatatttaatttaatatggagtgtagtaggttttgataggcgttgggaatttagttaatgatttatgaggttattatttagtatttttagtaagaagaaggttgtattttaatgtttttttgtttggatttgttatttagtttttttttaattaggatagggtgtatatataatttttaggttttatttgtgtttataaaattcggttaaaatgattttagtgtgttttttatatttttttttatattttgaggatatttaatgagtttttttggttgtatttaatattatttttaggatagggagaaatttttacgttagatttagcgatggaagtagattttttagtaattgagatagtttattgtcgtcgagaggaagatattgttaatggtgatattcgtttgatttatttgtgttggtggaaatggtaatgtaggtattgtttgagggagttttagaaattattgttttggggtagaattcgtaattattttgtgtggttttttaaaacgttttttatttttcgttttcgaataaaatgtttttataaggaaatattagggagaattcgggtttatcgattgtatgttttaggtattttttttggggtaggtaagtagggggttgtgttttttttcgcgttggttgcgcggttttttatcgggattttttcgatggcgtgaggtaaggagtggatcgagaggttttcgagttttgagttgagcgcgtgtgggtcgtgtaggaggttttcgtgtcgtttgtagtttttgcgaggatttaggttcgatagttggtgaggtagttttcggtgcgtgtgtaggagtttagatttttggttttgtttttggtcgggttagtttgggtgttgcggttgcggttgggcgtgtagggggtttaggttgtaggggtcgttgacgtgggagtaaggattttgcgattgggggtagataggttggtagggtggggggaagtatgggggttggaagtcggtattgggggtgtgggatagcggcggggcgttcgtgtagggagattgatttatagtgtttagttggggtaatcgtgtcgtttcgttgttggtgtcgtcgtgacggttttagaagagagcgagaggaaaggtaaagaataaggaattaggcgtcgagttataattatttatataaaatttatttgataagtttgcgtgggaaatcgttcgttttcgttggttggtcgtcgggaaaaaattagttttaagttttttttaggaaatatttttaagtgaaatagatcgaataacgtagagaaattgtatatggagggggtataagagattatttaggggttttttttaaagagaggaaaagatagaaaagggttttttggaatatagtttattaaattgtagcgtgaaattttttttaagtaaaattaaaattttttttaaatattaaatagtagaagcggtttttttttttttttcgatttgaatttgtttgttattgcgttattgtttatttttttttatttatttggagagaaaaaaattataaacgtttaaagattgttatcgttttatgattatttaaatagaaatatatttcgtagaggggttgtaataaaaatatacgtttaaattattagtttaaagaaggttttaattgtaggatcggggtttgtttttttcgttttttttgttaggagtttttttttcgatagagtcgatttatggtttggatagggaaagggggacgttaagttaaggtttaaaatagaaagatttagttttattgggtttaaaagagagaggtgtatttcggggttgtggtttttttttttcgttttttttattttagttttaaagggtagaagaaacgtttgattttaggtttttttattgtaatttttttgtaaaataagcgaa

SEQ ID NO: 1967 - DNA, 2500 bp, Artificial Sequence
  chemically treated genomic DNA (Homo sapiens)
ttcgtttgttttgtaagggaattgtaatagagaaatttaaagttaggcgttttttttgttttttggggttggggtggaaggggcggggggggggggttatagtttcggggtgtattttttttttttaaatttaataaggttgaatttttttattttaaattttgatttgacgtttttttttttttatttaaattataaatcgattttgtcgagaaaaaggtttttaatagaggaagcgaaaaagatagatttcgattttgtagttaaaattttttttaagttggtaatttaaacgtgtgtttttgttatagtttttttgcgaaatatgtttttatttaagtagttatgaaacggtaatagtttttgaacgtttatgatttttttttttttaaataaatggaagagaataaataataacgtagtggtagataggtttaaatcgggggaaaagaaaaggtcgtttttgttgtttagtatttaggaggaattttaattttgtttaagagagattttacgttgtagtttaatgggttgtgttttaggagatttttttttatttttttttttttttgaaagaaatttttaaatagttttttgtgttttttttatatatagtttttttgcgttgttcggtttgttttatttgagggtattttttgaaaagaatttagagttgattttttttcggcggttagttaacgggaacgggcgattttttacgtagatttgttaagtggattttgtgtggatagttgtagttcgacgtttgattttttgttttttattttttttttcgtttttttttaggatcgttacgacggtattagtaacgggacggtacggttgttttagttgggtattgtaggttaatttttttatacgagcgtttcgtcgttgttttatatttttaatgtcgatttttagtttttatatttttttttattttattagtttatttatttttagtcgtaagatttttatttttacgttaacgatttttatagtttgaattttttgtacgtttagtcgtagtcgtagtatttaggttggttcggttagaggtagagttaggagtttgggtttttgtatacgtatcgggggttgttttattagttgtcgggtttggattttcgtagggattataggcggtacgaggattttttgtacggtttatacgcgtttagtttaggattcggagatttttcgatttattttttattttacgttatcgaggaggtttcggtaagaggtcgcgtaattagcgcgggagggaatatagttttttatttatttattttagaaaggatatttggaatatatagtcggtgggttcgggttttttttagtatttttttataaaaatattttattcggaggcggagagtgagggacgttttgaggaattatataaagtagttgcgagttttattttagaataatggtttttggagtttttttaaataatgtttgtattattatttttattaatatagataaattagacgaatgttattattaataatatttttttttcgacgatagtaaattgttttaattgttaaaagatttatttttatcgttgagtttggcgtggagatttttttttgttttgggaatgatgttaaatgtaattaaaagagtttattaaatgtttttaaaatgtaaaaggaagtgtaaaagatatattaagattattttaatcggattttataagtataagtgaaatttaaaagttatgtgtatattttattttgattaaagaaaaattaagtagtaaatttaagtagagggatattaaaatgtagttttttttttattaggggtgttaagtggtgattttataaattattagttaggtttttaacgtttattagaatttgttatattttatattaaattaaatgtttcgagattattgggtaatatattatttgagttttaatttagttattaataaatgtagtttaaaatgatttttaaataagtatggtattagtatatttattatttataatgtaaattaggttattgataatttgaaaatattttttggaattaaatttaaattagtatttttgttttaattttatatatttatggtttttttataatttttttgaaatggaattagagtaagttaataattttattaaagttgtaaaggtttttgttaaagttgtttttttttggagaggaaatgtatttggatgtgatttttattaaaatgttattttaaattattgtattaaatattgtagtagtatgttcgttgatagtttaatgattattatattagattgtaaggaaaatggttagatgaatttatttttttgtttggtgaatttaaaatattatttaagtttcgtaggaaaatagaaaatttattatattttttatttggtttagttagttattgaaatttgttggttatgtttagtagtttttgtatggaaggtaggaaagtgggtatttgatttagtataaggtttagtgagtattg

SEQ ID NO: 1968 - DNA, 2475 bp, Artificial Sequence
  chemically treated genomic DNA (Homo sapiens)
ggggggttgtaaggtttttttttttttacgaggtcgtattttaggttgttttagtggggggaaatttggataatatttaggtttttttgggtaggggtttttgcggtttttcgtagtgtattgtgtttttagttaatagagaatggagaatggcgatgatttttataaagtatattgtttgtaaatatatttttattaaggtatattttgtatagttttagatttattaaattttgatttaatatagtatatgtttttgtgagtataaggttgggataaaagttatagattaatagtattttaaagtagaataaaatggagttttttatgttttttgttttttatatagatatagtaataatttgattttttttttttttttttatatttattttattatatgatattaatattgatttttttatgtaaaatgttagttttaggttttttttatttttgtgttttgtttgtgtttttaagggtgtaattttttgttttttttttttatagttagtgtgtgtgtgtgtgtgtgtgtgtgtgtgtgtgtgtgtgtgtgtgtgcgcgttatattttgatatattattagaatttaaattaatttattttgttatatttttttgttattgataattttttatttagttatgttataaatgtattttttaaagtaagtgtttgaagagatagggttttattgtcgtttaggttggagtgtagtgttgttattatagtttattgtagttttgatttttttggtttaagtaattttttcgttttaattttttgagtagttgagattatacgtgcgtgttattatgtttggtatatatttattttttattatttgtgtttgtatgtgtttagaggtatagataatattaaaatgaaaagaggtggtagagaataggaagagaaagaaattagaggagtcgatatttttaaatgttgtggtttttaaggattgttagtaggttgtggggttagttagaaaaaatagagtttttgattttagaaggtttggagaaagcgtgagaagggagattagattagaatagattgatggaagggaaaggcggtgagggtgaagtaagagaaattcggttttagtgaaaaggatttattattgtattttagaacgtaatttgtattttatatgtaaatgaggaggttttttagaggttggattgggttgggtttagttgagtttttgtaaatagtagggatttaattttggggaattgtagattaaagtgagagagggacgtatcgtatttttaggtatatttaaaaaggatggacgagatatcgaagtagaggatataggaggattaaaggatttaggaaagtaagtagtttttcggagaagttgtcgaaatttaagattggtaagagaagtaaatttaattttttatatcgattattttttattttttgaaaagaagagattgtttttttagggaagtgaaaataatgaatttttggaggtattgtttttttgtttttattttgtttagcgtggttatttttgtgagattttatagtagttaattgagttcgttaaaaagttatgagaagttgaatagttttagtgaaaggtattttaggaaaattgtttgtaattacgttttagagaaaatgttagtttttttgtgggaaaatatattattattatttttgcgaagtgttttttgtaaggattatttgatttagaattattatattataagttttttgtcggaagaagaggttgtattttttttggtttatgttatggttatttataaggattttgatatttttgaaaggttttttagggttatttatatgttttaaaatgtttattgtgtttacgtggatgagaaagttttagttgagtataaggaatttgtgaggtagttattgagttgtttttaaaatgtttttattgttttaaagatagagtttgtggtttatgtaggtatttttagattttaggttgatttgaattgtttgaaagattttgtcgtttttgaggttttttggaagtacgttattaatatttgtggataagatttttttttgaaaattaatcgggagatagtttagtatttgaaaggatttaaagggaaaaatattattttaggggtgttgttttttgattatgtaattaagcgaattaaatatgtttattaagagtatatagataaaggtggtttttttgtgaaaaatattaatattttgaaaattttatttttatattagttgattatttattttggtattgtttatgtggcgtttattagagattttgtcgattttgttttacgtgattaaagggttattgatttattataatggttaaaagatatttatagttttgatgagtatttttgggtgatatttaatagggttttaggtaggtattaatttttattttgattgatagattgagtttgttaatattttgttcgtttagagaattgatttatttgaaat

SEQ ID NO: 1969 - DNA, 2475 bp, Artificial Sequence
  chemically treated genomic DNA (Homo sapiens)
attttaaatgagttagttttttaggcgagtagaatgttagtaaatttaatttattaattagaatggaaattagtatttatttgaaattttattaagtgttatttagaaatgtttattaggattataggtattttttgattattgtagtagattaatggttttttggttacgtagaataaagtcgataaagtttttggtaagcgttatataggtagtgttaaagtagatggttagttgatgtggaggtgaagtttttaaaatattagtattttttataaaaaagttatttttatttgtatgtttttggtggatatatttagttcgtttaattgtatggttaggaggtagtatttttggggtgatatttttttttttaaatttttttagatgttgaattatttttcggttggtttttagggggaagttttgtttataggtgttgatgacgtatttttagggaattttagaggcgataaggttttttagatagtttaggttagtttggagtttggaaatgtttgtataaattatagattttgtttttgaagtaatgaaagtattttggaagtaatttagtaattgttttatagattttttatatttagttggggtttttttatttacgtgaatatagtagatattttggggtatatagatagttttaaagagttttttaaaggtgttaaagtttttatggatgattatgatataggttaaagggaatgtagttttttttttcgataggggatttgtgatgtagtgattttgggttaggtaatttttgtaagggatatttcgtaaaggtgatggtaatatatttttttataaaaagattggtattttttttaaggcgtgattataggtagtttttttaaaatattttttattggaattgtttagttttttataattttttggcgggtttaattggttattgtaaaattttataaaaatgattacgttgagtagagtgaaagtaaaaaagtagtatttttaaaagtttattatttttatttttttggggaaataattttttttttttagggaatgagaaatgatcggtgtgagaggttgaatttgttttttttgttagttttgaatttcgatagttttttcggagggttgtttgtttttttgaattttttaatttttttgtattttttgtttcggtgtttcgtttattttttttggatgtgtttggagatgcggtgcgttttttttttattttggtttgtagttttttagggttgaatttttgttgtttgtaaaggtttagttaagtttagtttagtttagtttttaggaagtttttttatttatatatgaaatgtaaattacgttttggaatgtaatgatgggttttttttattggagtcgagttttttttgttttatttttatcgttttttttttttattaatttattttgatttgatttttttttttacgttttttttaagttttttagaattagaggttttgttttttttggttagttttataatttgttggtagtttttaggagttatagtatttaaggatatcggtttttttggtttttttttttttttgttttttgttatttttttttattttagtgttatttgtatttttgggtatatatagatatagataatgaaaaatgaatgtgtgttaggtatggtggtacgtacgtgtagttttagttatttaggaggttgaggcgggaggattgtttgagttaaggagattaaggttgtagtgagttatgatggtagtattgtattttagtttgggcgatagtgagattttgtttttttaaatatttattttaaaaaatatatttgtaatatgattaagtagaagattattagtggtagaaaaatataataaggtagattaatttagattttaatgatgtgttagaatatagcgcgtatatatatatatatatatatatatatatatatatatatatatatattgattatgggaagagggaataaagaattatatttttgggggtataggtaggatataagggtggaaggaatttaggattgatattttatatgaaagagttagtgttgatattatatgatgaagtaaatgtggggaaaagaaagagagattagattgttattgtgtttatgtagaaaatagaagatataagaaattttattttgttttgttttgagatgttgttaatttgtaatttttgttttaattttgtgtttataaaaatatgtgttgtattgaattaaggtttaatggatttagggttgtgtaggatgtgttttggtaaaaatgtgtttgtaggtagtatgttttgtaaaagttatcgttattttttattttttattaattagagatataatgtattgcggaaggtcgtaggaatttttgtttaagaaagtttgggtattgtttaggtttttttttattgagataatttgagatacggtttcgtgggaagggaaagattttatagtttttt

SEQ ID NO: 1970 - DNA, 2426 bp, Artificial Sequence
  chemically treated genomic DNA (Homo sapiens)
ttaatttttgtatttttagtagagatggggttttattatgttgtttagaatggttttgattttttgattttatgatttatttgttttagttttttaaagtgttgggattataggtataagttattgtgtttggtttaagggataatttttaagattttttgtggatgtcggatattatcgttagtattaaataatttgattattattaattagaatttatttttgtttttattttttatttataattgtaatgttttttttattttaattaagtatttattatatattatggttataatttttgtagtttgaggtatgatagtaaaattagtatatattttattttttttttttatatttttatagatggaagagttttttttattatagattatagtaatttcggtatatgatttttttttttttttattaagttaagaatttttattttgattttttatttaaaggaagtattttatagtttttttttggtatatttaaatttttaatattattatttttgtattttggggttgttgttaagtaaaataagggtgatttgaatataagtattgtaatattaggatattcgatttgagatttgagttaattacgatgtaattaatagtcggggattgtgtatagtatgggtatattggataagaggataattttattatattattgagaatggtatgtagtttaaaatttatgaattgtttatttttgaaattttttatttaatatttttggatcgtggttgattttaggtaatagaaattaaggataagtggggggtattatatatatatatgtatatatgtatgtttatttgtatatgtgtgtgtatatgtatatatgtgtatttttatatatatatatatatatataaagatatagaaggatatatagtagggattttaaattggtggtttttgaagtggaaattaatatttaaaatttttttgatttttgaattcgtttatatttgattttgtattttttattattttatagatttagatatttttgattttttaatgttaaagtttatatatttgtattaatatttatataaattaatttattttatgtatatatttatattaattttattattatttaatttatatttatattaattgtttggttttataagtatttagttcgtgattttgaatatgtttaggtattaattatggttttttttaggttatgagtcgtttttaatttttttttttttttggtttgttttgtttaattttgttaaaataaataaatatggtttttgtaataatggagaaagacgttattttaattaaaaagtaataataatgtggtttgtggttttttgggttgtttgggttacgttttattggtttttattgagtttggtttttttgggttgttgttttttttgtttttttagtttgttttaaatgtgtcgttaagtgagcggttggggtttttttttttttttgtgattggggtttagtgagagttggcggttggatattgtttgaagaatgggttttttttggaagcgtttggaaatttagttggggtttgaggtttttttaaacgttgaatttaagcgtggggatttagtttttggaaatgttaattgttttattttgattgggattgttgatagatatattgttttatgttaatgtggtattattataatatagttttatttttagttattgtaagttattaagataatatttggtttgaatttttttttattatggtttaaaaaaataaaagttgaaatttaaattatttttttaatattttgttttttttttttttttttttttttttttttttttttttgtattttagaaattttaaatgagggggaggagtttagaaattgtttattttatgtgtttttttttttattttatagatggggacgttgaggtttagggaggagtagtgatttgttatattataaattttgttaaggtaagtagtttaagttttttaggttttttatttgtaagttaggatggtattgatttttttttatattatttttaagggatttttttaaggggtagataggatggggtatggtgattagtaaggagtttaggtaagtattagttgttgttatcgtttaagggtttttagttaattggtagtagaattaggtttttttagaatttgagttttttgatttttaatggtaatgtattttataatttattcgggaggaaggattaagattataatattaatattttttaacgtgttggatgttttattaagtgttttatgaatagtgtaatattatagaggagagtaacgtgttggagtttagttacgattttgagtaagtatattatttttgaaatttttttttatttgtgaaaaatggaaatagtaatggggtaacgagattgttaagagga

SEQ ID NO: 1971 - DNA, 2426 bp, Artificial Sequence
  chemically treated genomic DNA (Homo sapiens)
tttttttaataatttcgttattttattattgtttttattttttataagtggaaagaggttttaagagtgatgtgtttgtttaaggtcgtagttgggttttagtacgttgtttttttttgtgatgttgtattatttataaaatatttagtggagtatttagtacgttagaagatattagtgttatgattttagttttttttttcgagtaaattgtagagtatattattattggaaattagaggatttagattttagaaagatttaattttgttattaattaattagaagtttttggacggtggtaatagttaatgtttgtttaggttttttattgattattatgttttattttgtttgttttttgagggggttttttaaaggtgatgtggggagaggttagtgttattttggtttgtagataagaaatttgggagatttgagttgtttattttaataaggtttgtgatatagtaggttattgtttttttttgggttttagcgtttttatttgtaaaatggggagaagggtatataagatggataatttttaaattttttttttttatttgaagtttttggagtgtaaaagaaagagaaaagggagaggaagaaaaaagagagatagagtgttaaaggagtggtttggattttagtttttatttttttaggttataatgagaaaagatttaaattagatgttgttttagtgatttgtagtagttgagagtggaattgtgttgtgataatattatattagtatgaagtaatatatttattaatagttttagttagagtaaagtagttggtatttttagggattgagtttttacgtttgagtttagcgtttgaaaggattttagattttaattgggtttttaaacgtttttaggaagggtttattttttagatagtatttaatcgttagtttttattggattttagttatagggaaaggaagggattttagtcgtttatttggcgatatatttgaggtaggttggggaggtaggaagagtagtagtttagaaaagttaggtttagtgggggttagtggagcgtggtttaaatagtttagagggttataggttatattgttattattttttaattaaaatggcgtttttttttattattataaaagttatgtttgtttattttagtaaaattagatagggtagattaggaaaaagaaaaaattaaaaacgatttatgatttagagagaattatagttaatgtttgggtatatttagagttacgaattaaatgtttatggggttaggtagttgatataaatgtgaattgggtggtagtaaaattaatataaatgtgtgtatagggtgagttaatttatataaatattaatataaatatgtgaattttgatattaaaaaattaggaatgtttgaatttgtgaagtaatggagaatataaagttaggtgtaaacgaatttaaaagttagagagattttaaatattgatttttattttaggggttattagtttgaaatttttgttatgtatttttttatatttttatgtatgtatgtatatatgtaaagatatatatatatgtatatatatatatatatatagataaatatatatatatatatatatgtatataatattttttatttatttttggtttttgttatttaaggttaattacggtttaaaaatattaaatggaaaattttagaaataaataatttataagttttaaattgtatgttatttttagtagtgtgatgaaattatttttttgtttagtatatttatgttgtatatagttttcgattgttagttatatcgtagttggtttaggttttagatcgaatgttttggtgttgtagtgtttgtgtttaagttatttttattttatttagtaatagttttaaagtgtaagagtagtgatgttgggaatttggatatgttaaagagaagttgtaaagtgttttttttaagtgaaaagttaagataaaagtttttgatttaatagggaaagaaaaaagttatatgtcgaggttgttatgatttgtggtaagaaagatttttttatttatgaaaatgtgaagaaggaaaatgaaatgtatgttaattttgttgttatattttaaattgtaaaagttatggttatagtatataataagtgtttggttaaaatggaaaaggtattataattgtgggtggaagataggaatagaaatgagttttgattgatggtaattaggttgtttggtgttagcggtagtgttcggtatttatagggggttttagaaattattttttgagttaggtatagtggtttatgtttgtaattttagtattttgggaggttaaggtaggtggattatgaggttaagagattaagattattttgggtaatatggtgaaattttatttttattaaaaatataaaagttaa

SEQ ID NO: 1972 - DNA, 2422 bp, Artificial Sequence
  chemically treated genomic DNA (Homo sapiens)
ttgtttaagggttataattttttatggttttaggttttttatatgtaaaattaggataataatgttttttattttatgaggttatttaaaggaaacggtgagattatgtgttttgatagaatatattttaaagtttttattatggtttttgatatataggaggtgtttaggaaatattaggtattattgttattgtaataattaggaaaatttttgttattatttatatgtgatagaattgagggatattagatttggaaagtagttgggttattgttttggatgatttgtttattttatgtttgaggaaattgaggtttagtatgtttgtttaagtttatatagttaattagtggtggagttaagaatagtatgagtttatattgaaaggaggttagttgtgtttatattaattttatttaatttttttaattaagttgttgatttttttagtgacgttatttatttgttttagaaatgagttatataagcgcgtttttttttattatttatttgttttttttgagaagagtatcgggttgttttaaaataagtaaagattcgagagaatatttttgttttattgtttttgttttttgttgttgatttatttatttttgggtttttgagttcgtttatattaattatttatttttagaagaatatattgcgttcggttttataggtttcgtgtagttggagttttgtaatgttatttttgggaggttttattgtaatgtaaggaaaggttattgttaggtttttttttttgtatagagtatggtatttagttaatgattatgtttagttaaaaatttttttggtttttaaaatttaagttaggtaattttaagaggaacggtatttaaatagatgtgttttttaattatatagttttaaaataattggataaaaagaatatttgttttatttttttattattaggtatttaaatttagttttaaataggtatataaatagttgggtattttaggttgatgatatttatttttagggtaagtggttaattttttttttaagttcgaataataaatgtttaattatttttttattttttttaaatagtaatgtgttttgtatttagtttgtgtttgtttgtcggtgtagagttgatattatttgattttattttatagagattttgtgtttgttagatgtttaaataagtggttgatttagggtaaaaatattagttaagttatttgttttatttagttaaagaattagtgtaggtaaagtaggcgagttagtagtttagcgtaggtaaagttgcgtgttttcgaatgatttttttagtcgttatttttgggagggttgggtttttggggtatttttaaaggaattgttttgggtttaaggtaatatttttttttagtagtttttttttttttatttttagtggttattttaattattttaataggtaattttaaagttagttagaagtaattttagtttattaagtttgaatgtgaaaaggagtaagtaaagatttgagtttttttttgtttttttttttatgagtaatatgtgattttttaaaaattattgtagtaagaatatttaatatgaaatttatttttttaataaatttttaagtgtatatgagtttttaaaataaaataatttgattttttaatgatcgttattttaattggcgtgagatggtatgttattgtggttttgatttgtatttttttaattattagtgatgatgagtttttttttatatgtttgttggtcgtataaatgtttttttttgagaagggtttgtttatattttttttttagtttttaatggggttgttttttttttgtaaatttgtttaagttttttgtagattttgtatattagttttttgttagatggatagattgtaaaaatttttttttattttgtaggttgtttgtttataatggatgttagagaggatgtggagaaataggaatatttttatattgttggtgggagtgtaaatgagtttaattattgtggaagatagtatggtgattttttaaggatttagaattagaaatattatttgatttagtaattttattattgagtatatatttaagggattataaagtattttattatatagatatatgtatatatatgtttattgtagtattatttataatagtaaagatttggaattaatttaaatgtttattaatgatagattggataaagaaaatgtggtatatatatattatggaatattaagtagttataaaaaaggatgagtttatgttttttgtagggatatggatgaagttggaaattattatttttagtaaattaataaaggaacggaaaattaaatatcgtatgtttttatttataaataggagttgaataaatgagaatatatggatatagggaggggaatatcgt

SEQ ID NO: 1973 - DNA, 2422 bp, Artificial Sequence
  chemically treated genomic DNA (Homo sapiens)
gcgatgtttttttttttgtgtttatgtgtttttatttgtttaatttttatttatgagtgagaatatgcggtgtttggtttttcgtttttttgttagtttgttgagaatgatggtttttagttttatttatgtttttgtaaaggatatgaatttatttttttttatagttgtttagtattttatggtgtatatgtgttatattttttttatttagtttattattggtgggtatttgggttggttttaagtttttgttattgtgaatagtgttgtaataaatatatgtgtgtatgtgtttgtatagtagaatgttttataattttttggatatatatttagtaatgggattgttgggttaaatggtatttttggttttagatttttgaggaattattatattgttttttataatggttgaatttatttatatttttattaatagtgtaaaagtgtttttatttttttatattttttttggtatttattgtaaataggtaatttatagaatgggagaaaatttttgtaatttatttatttgataaagggttaatatatagaatttataaggaatttaaataaatttataagaaaaaaataattttattaaaaattgggagaaggatatgaatagattttttttaaaagaagatatttgtgcggttaataaatatatgaaaaaaagtttattattattggtgattagagaaatgtaaattaaaattataatgatatattattttacgttagttagaatggcgattattaaaaagttaggttgttttgttttaaaggtttatgtatatttaaaaatttgttaagagggtagattttatgttaggtgtttttattataataatttttaaaagattatatgttatttataagaaaagaaataagagaaagtttaggtttttgtttgtttttttttatatttaagtttgataaattaaaattgtttttggttggttttaaggttgtttgttgaagtagttgagataattattggaaatggggaaggagaagttgttgagagagaatgttgttttgagtttaaggtagtttttttaggagtgttttaaaagtttagtttttttaggaatgacggttggaaagattattcgaggatacgtagttttgtttacgttgggttattgattcgtttattttatttgtattgattttttaattgagtgaaataaatggtttgattaatatttttgttttgaattaattatttatttggatatttagtaaatatagggtttttgtgaaataggattaggtaatgttagttttgtatcggtagatagatatagattggatgtagagtatattattgtttaggaaaaataaaaagatgattaggtatttattattcgagtttaggaaggaaattagttatttgttttgagagtggatattattaatttgaaatgtttagttatttgtatatttatttaaaattgagtttgaatgtttggtagtaggaagatggaataaatgttttttttatttagttgttttaaaattgtgtggttaaaagatatatttgtttggatgtcgttttttttgggattgtttgatttgaattttaaaaattaaaagggtttttagttggatatgattattagttgggtattatgttttgtgtagaggggaggatttgatagtggtttttttttgtattgtaatgaagttttttaggggtggtattgtagagttttagttgtacggggtttgtgaggtcggacgtagtgtgtttttttgaggatgggtgattgatgtgagcgagtttagaggtttaggagtaaatgagttagtagtagggagtagaagtaatgaaataggggtattttttcgaatttttgtttattttgggatagttcgatattttttttagagggagtaaataaatagtggagggagacgcgtttatgtaatttatttttaaaataagtgggtgacgttattgaaggaattaatagtttaattaaagaagttaaatagaattgatgtaaatatagttggtttttttttaatgtagatttatattatttttagttttattattaattaattgtgtgaatttggataagtatgttgggttttagtttttttaaatataaaatgagtaggttatttaaggtaatggtttagttattttttagatttaatattttttaattttattatatataaatagtggtagaagtttttttaattgttgtaatgataatagtatttaatattttttgagtattttttatgtgttaagaattatgatagaggttttaaaatatattttattaaaatatatgattttatcgttttttttaaataattttatgaggtagagaatattattattttgattttgtatgtggagaatttgaggttataaaagattatggtttttggataa

SEQ ID NO: 1974 - DNA, 2365 bp, Artificial Sequence
  chemically treated genomic DNA (Homo sapiens)
aatgtaattattaatgttatttgttataggtttaaaatattttattatttttaaaaagaaattttgtatttattaaatagttatttgtatttttttttgttttaagtatttggtaatagataatttgttttttgttgttatggatgtatttgaatatatatttttaaataattgaaaataggtatttaaataaatatttgtatatgaacgaagatttaattttaaatgggtaattttgaaaaaaattagtttgtaggttagttaattttagaaagtgagtttataaagaataggttgggtggttataatgtttattgaatttattaaaatttgtttttattttgtattttagtttagattgtttttagtgttaaaagtagaattagaagattataatggtttttagaaataagatgaattaatatgaatggtgagttttgagtgagttaggttataatttttagtaagaaaaatatagaatttaaattttattgtttttagtttttgttttaattgttttataattgggaaattttgtttttaaatgaatattattggtaaataattttttttaattgaaggtttaaaatgtttgggtaaaattaaaaatgattttttatttaaggtttagtaatagttaaggtatttaaataggagtaggttgaagaatcgtttttaggtttggttttagtaaatttgtaattatttatttttttatttagatttattttgaataaagtaaagggtaattaaagtgtattaatcgtttattgatgatttaagataaataaaaattttataatttttgttttaaatagtgtgtattgagatatatagagagagagagaaaaaaaaaatagttttttttaggtggtgaataattatttatttattagattttttttaagttaagagttttattgtttatgttaggtttttggatatcgtatataaaataaattaagttttattaatttagtggaatatttggaaatattaattttataggtgtatgagagaaaattgtagttttaagtattagagtattattaaatataatatatttcgtatgtaggggtagttatttaatattaaattaataaaatattattagtgtcggtgagagttttggttgttgatagtaggttaggtgttttatagttatgtcgtttttttgtttgtaggttaattttatatagttgtttttttttggaaattatgttttatttgaagttttcgtaagtatgataaatagtttttttaagttttagcgacggtggagaaatttgaaaatatttaggagtatttattaattagaatatgaaagaagatttagtttaattgtagtttttgattgtgtggaggttttgttattgtaagaaatgttatttgtttgggcgtgtatattttttgtaggatattgtgtaaaattattattttgagggtaaagttaagtttaaattgtatagaaattttaacgttgatttataagtggataaaattagaattaagtttttatttttaaatttagttgtttggtggtattgttgatttatatgttgttattttacgtattataaatgttagatagagttttttgtatagggagttttaaatttgtgtaggaatttaggatttataggaaaaagatatagaaaaaaagaaagattaggtgttaattgaattgtttaaattaggtttgtaatatgtaaagtatattgagattaaagttaggagaggtggatttagttgttggagtttgggatgaataatggaggaagggaggatataggtaattggtaggggttaaggatggggtggggtggttttgtgtatataatatgatatattttgagaaaaagtgaattaatatggttaaagtggagagtttatgaaaagtttatggaggtaagtagaaggagagaaatgtagatatattgaatggttttattatagaggtttttgaatattaggataggatatagattttttatttaattataggaaatgtggggtgatgagggttttgggaatatgagtgtgatataagaaggaagggtttggggaaattttattataatagttttttagattaattgatatggagagaattgagaaatgtttagtatgtttagaggattgagtaatgagagatttgtacgaggttggaattggtagtgataaaaaggaatggaatgttttaaagaattatttgaaagagagaaatattttgaaggaagtatttataggatttgagaatttattgggtgtagagagtgacgtgtgggtaggtttaggcggattttgggattttgagtttaggttatttaaataataaaataagaaaatttaaagagtaaattga

SEQ ID NO: 1975 - DNA, 2365 bp, Artificial Sequence
  chemically treated genomic DNA (Homo sapiens)
ttagtttattttttgagtttttttattttgttgtttaagtggtttgggtttaaagttttagaattcgtttgaatttgtttatacgttattttttatatttagtgagtttttaggttttataaatattttttttaaaatgttttttttttttaaatgattttttaaaatattttatttttttttattattgttaattttaatttcgtgtaggttttttattatttaattttttaagtatattgggtattttttaattttttttatgttaattaatttaagaggttgttgtaatggaatttttttaaattttttttttttatgttatatttatgtttttaaagtttttattattttatattttttgtagttaaataaaagatttatattttattttggtgtttaagagtttttgtaatgggattatttaatgtatttatatttttttttttttatttgtttttatggattttttatgaattttttattttagttatattggtttatttttttttaaaatatgttatgttgtgtgtatagagttattttattttatttttagtttttgttagttgtttatgttttttttttttttattatttattttaaattttaatagttgggtttattttttttgattttagttttagtgtgttttgtatgttgtaagtttggtttgaataatttaattagtatttagtttttttttttttttatattttttttttataaattttaaatttttgtatagatttgaagttttttgtataaggagttttatttgatatttgtgatacgtagaatggtagtatgtggattagtagtattattagatagttgagtttgaaagtaaagatttgattttaattttgtttatttatagattaacgttagaatttttatgtagtttaaatttagttttgtttttagggtgataattttatatagtgttttgtaaaagatatatacgtttaaatagatagtattttttataataataagatttttatatagttaaaagttgtagttgaattaaatttttttttatattttagttaataaatgtttttaaatatttttaagtttttttatcgtcgttaaggtttagagaggttatttgttatatttgcgaaggttttaaatgaggtatgatttttagaagaaagtagttgtgtaaaattggtttgtaaatagaaagacggtatggttgtgggatatttagtttgttgttaataattaaaatttttatcggtattggtaatgttttattggtttaatattaaataattgtttttgtatacggagtgtattatatttaatggtattttaatatttggaattgtagtttttttttatgtatttgtaaaattagtatttttaaatattttattaagttaataaagtttaatttgttttatgtgcggtgtttaaaagtttgatataggtagtggaatttttgatttggagaagatttgatgggtaaatggttatttattatttaagagggattgttttttttttttttttttttttatgtattttaatgtatattatttgaaataaagattataaggtttttgtttattttgagttattagtgagcgattaatgtattttggttattttttgttttgtttagggtaagtttggatggggagatgagtaattgtaggtttgttaagattaaatttgaagacgattttttagtttgtttttgtttgaatgttttaattattattaaattttgggtagggagttatttttagttttgtttagatattttaagtttttaattagaaaggattatttattaatagtatttatttgagggtaaaattttttaattataaaatagttaaaataaaagttgaaaataatgaaatttggattttgtgttttttttattgaaagttatgatttggtttatttagaatttattatttatattaatttattttgtttttagaagttattgtgattttttgattttgtttttggtattaagaatagtttgaattaaggtataaaataaaaataggttttaataaatttaatgggtattgtggttatttagtttgttttttatagatttattttttaagattaattgatttatagattgattttttttaaagttgtttatttaaaattggattttcgtttatatgtaagtatttgtttgaatatttgtttttaattatttgggggtatatatttagatatatttatggtaatagagagtaaattatttgttgttaggtgtttggggtaggggagagtgtaagtgattgtttaataggtatagggtttttttttgggggtgatgaaatgttttgagtttataatagatagtattaatagttgtatt

SEQ ID NO: 1976 - DNA, 2356 bp, Artificial Sequence
  chemically treated genomic DNA (Homo sapiens)
tatgtaacgggaatgtttttatttattgttataaatattataggagttataatttaattttttaatgaattattattttgaaatagtaggtagttgaaaagataatttgtagggatatgaggaagtgtttatgaaattttaaggttatatattttattattattttagaaatagtatgtttgtagtttattttttgtaaatttaagaaaattttataaaatttttatgagattgagtgatttaaaatttttttttttttaggtttatgtaaaatttttataggtgatttaaaaatgtaaattttgatttatgggataagtagaattttttagattttgtagttggtttgagtgttagtatatggtttatagtattaaggcgaaatggagaaaaaagcgtgaaaagataaaagataatttatgcgagttttaggacgaaatttggaaaaaaatttagtttttatttttttaatttaaatagttattaaaagattaatgattatataatatagtattaaaatatttatgtataaatatatatattttttattattttatttatattatgtatgtgatttttgtatataaaatataaaagaatgttagaaatagtaaagttgttaaggttatatagagattgttattttagatgatttaaaaaattttaatgatcgtatatatagatttgagagatgtagaggtatatagttgtagttttagaatttagttttatttattatttgtttgttagtattatgaattttggttgagagttgttttgtagatttgagaattttgtttttttttttaagtattttgggttgagttttttaggggattaatggaatttagaagtaatgtttttttgtttttaaatttggggtaaaataagggtaggttattaattttaaggtaggttattaatttagttatgggttttttatatgtttttgtttgtaattgtgtggtagattagatatttagttatttattttttgtaagggaagttatttaatgtagatgtttaaggaattttacgtttaaatacggttattgttgaatttgatgggagaaaaaaaggattgtatttttgttggttaatgcggtatttttggatgtttattaagttgttaaaaaatgtgaaatgatgatttattgtgaagtttttttaatttttttttttgttttaatttgtttgcggtttgaaggaatgtatattgatttgagttaaagaagaaatttgtggtttttattatagtttgtaaatatcgattgttgaaagttttaagtgtgttattattttttgttatatatatgttttatatatagtttattttggaaaatagattgggagagtatcgtgtttataattttagagtaatttaattaatggggggttggtttgtttgggggtttcgagattattattgttaatagtggaggttttttttgatgttttttaagttaaagtattaagagagaagttaaagataagttttattaaagaaagatttttttggtatttatagtggttttttgttgttttattattagtaaaagagatataaaaaaatttttgttttttttttaggttgtatttttaggttttatttttgatgttattgaaaagttggtttatttattatttttaaggttattggtaatgttattatttttgattaatgattagtttatggttaagtagtattttatggttaggtgatggttatattgaaagtttagattttagtattatgtaatatagttatgtaataaaattgtatttgtattttttaaatttatttttaaaaagtttaatttaattatgtaggagtggtagtagaatgtaaattatttagggaattattttggtagtgtttgatggatttaaataatattaagagaaagattgtagagggtattttgagatttgtatgatattttgattagggttgataagaagagttaaatggataagttttttttggaaggagatattatggatgtggtatgggtagaaaaagtataagatgtagtattagaggattcgaatgtgttttttggttttgatatttagtggttttgtgatttagggtattgttttttagatattaatatgggtatatattatttggggggtttgttaaatgtagattttgatttagtaggtgtgggtggggtttaaggttgtttattttggttattttgtatttggttgtgagaaatagagaatttggtaaggtttttaatttacgtaagttttagttttttttttaataatacggggtttagaatgatgttaattttttagggttattgggatttatggtattggtaagagtttttggtataggtat

SEQ ID NO: 1977 - DNA, 2356 bp, Artificial Sequence
  chemically treated genomic DNA (Homo sapiens)
gtgtttgtgttaggaatttttattagtgttatgagttttaataattttggaaggttggtattattttaaatttcgtgttattaaagaagaaattgagatttacgtgggttaggagttttgttaggttttttattttttatagttaggtgtaagatgattagggtgggtagttttaggttttatttatatttattgaattagaatttgtatttaataaattttttaggtgatatgtatttatgttaatgtttaagaagtagtgttttaggttataaagttattgaatgttaaagttagaaggtatattcgaattttttgatgttgtattttgtattttttttatttatattatatttatgatatttttttttagaagaaatttatttatttagttttttttattaattttggttaggatgttatgtaaattttaggatattttttgtagttttttttttggtattatttaaatttattaggtattattagaataattttttggatggtttgtattttgttgttatttttgtataattaaattaaattttttaaaaatagatttagggggtataaatgtaattttgttatatggttatattatatagtgttgaaatttgggtttttaatataattattatttaattatggaatattatttagttataaattaattattaattaaaaatgatagtattgttagtggttttggaaataatagataaattaattttttaatgatattaagaataaggtttaaggatataatttaaaagagaagtaaagatttttttatgttttttttgttgatgataaagtagtaaagaattattgtgggtattaggaagatttttttttaatgaggtttgtttttggttttttttttgatattttggtttaaaagatattagaggggatttttattgttaatagtgatggtttcgagatttttaggtagattagttttttattagttgggttattttggagttgtaaatacggtgtttttttaatttgttttttaagatgaattgtatataaagtatgtgtgtggtaggagatgatagtatatttgaggtttttagtaatcgatgtttatagattataatggaaattataagttttttttttaatttaagttagtatatatttttttaagtcgtaggtaaattggagtagggaagggggttgggaaggttttatagtgagttattattttatattttttaatagtttaatgaatatttagaaatgtcgtattagttagtaaaaatatagtttttttttttttttattaaatttagtaatgatcgtatttggacgtgggattttttgagtatttatattaagtgattttttttatagaaggtaagtgattaaatgtttagtttgttatatagttataagtaaaagtatatgaagagtttataattaagttaataatttgttttgaagttaataatttgtttttgttttgttttaagtttgggagtagggaaatattatttttaggttttattaattttttgaaaaatttagtttagagtgtttggaaaagaagatagaatttttagatttgtagagtagtttttagttaagatttatggtgttaatagatagatggtaaataaagttgggttttaaggttatagttgtgtgtttttgtattttttagatttatgtgtgcgattattaaaattttttagattatttaaaatagtagtttttgtgtaattttggtaattttgttatttttgatatttttttatattttatgtatagaggttatatgtataatgtgggtaaaataatgaaaaatgtgtgtgtttgtgtatggatattttaatgttatattatgtagttattagttttttaatggttgtttgaattaagaaggtagaaattgagtttttttttaagtttcgttttgaggttcgtataaattgttttttgtttttttacgtttttttttttatttcgttttaatattataggttatatgttagtatttaagttaattataagatttgaaggattttatttgttttatgaattaaaatttgtatttttagattatttgtgagaattttgtatgagtttgaaaggaaagaggttttgaattatttagttttataagaattttgtaagatttttttgaatttataaaaaataaattgtaagtatattatttttggaatgatagtaggatatgtaattttgaaattttatggatatttttttatatttttatagattgtttttttagttatttgttattttaaagtagtaatttattaaaagattgaattataatttttgtaatatttgtgataatggataaaaatattttcgttatata

SEQ ID NO: 1978 - DNA, 2474 bp, Artificial Sequence
  chemically treated genomic DNA (Homo sapiens)
aagtttttttgtaaatatttataattttatataatttattattatttattaggtatattttttaatttatatgttttgaaatttttaaattttgaaatgttagaagtaaatttgggaattatttagttttattatttatttaatgatgaaattttaaattagatatttttttagttgattgattgataagttttttatttttttttaaaaataatgtttttttataagtttttttaaattatttttatttatatttattaaaagtagtaatgaagttaagggttattgttttgggtagatgtttgtggatattagatttttaggaagattaagtttaggaatttagttttggaggtttaaattttttggaagtaattatatttatgtttagtttttttagatttatgagtttaaataaaaatttttttttgaggtattatttttttgtttgtagttattattagtatttttgttatagtaggttattttttttgttgttttttttgttagttttattttttttgaaatatataaaattgtttgggatataaaattttttttttttttagttttgtgatttggattattttttattatatattgaattttttcgtattttttggaagtttgatggtttgttttagaatttagtaaattgggtagagtggattttttaaaggtaagtgagtattgtgagtattatttttttaaggtgaagagtgtttttttatttagagagtattgattttgagaagttatttattgtttttgttaaagtagattttgagtttaggtgttttttagatgtgattttgaagttgagtttttttattttttaagtttgattttggataaattgttggattttttttattttttgttttgtttttttgtgtaatgggaattaggatgtcgagtttagtggttgttatgagagtttattgaagtaatgcgaaatatttagtgtagtgtttggtgtttagtaggtattttatagttttgatgtttttggggtaggtttattttagaagttttaagaaattttaaaatgagttttatgatgtttgtcgtgtttggatataaaatgagaaatagaaaatttgtttttttattttatgggtggagtgttgtttttttatattttaattttttttaataagaaaagggcgttttgaatgtggtgggaaagggtagattatatggtgggaagttatgtaatataagatatattttattgtatggcgtgtttttgtattatagatgtgtatatagatgtgattattaatagagataattagtttataagttttttttggaaattttttatcgtttttagtagaaaagtgatttttagttaaggtttgagttgaagtttagtttatgattaaagtatttttaattgttttatattgaaaagaaagaaaagagaaatgattagtagtggttttttagttaaggtgtgagattagaggttatttaaaaggtttaagtttattaaaataagtatttgttgtggttttttttttttgttttttttttttttttttttttttttttttttttatttttatttttattttttttttttatttatttttttattatatatttttttttttttgtttttttttttttttttttttttttttttttttttttattttttatagaaaaatattattttatgttaaggaaatattgagtaatatttatttatcgttgagtttgttaatgtggagagggtatatttgtttattttttaagttgtgtaattttattattattatttttattggtgatatgtgatggaagttttatgtaaatgtttaaagtagtagtttagtataataaatataatttttttaggatttaaggaaaaatttgagtttaattttggtttataatttttaattatgtagtatttttaaatatagtagttttgcggattaaataaaataaatgtatgaatataaggtatttttataatatatatggaattatagtttaagttttattttttataatagaagtagggtttgagaaatagatttaggtgtatgttattttgggtggtaaatattttaggaggaaggggagtgaaggaagtagatggagtaggtggaggagttgagtttaggatgtggttttttttggagtttggatttattttaattttatagagagttttggagtgtgaattatatatatgaagtttgtttttattttgatgtggttggttggttttttgtattttttatgtttattagtttttgtaggtgggttgtttttgggttgggggtggcgaggtaattttttaggtaaatgtttaagaggaaatttttggagaagggggtagttatgagttattagtagttttcgtttgtagtatttggggtagaggtattagtttggtaaagggcgttggttgtgatattagtagtatttattatggggtttaataaatggtagttaaa

SEQ ID NO: 1979 - DNA, 2474 bp, Artificial Sequence
  chemically treated genomic DNA (Homo sapiens)
tttagttattatttattgagttttatagtggatgttgttgatattataattaacgttttttattagattggtatttttgttttaggtgttgtaagcggaggttgttaatggtttataattgtttttttttttagagatttttttttggatatttgtttgggaggttatttcgttatttttagtttaggggtagtttatttgtaagggttaatggatatgaagaatataaaagattagttaattatattaaggtaggaataaattttatgtgtgtaatttatattttagagttttttgtgggattagggtaaatttagattttagaagagattatattttaagtttagtttttttatttgttttatttgttttttttattttttttttttttgagatgtttattatttaaaatgatatgtatttgaatttgttttttaggttttatttttattatagagaatgagatttaagttgtagttttatatgtattatagagatattttgtatttatatatttattttatttagttcgtagagttattgtatttgagaatattgtatagttgagaattatgaattagggttgaatttaggtttttttttgaattttaaaaagattgtatttattatattaaattgttgttttagatatttgtataaaatttttattatatattattaataaaaataataataataaagttatataatttagaaagtaaataaatatgttttttttatattaataggtttaacgatgagtagatgttgtttagtgtttttttgatataaggtgatatttttttatgaagaataaaggggaaggagagaggagaaagaagaagaagagagtaggagaaaaaaaatgtatgataaagaaataaatgaaagaagaaagtagggatgaaggtaggaaaaagagggagggaaggaaggagggaaaggtagaaagaaaaggttatagtagatatttgttttaatagatttaagttttttaggtgatttttggttttatattttggttggaaaattattgttggttattttttttttttttttttttagtgtggaatagttggaaatgttttaattatgggttgagttttagtttaggttttggttgaaaattatttttttattaaaaacgatgaggagtttttagggagggtttgtaaattagttatttttgttgatgattatatttgtgtgtatatttgtggtatagaaatacgttatgtaataaagtgtattttgtgttatatgattttttattatgtggtttgtttttttttattatatttaagacgttttttttttattaaaaagaattaaaatatagaggagtaatattttatttatagggtgagaaggtagattttttgttttttattttgtgtttaagtacggtaaatattatagaatttattttgagattttttaaaatttttaaagtaagtttgttttaaaggtattaaggttgtagaatgtttattaggtattagatattgtattgaatatttcgtattgttttagtggatttttatggtaattattgaattcggtattttggtttttattgtatagaggggtaaagtaaagagtgaaaaaggtttaatagtttgtttaaaattaggtttaggaaatggagaaatttagttttagagttatatttaaagaatatttgagtttaaggtttgttttagtagaaatagtaagtgattttttagggttagtgttttttgaataagaggatattttttattttgaaaaggtgatatttataatgtttatttgtttttgaaagatttattttgtttaatttgttgaattttagagtaagttattaggtttttaaagaatacgaaaaggtttagtatgtgatagagaatagtttaaattataaggttgaggagaggggggattttatattttaaataattttatgtattttaaaaaaagtaaaattagtagaaaaggtagtaagaaaaatgatttgttataataagagtattaatgatgattataaataaaagggtaatgttttagaagaaggtttttgtttgagtttatgggtttaaagaaattggatatgaatgtggttgtttttaaggaatttagatttttaaagttaaatttttaaatttggtttttttaggaatttgatatttataggtatttgtttagaatagtgatttttgattttattattgtttttagtgaatgtgggtaaagataatttaaaggagtttgtaaagaaatattatttttaaaaaagagtagaaagtttgttaattagttaattaaaaaagtatttgatttgaaattttattattaaatgggtggtagaattaaatgatttttaagtttatttttaatattttaggatttggggattttagaatatataagttagaaaatgtatttgatagatggtaatagattatatggggttataaatatttgtaaaaaaattt

SEQ ID NO: 1980 - DNA, 2412 bp, Artificial Sequence
  chemically treated genomic DNA (Homo sapiens)
agggagttttaagaaggaaatagtggttggtaatttttaaattatggaagcggtttaagtttaaaaaatattttggttgttgtagttatttggtttttagtaagattttttgtaggcgtttgagtggaggaaaagatggaaggtgtagaggatgatattggttttttgtttatatttttttggaagttattcgtatattttaaggattgtttattatgaatatttgtaattttttgtttggggtttttatttatttttattattttatggttgaagagtatttttagtttaagtatagagtaagttaaaatgatagagagtttacgtttttagatagttttgaaataatgataaatagatatttgataattaaatattttaatttattggtttttagttggaataatgttgaagaatgttttatatcgttttttagagttttttagagggattaattggtttgataatttttaagaatttgttgttttgtttttttttgatatatttttttatttttttattagtgtttttgggaattatttattaaataaattatttatttttgaatttttgttttagtggttgtttttgggaaattaaaattatatagaagaaaagagttagattagtaagtataaatttagtgagaatagttgaaaaggagtattaggaagagaaatatagttaaaaatggtttattataattaagaaagagtgttaagtttatttgattgagggtggaaggaatataagagatagaggggagagattttataggaatttatatgtagaaatatttttttttttgatgttgttggttaaaatataaaaggagaaaaaagaaaagaaaaaataataaaatttgtattataaaatttaggaaatttttttttagataagataaaggtataaaagttttttttttaaaagtataaaagaagttttgatgtttttggatttttgtgtgtttaggaatttttattatttttagaattcgtttaattattttatgatatatttttttttttttagatgtaaaaattgaggagttagttgttagttgaatattttagtattatttttttagtaattattttaaggaatgtatttgaataaaatgtagttttggtattattttaaaaaatggatgatgatttatgttttttttgcggggataagatggttgtgggtatgagttatgattgtacgttgggaagatttcgatgggaattttgtttttgttggttgagttataatttatacggatttgagattgtgcgtggtttttattaatatgtttattttgtttgttaaggttcgagttttattttttttttttcgattaaagttttgtttgtattttatatatatttgatttaaaatttgtgtttggaatttagagtggtttgggaatagtaatttggaaaaatttgattatttgttagttaaaatggaatgatgtgtttttagttgtagttgggaaatgggttatttttttgtaggggagtaaatttaaatgatagataaagttttaatttttttaatatttttgttttcgtggagtaggtttggtataaattaaaattgtttataggttaaggaaggtataaattatagtatagatttgtgttttttttaattgtataaagagtttttatatataatttttttggtgaaaaatttttgtttcggagtagatgttttatggaaataatagtgaagtttttaaggggttaaggtgaatgaattgtaagattggtttttgaagttttttaggttaaaattattttttttattgtttttggaattggtttttaaaatgtgttttatagtattgttttttagattttaatatgtatataaattatttggggattttgttaaattgtagattttgttttagtagtttttgtgtggggtttgagatgtatttttgataagtttttaggggatattgatgtcgatttatgtttatttttgaattttattttgagtggcgagtaatagagggatatagaaagttggttttgaaagattttttttaatataaagattttttagtttaataagtttaaaaaaatttatatttttgtttttttttttagaatttcgtaaattaataaattaaagattttgagaagatttgtattgataaagtttgtagttaatgttgttttttaataatttatggaatttgattttgtgaaaggaaaggataatttgatgtgcgttatttttgggaatatttgtttaggtatttaaatagattgaagggggattttagaaaatgtttgattttttttgtggtgatttttgtaattttttttaggtgagtgttattgtttttttaaataagtaagattttaagtttagtttttaatatttttagtagaataataaattttttattta

SEQ ID NO: 1981 - DNA, 2412 bp, Artificial Sequence
  chemically treated genomic DNA (Homo sapiens)
taggtggaaagtttattattttattggggatattgagagttggatttagaattttgtttatttggagaagtagtaatatttatttgagaaaagttgtaagggttattataaagagagttaaatattttttgaaatttttttttagtttgtttaagtgtttgaataaatatttttaagaatagcgtatattagattattttttttttttataaaattaaattttataggttgttaggagatagtattgattgtagattttattagtgtaaatttttttagagtttttaatttgttaatttgcggaattttagagagaaagataaaaatgtgaatttttttgaatttattagattagagaatttttgtattggagagaattttttaagattaattttttatatttttttgttattcgttatttaaagtaggatttagggataaatatagatcggtattagtattttttgggagtttattaaaaatgtattttaagttttatataagaattattgaaataaagtttgtaatttaataaaatttttaggtgatttgtatgtatgttaaaatttgagaagtaatgttgtaaaatatattttgaaaattagttttaaggataatgagagagatggttttaatttggaaaattttaagaattagttttatagtttatttattttggttttttaaaaattttattgttgtttttatggaatatttgtttcgggatagggattttttattagaaaaattatatgtgaaagttttttatgtagttgagaaaagtatagatttgtgttatgatttgtattttttttggtttataaataattttgatttgtgttaaatttgttttacgaagatagggatgttggaagagttagaattttgtttattatttgaatttatttttttgtagagaaatagtttattttttagttgtagttgagaatatattattttattttaattgataaataattaaatttttttaaattattatttttaagttattttgggttttaagtatagattttgaattaggtgtgtgtgaaatataaatagggttttagtcgggaagaaaaagatgaagttcgagttttaataagtaaaatgaatatgttaataaaagttacgtatagttttaagttcgtgtaagttatggtttaattagtaaaagtaaggtttttatcggaatttttttagcgtatagttatgatttatgtttatagttattttgttttcgtaagaaaagtataaattattatttattttttaaaatgatgttaaaattgtattttatttaaatgtattttttaaaataattgttgagaaaataatattagagtatttaattgataattgattttttagtttttatatttggagagaaaaaaatgtgttatggagtggttaaacggattttagagatggtggaaatttttaaatatataaaggtttaagaatattagaattttttttatgtttttgaagaggaaatttttgtgtttttattttatttagaaagaggttttttaagttttataatgtaaattttattattttttttttttttttttttttttttatattttaattaatagtattagaaaaaaaaatatttttgtatatgaatttttataaaattttttttttttgttttttatattttttttatttttagttaaataagtttagtatttttttttgattataataagttatttttgattgtgtttttttttttgatatttttttttagttgtttttattaagtttatatttattggtttaattttttttttttatatgattttggttttttagaagtagttattgaggtaaggatttaagagtgagtaatttgtttggtaggtgatttttagaaatattggtaggggagtagaggagtatgttagagaaagataggatagtaagtttttgaagattattaaattagttgatttttttggggagttttgagagacggtgtgaaatattttttagtattattttaattgaggattagtggattgggatatttagttattaaatatttgtttgttattgttttagagttgtttggggacgtaaattttttgttattttggtttgttttgtgtttaggttaagggtattttttagttataaaataatgaaaataaataaaagttttaagtaaggagttataggtgtttataataagtagtttttggaatatgcgagtgatttttagagggatgtggatagaagattaatattattttttatattttttatttttttttttatttaagcgtttgtaagagattttgttaagagttaaatggttataatagttagaatattttttaaatttaaatcgtttttatagtttaaagattattagttattattttttttttgaagtttttt

SEQ ID NO: 1982 - DNA, 2464 bp, Artificial Sequence
  chemically treated genomic DNA (Homo sapiens)
attttttatgattatgtagtgttttatttagaggattttagtgttgttattagagtattttgtatatattaagtgtttaataaatgatggttgaatgtagaataaaattattattgatatttttttttttaatttttaagggtatggtataagttttaataaatattaggtgatttttattgaaaataattttattgtataatttataaagtgtttaagtatttattattttatttagtttttattatagttttataagttaagtagttttatttatattttaaggtgagaaaattacgtttagagaagttagatgatttgtttagggttattaataaataagatattatgaagggaatgaatttaaatttggtgtttttgtattatttattttttgtgtagagttgattggttaaaagtttgttttttatttataagttaaggtgttaggtatatagttttgaatgttgagttttaggtttttaatgagtaatttgtattataattaaatagagttgtttggttattttaggttagtatttatggtatttatatttatgaatttatttttttttttttttataaatttataggttgataatttttttgtgtgaaaatttattgaaatgagattattttatttttgttttttgatttttggtgtgtttttttgtttttgtttaaaatatttggttttgttttgatattaagttttagtgttagttttgtgaagacgtaagatagaagttatatatgtataataatataatttatatttttaaagttataataagtagtaatatttttggagcgaaaaattttggtaaagtaaataatatatgttttggggtttgagatttaggtttgaggtttagttatagtatttttatgttttttttgatttaagttaaattatttagtttgttgagattttagttgtttttttttattttggataatgggtatgatgttgattgtttttttgggtggttttgaggattttgggaggatggatataagtgtaatttaaattttggagttttttataattgtaaggtagtattatttatttaaatataaaaataggttattaagtattattaaagggaaaagtaaatgtttagggattatttttgttgtattgttgttggggaaagaggttttttgtttttttaagagtttttagatatatttttagttatattttaaaagtttttttagttgtgtagtttaggtgtattcggtagtatagtcgtgttttgatttttttggtagatgttataatttattgttatttttatgtaggaatgtagggcgaggggtttttatgtcggttttgtgatttattgtttgataagttttgagtgttaattttaggtaggtttagcggaggtggaatattatttatttgatagtgtttgtgataaagtgggtaattagacgtatttggaaaagtttggttggaaattggttggtatttatataatattatagttaagttaggttttataaaagttaatggagaaaaatgaagttttttaagatttattttgttttttgaggaagttaggaatataggattttgtagttttatttttttttgtgttttttttatttttttattttattttttttagatagggtaatatatttttattggagatgggagtaaaggaaagcgaattgagagttgaggttttaagtgtttgattttagaggtatgttatttttttagtttttaatttttttttttttttttttttttgttttttttttatatatatatatgtatatatatatatatattttatatttttatagagtatatatattttatatttttttgtttttttgtttttgttttttttttatatatatgtgcgagtatatatatatataattatagtgttaggatttaatttggtattttggtttataatttgttttttattggagtttttggagtttggtgttagtttaagagtatgatttgtttgatatgaattttatagttttttttttatttttttttaattggatagttttagtttgtcgatgattaatgagtttggaaggtgagcgatagttattttaagggtttttaaaagtttattttagagattagttaaatttttttgttatattaattgtagcgaagttttttgtttaatagtttatggaaaataattgtttgattttcgttttttttttaaattaagttgttatgagcgtagttttgtttattggttaatagtgtgtatgttttttttatcgtttttttttaggtagacgaatattttatttatgagaagtaggaagtttattgtgaggttggtttaatattggattttatttggatgtggaggatttttgaaattggaaagttaggattgatttggaaaatgtgtttatagatagtggaataggaaaatgattcgttttttaaggttagtttttttttttt

SEQ ID NO: 1983 - DNA, 2464 bp, Artificial Sequence
  chemically treated genomic DNA (Homo sapiens)
gaggaggaggaattggttttggggagcgaattatttttttgttttattatttgtaagtatattttttagattagttttgattttttaattttagaaattttttatatttaaatgaggtttagtattggattagttttataatggattttttattttttataggtaaaatgttcgtttgtttgaaaggaagcgatagagagaatatgtatattgttggttaataaatagagttgcgtttatggtagtttggtttggggggggggcgggggttaggtagttattttttatgggttgttaaataggaaatttcgttgtagttaatgtagtaggagagtttggttagtttttgaaataaatttttgagagtttttaagataattgtcgtttattttttagatttattaattatcggtaaattgaagttatttagttaggaggaaatgaagagagggttgtagaatttatgttaaatagattatgtttttgaattggtattaaattttagaaattttagtgagaggtaaattgtaagttaaggtgttaagttaaattttagtattgtgattgtgtgtgtgtgtgttcgtatatgtgtgtgagagagagatagagatagaaagatagagaaatatagagtgtgtatattttatagaagtatagagtgtgtgtgtgtgtgtgtatgtgtgtgtgtgagagagagatagagaggaggggaagagagaggattgaagattaaagaaataatatgtttttgagattaaatatttaagattttaatttttaattcgtttttttttatttttatttttaatgagaatatattattttgtttgggggaaatagagtgaaaaggtgggagagatataaaaagaaataaagttatagagttttgtgtttttgatttttttagagagtaaggtagattttgaaggattttatttttttttattaatttttatgaagtttgatttggttgtaatgttgtgtaaatgttagttagtttttagttaggtttttttaagtgcgtttaattgtttattttattataggtattattaggtaaatggtgttttattttcgttgggtttgtttgaggttgatatttaggatttgttaggtaatggattatagagtcggtatgggggtttttcgttttgtatttttgtatgggggtgatagtaaattatgatatttgttaggaagattagaatacggttgtgttatcggatgtatttaagttatataattaggaaggtttttaggatgtgattagagatgtgtttgaaagtttttaaagggataaagagtttttttttttagtaatagtgtagtagagatgatttttgaatatttatttttttttttgatgatgtttaatgatttatttttatgtttgagtgaataatgttgttttgtagttgtaaagggttttagagtttaagttgtatttatatttatttttttaagatttttagaattatttagagggatagttagtattatgtttattgtttaggatgaaaaaaaataattgagattttagtaggttgagtgatttggtttgggttaaaaagaatatgagagtgttgtggttaggttttaaatttagattttaaattttaaaatatgtgttgtttgttttattaagatttttcgttttaaaagtgttattgtttattgtagttttggaagtatggattatattgttgtatatgtatagtttttattttacgtttttataggattgatattgaagtttaatattaaaataaaattaaatgttttaaataagaataagaaagtatattaaaaattaagaggtaaaaatgagataattttattttagtgaatttttatataaaaaaattgttaatttataagtttgtaaagagaaaagggggtaggtttataggtgtaaatattataaatgttgatttaaaatggttaaataattttatttggttataatataaattgtttattggaggtttgaggtttaatatttaagattgtatgtttggtattttgatttgtaaatgagagatagatttttgattagttaattttatataaaaagtggatgatgtaaaggtattaaatttgaatttattttttttatgatgttttatttgttgatgattttgagtaagttatttaatttttttgggcgtaatttttttattttaaaatgtggataaaattatttagtttgtagaattgtagtaaggattaaatgaggtagtggatatttaagtattttgtaaattatatagtaaaattatttttagtagaaattatttggtatttattgaaatttgtgttatgtttttggggattaaaaaagaaagtgttagtaatgattttattttgtatttagttattatttattgagtatttggtatatgtaaggtgttttaataataatattgggattttttaaatagaatattatatgattatggagagt

SEQ ID NO: 1984 - DNA, 2429 bp, Artificial Sequence
  chemically treated genomic DNA (Homo sapiens)
tataaatatttatgtttatgggttgtttatatgtgtatttatatatatatgtatatattattatgatagtttaataggaaagatttttgtatattataaaatttagatttattattaattttagttttatgatattgattagaaaggaaggattagaaataatggttttttttagttttagattgggtgatttttattatttatgtatattttatttgattggtataatatagtggagtatatgagtaggttatgtatataatttttttttttttttttgaaggttaagtatataagaatataagagtgaagttttaaaagattttgtagataaatgattgtaataagatgattatcgatatttaggtatgttttaaaaggatagaaatttaatttgttgttttttattgtattgtttttttaatatttatttaattgtttttattattaaatatttataattaattgattgtatgaagaaagtaagaaataagtgaataaaaaatatgtttatattaaatgatatatataaagtataaaataatgattagttagattataaatattttagtttttgtagtttatatagtttttgttgtaattagttaattttattattttagagtaaaaataggtatggataaagtataaataagtgagtgtggttgtattttaataaaatattgtttattaaaatagtttataggttgaatttattttatgggttatgttttgttaagagttgatttaaggtattaagggtagttttttatttttaaaataaataattagtttataggtattttaataatttgtaagattttatgaaaggatcggtttagaggaaatataatttatttaaattttttattgataagttattagtatatagatggtgtataggattaagtaggtttttagatttttttttttttttgttattaaattttttttggttttgttgtattttatgagttatttttgtttttagtttaatacgaggaaaatgggtagatggtataagaggatattgaatgtattgaaggtagtttaaatattttatgtattagttatttcggatatttagtggagtgaatgcggtatttattaatgtttaatgtcggttcgggtaaagtttagatagtttgttggtagtaagaaagttaaaggtaagaaggtttgtgtcgattgtcgtttgtatttacgaggttgagaaatagtagttatgaattagtttgtttgagattttgttgttattatttgtagtagtaaggaagataatattttaaaaagtttttaggaataaaatgagttttaattattagaggaagaattatagtttgtagttatattgtttagaggtttaatgatgatttattgtaaattagattaattaagaatattttttatattgtagttttgagtggtttagataagattattggttttttttgatttttgggattttaaaataaatgggattttagagatttttggtttagggtttgtggaatgttagaagtatgaggtattttattggagatttggttaatttatttttttatagatgcgtaaattgagttttggtgaggtaaatgatatttagtgatttataattagtcggtggtgaggtagaaattgagttagtatttttgattttgggttgatagtttgatttttttattaagataattgttatgtatttaattaatgtagtttgtatattgttttttaaagtgattttattagagaattttttttgtttttttatatggtttagagaagattagagttttttagaatttattttaggaaattttttaatgattattcgatatttttaagtttttttaattttatttatatatgttgtttttaagtttggaaaatgagatttaaagagattaggttgttggtttttgattttgtttgtatattagaagtatttatagattttttaaaaattttaattttaagttatatttagattaataaattataatttttaggggtaggatagagatattatattttttgacgttttttaggtgattttaaagtatagataaattttgggagttattgggatagggtatttttatttttgttatattttatataggaaggtattatttattatggtgaaaatatgatttgaggatattagaagagatggaataatattttttgaaaggatgttttgttattattgtgaatatatattagagtagttttgaagaataaaggaataaatataggtgaaagtgttttagaaaattgaaggatttatataatatattttttttttattttaggaggtatttagatttgagttagttgtgaatgttgttttatttaattatttattaggaagaattattttgaaattagagaattagtaaatttttaaaagtatttaatttttgaaa

SEQ ID NO: 1985 - DNA, 2429 bp, Artificial Sequence
  chemically treated genomic DNA (Homo sapiens)
ttttaaaagttaagtgtttttgaaaatttattgattttttgattttagaataattttttttagtaaatagttagataaaatagtatttatagttagtttaagtttgaatattttttaaaataaaagaagaatatattatataaattttttagttttttagagtatttttatttatatttgtttttttgttttttagaattattttgatgtgtgtttataatggtggtagggtatttttttaagaaatgttattttattttttttaatgtttttaaattatgtttttattataatggatgatgtttttttatgtgagatatagtagaggtagaaatgttttgttttagtggtttttaaaatttgtttgtattttaaaattatttgggaaacgttaaaaaatatgatgtttttgttttgtttttggagattgtgatttattggtttgggtgtggtttggagttggaatttttaaaagatttgtaggtatttttaatatataggtaaggttaggagttaataatttagtttttttggattttattttttagatttgaaaatagtatgtgtgggtggagttgaaagggtttgaaggtgtcgggtagttattaaagagttttttgaagtaggttttggagaattttggttttttttgaattatgtgaggaaataaaaggggttttttgatgaaattattttggaaaataatgtgtaaattatattggttgaatatataataattgttttaataaaagaattaaattattaatttagaattaagagtgttggtttaatttttattttattatcgattaattatgaattattggatgttatttattttattagagtttagtttacgtatttgtaaagaaatgggttgattagatttttagtgagatgttttatatttttaatattttataagttttgaattagaaatttttgagattttatttattttaggattttaggagttaaagggaattaatgattttatttaagttatttaagattataatatggggggtatttttaattggtttaatttgtaatgaattattattaagtttttaggtaatgtagttgtagattgtgattttttttttagtggttaagatttattttatttttgaaagttttttaaaatattattttttttattgttgtaaataatgatagtagagttttagataggttgatttatagttattgttttttagtttcgtaagtatagacgataatcgatataggtttttttgtttttagtttttttgttgttagtagattgtttggattttgttcgggtcgatattgggtattaatgaatgtcgtatttattttattggatattcgaagtgattaatgtatggaatatttgggttgtttttagtatatttaatgtttttttatgttatttatttatttttttcgtattaggttggaaataagaataatttataaaatatagtaaggttaaaaggaatttagtggtagggaggagagaaagtttaaaggtttgtttggttttgtatattatttatatattgatgatttgttagtagaaagtttgggtgaattgtgttttttttgagtcgatttttttatgaagttttgtaaattattaaaatatttataagttaattatttattttgagaataaagggttgtttttgatgttttaaattagtttttgataaagtatgatttatgggataaatttagtttgtagattattttagtaaataatattttattggaatatagttatatttatttgtttatattttatttatatttgtttttgttttaaaatggtagagttgattagttgtaatagagattgtatgaattgtagaagttaaaatatttatgatttaattgattattgttttatattttatatatgttatttggtatagatatattttttatttatttattttttgttttttttatgtaattaattaattataggtatttaataatgaaagtaattaagtaaatattaaagaaataatataataagaaataataaattaagtttttgtttttttaaaatatatttaaatatcgatagttattttattgtaattatttatttataaaattttttagaattttatttttatgtttttatatgtttggtttttagggaaaaaaaagagaattatgtatatgatttgtttatgtgttttattatattatgttaattaaataaaatatatataaatggtaaaaattatttaatttaaagttaaagagaattattatttttggttttttttttttagttaatgttataaaattagagttggtgataaatttaagttttataatatgtaggaattttttttattaagttattataataatatatgtatatatatgtaaatgtatatataaataatttataaatatgaatatttgtg

SEQ ID NO: 1986 - DNA, 2431 bp, Artificial Sequence
  chemically treated genomic DNA (Homo sapiens)
tatagatgagaaatttgagattcggaaagtttatttatttgtttgaaatggataatggtaaagttatgattaaatttttaagttttaagattttgtttaattttttagtgttttggttttataagaagaaagtaattgatttgggattttttatttatatttttttttttttttttttaatgtaaaattatttgattgaatttggtttttaataaagtaatttagagttatttgataatttttgtattgtaattaatattttttttttttttttttttaaattattttaggggaaagaagggagtaagatagagatttaaaaatatatatatgtatagtgtcgggtttagtggtttaggtttgtaattttagtattttgggaggttgaggcgggtggattatttgagattaggagttagagattagtttggttaatatggtgaaatttcgtttttattgaaaatataaagttaggtgtggtggtatatgtttgtaattttagttatttgggaggttgaggtaggagaattatttgaatttgggaggtagaggttttagtgagtcgagatcgtattattgtattttagtttgggtaaaaaaatgtgaattttcgttttaaaaaaaaaataagaagagatttagagatagaaagagggtttgggtttgtaattttttgtttttttgtgaagtaaattttttaatttattaaaaatatagtattaggaaatgttgtgtttttaagtgttagcgtgtttttttttgatttttgatttatgtttgtttatttgatgaagttattagtggtttgtagtttgtataggttaggagggttttaatgatttaggatattttcgtcggatgttgtggttgaaattatagtatttttggtagtaaagtgaggggtgtgtgtgtgtgtgtgtgtgtgtgtgtgtgtgtgtgtgtgtaggtaggtaggaggagtaatttaaaagagagattttagtatgagggatgattattttttaaaatttattatttaggtttttgtaggtaatattttgaatttaaaatgatttttagttaagtcgtgtttgtatttgggaattgtgagaagtattgaaagttttataaaggagaggaaatttgattacgataggaagtgatttatagtttttgaggtttagatgtattgatataaggtagtgaagtaggaaagaattacggtttttaaaaagaagtaggattttggttttttttttattttagtgtgatgtgtgtgttttagaataaaattttttaattatagtgtaaaagtgatatttatgtaataggagtggtttaaattttttgtttttgtgggtttgatatagaggaaagttagaattttttttatgatttgtttatcgtgtgttagtgttgtggtttttaagtgttgtgtaaatttgattttttaagttttaggtgggttatgtgggtgatggtagcgtttaaaagtgcggaagaaatgagttaaagttagtaagttatttggagattgaggttgtggttgttcgatttatagtagtatatttttttgtgtgtataaattgttagatatttttattttttagtattttttgttgtttgatttttttttatgaatattttttgttgttttatttgaagtaataagggatttgatatttagtagtaggtgagtatataaaaagttgagtatgaattgtattgttggtgtgtgaattgttttggaagaattatgttattggaaaatttgatatttttttgaaaagatgatgggttttattagtgagatgtttttattttagaggaagttatttttttaatgtaatattttgtttgatatattgttttaagattaattttaggagaattttgagtgtagtaaaagtattttgtattattttttagtaagtgattttataataaataagattattgaattttattttttgagttaggttttataatattaatttttattagtgttttttatatgtagttggggtgaaatgtgtttagtttgttttttttttttagtttattttttttcgttttttttatttaaaatttagtgttagagggatagtttgaaataatttgaagggatggtatatgatgatttttgaggtcgtttttttgatttttagatgtttttttgttttgtatgatttgttatttgggggtgagcgggggaagttagtggaataaatatatttttatttgtaaaatcgagtattggttttgaattaatatgaagggataaatggaaagtaaggtgaaagtatatgatgtaagagagttgattaatatgaaaatattggtagaaagtgttgtaattttttaagcggtttgtataggagaaaaagttgtttatttttaggtaagattggttaaatatcgtgggttaagtttaggttttacgtatatgtgg

SEQ ID NO: 1987 - DNA, 2431 bp, Artificial Sequence
  chemically treated genomic DNA (Homo sapiens)
ttatatgtacgtggggtttgaatttggtttacgatgtttagttaattttatttaaagataaatagtttttttttttgtataagtcgtttaagaagttatagtattttttattagtatttttatgttgattaatttttttatattatatatttttattttgttttttatttgtttttttatgttaatttaaagttagtgttcggttttgtagatagaaatatatttattttattggtttttttcgtttatttttaaatggtaggttatgtagaatagggaaatatttggggattaagggaacggttttaaaagttattatatgttatttttttaggttgttttaaattgtttttttaatattgggttttggatgaaggagacgaaaagaagtgaattgaaaggggaaaataaattgagtatattttattttagttatatgtgaagaatattggtagaaattagtattatgaggtttggtttaagaggtaaagtttaatggttttatttattatgaaattatttgttgggaaatggtgtagaatgtttttgttatatttaagatttttttgagattgattttgaagtagtatgttaggtaaggtgttgtattaaaaaaatagttttttttggagtggagatattttattggtaaggtttattatttttttaaaagaatattaaattttttagtgatatggtttttttaagatagtttatatattagtaatgtagtttatatttagttttttgtatatttatttgttgttggatattagattttttgttgttttaagtggagtaataagaaatgtttataaagaagaattaagtaataagaaatgttagagaataagaatatttgataatttgtgtatataaagaaatgtattattatgaatcgggtagttataattttagtttttaagtaatttgttggttttagtttatttttttcgtatttttggacgttgttattatttatatagtttatttggaatttggaaaattaggtttgtatagtatttggaaattataatattgatatacgatgaataagttatagaggaaattttgatttttttttgtattagatttataaaggtaagggatttagattatttttgttgtatgaatgttatttttgtattgtggttagaggattttgttttaggatatatatattatattgggataaaagagaaattaagattttatttttttttgaaaatcgtaatttttttttattttattattttatgttaatatatttgagttttaggggttgtaagttattttttgtcgtggttaggtttttttttttttatgaagtttttaatattttttatagtttttaggtgtaaatacgatttggttgaaagttattttgaatttagaatattgtttatagaggtttagatggtgggttttgagaaataattattttttatgttaaagttttttttttaagttgttttttttatttatttatatatatatatatatatatatatatatatatatatatatattttttattttgttgttagaaatgttgtggttttagttatagtattcggcgaaggtgttttgggttattggaatttttttgatttgtataggttgtaagttattgataattttattagatgggtagatatgaattaggggttaggaagggatacgttgatatttaaagatataatattttttgatgttgtgtttttggtaagttgaaaagtttattttatagaagaataagaaattgtagatttaggttttttttttgtttttaaatttttttttattttttttttgagacggagatttatatttttttgtttaggttggagtgtaatggtgcgatttcggtttattgaaatttttgttttttaggtttaagtgatttttttgttttagttttttaagtagttgggattataagtatgtgttattatatttggttttgtatttttagtagagacggggttttattatgttggttagattggtttttaatttttgattttaggtgatttattcgttttagttttttaaagtgttgggattataggtttgagttattgggttcggtattatatatatatatatttttaaatttttgttttgttttttttttttttttggaatggtttaaaaaaaaaagagagaaggatattaattataatgtaggagttattaagtgattttaaattgttttattaaaaattaagtttagttaggtggttttatattgaaaagaaaaaagaaaaggtatgaatggagaattttaaattagttattttttttttataaggttagggtattgggggattggataaggttttagaatttgggaatttaattatggttttgttattgtttattttaggtaagtaggtaaatttttcgggttttaggttttttatttata

SEQ ID NO: 1988 - DNA, 2460 bp, Artificial Sequence
  chemically treated genomic DNA (Homo sapiens)
tttgtaattttagttattcgagaggttgaggtaggaaaatcgtttgaattcggggggtagaggttttagtaagttaagatttcgttattgtattttagtttgggcgatatagcgagattttgttttaaaaaaaaaaaaaaaatggataatttttattttatttgttttaattttttataagtgttagttagatttttggaggggaaaagaaatgagtggtagaatttagttaataatttagttatttgaatttagaatggtataaggtagtggttttaagagatatttgcgtttttaggagatatttggtaatatttagaggtattttttgttgtattaataggattagggattgaggagggtgttgttattagtatttagtgggaaaagattagaaagattataaaatattttataatgtattatttaatttaaaatgttgaggtaatgataatgttgggaaattttagttttaaagatttatgttaaagtgttaatagtagtttgttttttattttttatatttgtaatttttttataatatttgtgtgttgttttattaaaaaggaaaataataaaagttatttttatttttaagataaagtggttatagtatgttagaagtttagatgtggttaaatgttggtgattgttgataaagaaaataataaatttggtttttattaatagtttttggtattttttggaatttttcgtggaatgaaaatagtgattaagaggaagagagattggatttgatagagtttatttatagatatgtattattaaaaaagaaatttagtaaggtaattcgtgtttagagatttagtttagtggattttacgttggttgattttttttttgtttatttaaatggtatgaatttttagttgttgatattattgtatgggtggtgtggggtatgttagggagtatttagttttggttttataggtttattatggttggttagttttaattaaaagattttttttgttttgtttttaggatttttagatatggaattggggttttatttttggttttgggtatttatgttgttttttgttatgttgttagatttatacgtaagttaaggtagttttagaggaatatttttttttttttatttttattttttagtatagttttggatttatagttaattaagcgtattatagaagagttagtaattttgacgtgtaaaacgtttatgttttgttatttttaatatgttggtatttttgatagtttttaattagagtagtacggttaattttagtttgttatttgtgtgggttaagttgtttgaaaaatttttgagggattagttagtggtgggaggatgatttttttataaataaatgatggaatttcgatgtttggaagatattagttgtggtttggtttttggggttttttgaggggatagaaatgttagttttttttttttttggttttttgggttgttttatagttgggattgatgttttttattttagtattggaagatttttaggaggttttcggattatagagatatttggttttagttttattttattattgttagtgttaaaggtgtaatatttatttttaagtgattatataaaataatttttttaagggagattttgggtatgaagtttatataaatattttagaatagttagaaaagtttattttgattttagaataatgttttataaggattgagttattaaaattattttttttataagtttattttattgggagaatatttatataaaaatttttaatattggggtcgtgggagggaaagtgtgtagataatgtaaaaggattttaatttcgaaagaaataaagaaaaaaagaagaggattagtatatttagttttgttttacgtgatttgaaattttatttgattttttagtagattgttattaaaattttgatattagaaagaagtttttatttatttatatataatatgatagtttatgtagaaatttgtaagaaatttataaaaaagtattagaattaatatatgagtttattaaggttacgggatataagattagtatttaaaaattaattatatgtttatatattagtaattaattattggaaattaaaattttaaaaaataatacggtttaaaaattatatagtttggatatggtagtttatatttgtaattttagtatttttagaggtaaaggtaggaagattttttgagtttaggagtttgagatttgattgggtaatatagggagattttgtttttataagaaatttaaatattagttaggtatggtggtatgtatttatagttttagttatttaggaggtagagtttaggaggttgaggttgtagtgagtcgtaatggtgtttttgtattttagtttgggtgatagagtaaagttttgttttaaaaaaataaaataaaaataaaaataagatgtaattatgtata

SEQ ID NO: 1989 - DNA, 2460 bp, Artificial Sequence
  chemically treated genomic DNA (Homo sapiens)
tatatataattatattttgtttttgtttttgttttgtttttttgagataggattttgttttgttatttaggttgaagtgtagaggtattattacggtttattgtagttttagttttttgggttttgttttttgagtagttggaattataggtgtatgttattatatttggttaatgtttaaattttttatagagatagggtttttttatgttgtttagttaggttttaaatttttgggtttaagagatttttttgtttttgtttttgaaagtattaggattataggtgtgagttattatgtttagattatgtaatttttaaatcgtattattttttaaaattttgatttttagtagttgattgttaatgtatagatatatgattgatttttaaatgttgattttgtatttcgtgattttgataaatttatgtattaattttggtgtttttttgtagattttttgtaaatttttatatagattattatgttatatgtgaatggatagagatttttttttaatattaggattttggtaataatttattgagagattagataaaattttagattacgtaaaataaaattggatatgttggtttttttttttttttttttgtttttttcggaattaaaatttttttatattatttgtatatttttttttttacgattttaatattaaggatttttgtataaatatttttttagtgaaatggatttatgggaagagtggttttggtgatttagtttttgtgaaatattattttaaaattaaaataaatttttttagttattttgaagtgtttatatgaattttatatttaggattttttttgaagaaattattttatatagttatttggggataaatgttatatttttagtattagtaatgataaaatgaaattggaattagatatttttgtggttcggaggttttttgagggttttttaatgttggaatggagagtattagttttagttgtgagatagtttagagagttaaggaagaagggagttgatatttttgtttttttaaaaggttttaggaattaaattatagttagtattttttagatatcgaggttttattatttgtttataggaaaattatttttttattattggttgattttttaaggattttttaaatagtttaatttatataaatgataggttgaagttaatcgtattgttttaattgaggattgttaaaaatattagtatgttgggggtggtaggatatgggcgttttgtacgttagagttgttggtttttttatgatacgtttgattggttgtggatttagaattgtattaaggaataagaataaagggagggaaatatttttttagggttgttttagtttacgtatgaatttggtaatataataggaagtagtatagatgtttagagttaaaaataaagttttagttttatgtttggaagttttgaagataagataaagggagttttttaattaggattggttagttataataaatttatggagttagaattagatgttttttggtatgttttatattatttatatagtggtgttagtagttaaaaatttatattatttgagtgaatagaaaaaaagttagttaacgtgaaatttattaggttaggtttttaggtacgggttgttttgttaagttttttttttaataatgtatgtttatgagtagattttattaaatttaattttttttttttttagttattatttttattttacggggggttttaaagagtgttaagggttgttggtaagaattaggtttattattttttttattaatagttattaatatttggttatatttgaatttttgatatgttatggttattttgttttaaaagtaaaagtagtttttattgtttttttttttagtaaagtaatatataaatattgtagaaaaattataaatatagaaaatagaagataagttgttgttaatattttggtatagatttttaaaattagggttttttaatattgttattattttaatattttgggttggatgatgtattgtagggtattttgtagtttttttggtttttttttattagatgttggtaataatattttttttaatttttaattttgttggtataataaaaaatgtttttagatattgttaaatgttttttgggggcgtaaatattttttaaaattattgttttatgttattttgaatttaggtgattgaattgttgattgaattttattatttatttttttttttttttaggagtttaattggtatttatgaggaattgaggtaaatggaataaaaattatttattttttttttttttttgagataaagtttcgttatgtcgtttaggttggagtgtaatggcgagattttggtttattaaaatttttgtttttcggatttaagcgatttttttgttttagtttttcgagtagttgggattatagg

SEQ ID NO: 1990 - DNA, 2489 bp, Artificial Sequence
  chemically treated genomic DNA (Homo sapiens)
taaatttggaatagaattttagattatagtggttaaagaaattgattttgtttgtaagtaagttggattaagatttatatgagagttttggggttaagggaaataaagtattgttttaagaaggaagattttgttttgataaaatatttttttataatgtgatttttttaagaaattataaaagagtagttagggatttatttatgtattttaatatttgaagagttttagattgattgtatgtttgatagttataggaattttatttttataagaatttatttataaaaataaaagtatatttattatttttaaatttatatatttgagttttaaaaatatagtttttttttagtttttgttagtatatgttgttaaatttttttatgttgttagatttatttaaaaattaatttttttaatgtatgttatattttatgttgttttggttgtttttgtatattttgaagaaaatagggaagataatggtttttttttttaatttaatatatatatgcgatagagaaatgtaaggatgttgtatttttagaggattaaatttaaaatgataatagattcgattgatttttttaaaaaagaattttattttatgtaatttggataataaggtatatatggttggattaaaaatattgtgtttttaagatttttttttaatttttattttataattataaagaaatgaggttatgtgttgttgtaagaagttttattgtaaatatatgtatgtgtatgtttgtgtgtgatttgtaaatttagttttagaaaggtgtaataataaaatggaattgaatttagttatggtttttacgagcgtgagtaaagtatgtatgtggaaatttaagatgttaatgaaattagtatagattttaatggtattttggtgtttttaaaagatcgttattaaataaagtttaatgtgttaaaatggaaattttaagtaagagaaatgtgggaagaagtttaaggaatagaaattgtttggggaagatgatttgaatgttttttaaaattttcgagaagtattaagtttaagtttagttttttatttttgataaatattatattgtgtatttgtttgttatttcgtggttttgttgtttttgttagtttgttaaatggaattttggttttagttagatgaaaatgtggtaatttttgtgttttgtttgtttcggcgttcgaggagcggttgtgttcgattgtgtgaggtcgtttagtgttaagggtaattattggtatttgtattgatagtaagtagtttgtagtaatagattgaaaatgttttttttagatttttagattggaattttagttttatttttaaaagttttatgtttatagtacggttgataaaataaattattaaattaattgttttgggagtttttaagttgtgatattaaggtagttgcgagttattatttttgatgaaggagtagttttagaaattgtgtgtatttgatggaggtttggtaaagtgtgtaagtttgtagatttatggtaaataggttttatttttaagtatttatttttagaaagggaaaaaaagagttgtttatttttaatttcggatttattttaaattatttatagggaaatgggtgttttatttaatggtattgtttatttttatagagaaatgtttgtagtgaaaatgtaaaatattattttttttttttgttgaggttttttattttatggtgtttattttatttttttagtagagaatgtagaaaagtattaaaggtagtattatgaaacgtagagttgttaatttttaatttcgttagagttttgtttttttttttatttggggagttgaattgagttattagaattttttttttatattttttttagaatataagttttgataaaattaaagggttttatatttttaaagttttagaaattttatagggtacggtgagggtaggggtggggttgaagggatgggaaatttataggttaaaaataaaaatttgggcgaaaaatttaggttttgttagttattattagtgggattttagttagttatttagatatttggttttttgtttatttgtttgtgaaatagaaatgattatatttgttttatgtgtttgttggaaatatataaaataagataattttaggagtaaagtgatttatatttgtaatgttgaaatggataaaaaataaaatagatatgtgagtgtatagatgataaatatgttataaaataaaggtagtaaagtgttagtaattgtaaggagagatgtgggtgtatgtatgtttgttatataatttttttaatttttttgtgtatttgaaagtattttaattaggaggaagcgatttagaagggtaaattttttttatgtaagtataattttcgtattttttgtttttagttaaattttagatgtaggtatacggttatattgaattttagcggagaatggaaaaaaatatattttttttat

SEQ ID NO: 1991 - DNA, 2489 bp, Artificial Sequence
  chemically treated genomic DNA (Homo sapiens)
atgaaaaagatatatttttttttatttttcgttgaggtttagtatggtcgtgtgtttatatttggaatttaattagaggtagggaatacgggaattatatttatatggaaaagatttgtttttttaaatcgtttttttttgattaagatgtttttaaatgtatagaaaagttgagagaattatataataaatatgtatatatttatatttttttttataattgttaatattttgttgtttttgttttatgatatatttattatttatgtatttatatatttattttattttttatttattttaatattgtagatataaattattttgtttttgaagttattttgttttatatgtttttaataagtatatgaggtagatatgattatttttattttataaataagtaagtagagggttagatgtttaagtaattagttgaggttttattgatagtaattggtagagtttggatttttcgtttaagtttttgtttttaatttatgaattttttatttttttaattttatttttatttttatcgtattttgtagaatttttgaggttttaggggtataaagttttttaattttgttaggatttgtattttagagggagtgtaaaaggaaagttttaatggtttagtttagttttttaaatgggaaggagggtagaattttgacggagttgggaattaatagttttgcgttttatgatgttgtttttggtgtttttttgtattttttgttgggagagtaaagtgggtattataggatgaggagttttagtagagaaaagaaatggtattttgtatttttattgtaaatatttttttgtgagaataaataatgttattaaatggggtatttatttttttgtgagtaatttaaaataagttcgaaattgagaatggatagttttttttttttttttttgaaaataaatgtttagaaatgagatttgtttattataggtttgtagatttatatattttgttaaatttttattagatgtatataatttttgaagttgtttttttattaagaatgatgattcgtagttattttaatgttatagtttggaagtttttaaagtaattggtttagtaatttattttgttaatcgtgttgtggatatgaaatttttaaaagtaaagttgaagttttaatttaaagatttgaaaagaatatttttaatttgttgttgtagattgtttgttgttagtgtaggtgttagtagttatttttggtattgggcggttttatatagtcgggtatagtcgtttttcggacgtcgaggtaagtaaagtatagagattattatatttttatttgattgaaattagagttttatttaataagttgataggagtaataggattacgaaataataagtagatatatagtgtggtatttgttaaagataaagggttgagtttgagtttaatgtttttcgaaggttttggaagatatttaaattattttttttaaatagtttttgttttttgaatttttttttatattttttttatttggggtttttattttgatatattaagttttatttggtggcgattttttgaagatattagaatgttattaaagtttatgttgattttattaatattttaggtttttatatgtatattttatttacgttcgtaagagttatggttaaatttaattttattttattgttatatttttttagagttaaatttataaattatatataaatatgtatatgtatgtgtttgtaataagattttttgtaataatatatagttttatttttttatggttataaagtaagaattagaaagagattttaaaaatataatatttttaatttaattatgtgtgttttattgtttagattatataaagtaggatttttttttaaaaaaattagtcgaatttattgttattttaggtttgattttttgggagtgtaatatttttatatttttttgtcgtatgtatatgttaaattggaaaaggaaattattattttttttgttttttttagaatgtataaaagtagttaaaataatatgaaatatggtatgtattagaagaattaatttttggatgagtttggtagtatgaaggagtttgatagtatatgttagtaaaagttaaagagaagttatatttttaaaatttagatatatagatttagagatagtagatatatttttatttttatagataaatttttataaaaataaaatttttatagttgttaaatatgtagttagtttgaaattttttaaatattaaaatgtatggatggatttttaattgtttttttatggttttttaggagaattatattgtaagagaatgttttgttaaggtaaagtttttttttttgggataatgttttattttttttagttttaaagtttttatatagattttgatttaatttgtttataagtaaagttagtttttttggttattatgatttagagttttattttaagtttg

SEQ ID NO: 1992 - DNA, 2500 bp, Artificial Sequence
  chemically treated genomic DNA (Homo sapiens)
tagtgatattatttgggtggtaaggttattgatgaggtaaatgttattttattttttgagttataatttttaaattttttgtaataaatatttattatttttataataagaaaaataaataaattttattagaaaaaaattttaaaatataatgtaaggttgtaattttttttttttagattttattgtattaagtatgtataaaaggtttaagaaataatttttggtttttttaaattttgtgtggaaaggatgtgtgtaaatgtataggtgtttttgattgtatttgtgattatggaaagacgttattatattgagtggtttttttaggttgtgtttattttatttgagaagtgattttaggaagtattaatttgagagtagggaaatgagatagatagtggaagaaagttattattgggtaaatggggttttattttattgggatttttgagagaaagagggatatattgtagcgttattttttttgaggagtaaggaagttgggggtattttttcgtcgtttttatttgttattggtttaaggatgattttagagtatgttaattatttggtatttttagtttttatgtttaggtcgagtacgttttagggatttgagaaattttttatttttttaaaattatatagtatttgttattggaaggtatcgggttgatatacggaagcgtgatgagtgttgaggggatatgggttaggtattaataaaatttattgttatagtattttgttttttttgttaagtattattttagtaattttattgatgattttgttttggtggggttgggattgtggcgggaagggagtaggaatggtagggatgtagtaggtttataagggaaattttgtgattgggtttggtgttattttgttttttgttaaatgtttgagtgtttatttaaaaggttgattttgtttgatgattttgggaatatttaaaataaaagatgtgaaatttaggttttaatattaatttagtatggttagaggaattgaagaatgtattatgaaaatatgatattagaatttagagatgtttatttatgagtttggtaaggttttaaaaatttttttatgatgcgtttgagtttttttgtatataaggtaaaattttattaattcggttagtttataaaattttttataaatcgttttatgatgtgtttgaaatattttaggttgagttatttgttgataatttgttttttatttttgatatttcggttgaggattattttttttaaaatagaattgttaattttttggagatttgtgattattgtgtgttagtaatgttagtttattaggtatataaatatttatttattggtgttaagtaggtagtaatagaattttggattttagttgttggagaagaaataaagatttttagaattagaattataaattgtttattttatggttgaggaaattgaggtcgaaggttatttagttaatttgatgtggagttggaatgaaattttattatttcgttttatgaagtcgtttttgtataaggttgattggcggtttattttggttggttgatgaaggatattggttttataatttagcgattcgttttaagtgttagattagtttttttatagtgggatttgatatttttttcgtattggttattgagtggttggtagtaattttattttttatggtttttttgggttttttagttttttagattttaaattggttaggattgtgtattttagaaaatattgatcgattatttaagaatattgttaattagttagaacgaattgttatgggattttaatataatattttggagtgttagatatagagagaagatatagttgggagttggtatatttaagttttttggtttggttttttttttattttggtggaggtaattttgaagataaataaattatgtgagtaaattattttatggtgaggttaagtttattagagattaaatgtttagaggggaaaagggaagttgatttttttgatgatttaaaaagaacgttagttgaagttaaagtataatattttagggttattcgttggttggtggaggaaggtatggtttttttatagggtaaggatagataagataggtagataattatagtttgtgtttgggtagtgtatgtgtaaatagggcggagaatttgtaggttattaagttaaggaaataatttttttttgttgttatgtatttattagtaaaattggaataatttttatttttttttattgtttggaaagattaattaggataaaatagaaaaagtatatagagaattattaagaatgtagtgtgtgttgagtagatattatttatgtatttgttatttatttttttatttatttatttatttatttatttatttattttattatttatttatatattttatttttatttatttatatttatttatttatttatttatttatttatttatttatttattatttattattt

SEQ ID NO: 1993 - DNA, 2500 bp, Artificial Sequence
  chemically treated genomic DNA (Homo sapiens)
agatgatagatgatagatagatagatagatagatagatagatagatagatagatatagatagatgaagatgggatgtatagatagatgataggatggatagatagataaatgggtggatagataaagagatagatgatagatatatagataatatttatttagtatatattatatttttggtagttttttatgtgttttttttgttttattttaattaatttttttaagtaataaaaagaaatgaaaattattttaattttattaataaatgtatggtagtagagagaagttatttttttggtttaataatttataagtttttcgttttgtttgtatatgtattgtttaagtataagttgtaattatttgtttgttttgtttgtttttgttttgtgggaaagttatgtttttttttattagttagcgggtagttttagaatgttgtattttgattttagttgacgttttttttgaattattaaagaggttaatttttttttttttttttgagtatttaatttttaatgaatttaattttattatagggtggtttgtttatataatttatttatttttagaattgtttttattaggatgggaagaggattaggttagagaatttaagtgtgttagtttttagttatgttttttttttgtatttgatattttaaaatattatattaggattttataataattcgttttagttgattagtaatatttttaggtaatcggttagtgttttttgaagtatatagttttgattaatttagaatttaaggaattaaaaggtttagaaaagttataaagggtgaaattattgttaattatttagtggttaatacgaggagagtattaaattttattatggggagattgatttggtatttagaacgaatcgttgaattatagaattagtgttttttattagttaattagaatgggtcgttaattaattttgtgtagaggcggttttatgggacgagatggtggagttttattttagttttatattaagttggttgggtgattttcggttttaatttttttaattataaaataaataatttgtgattttagttttaaaagtttttgttttttttttagtaattaaggtttagaattttgttgttatttgtttaatattaataaatgaatatttatgtgtttggtagattgatattgttagtatatagtggttataggtttttaagaagttagtaattttattttggggaagataatttttagtcgaggtgttaaaaataaaggataaattgttaataaataatttagtttgaggtattttaaatatattataaaacgatttgtgagggattttataggttggtcgggttgatggaattttgttttgtatgtagaagaatttaaacgtattataaaaaaatttttaaaattttgttaaatttataaataaatatttttgagttttgatattatgtttttatggtatattttttaatttttttggttatattgggttaatgttgaaatttggattttatattttttgttttgaatatttttagagttattaagtagggttagttttttaaatgaatatttaagtatttgataggagataggataatattaagtttagttataggattttttttatggatttattatatttttattatttttgtttttttttcgttatagttttagttttattaggatagaattattagtaagattgttgaggtggtgtttaataagaaaagtagaatgttatggtagtggattttgttggtatttggtttatatttttttaatatttattacgttttcgtgtgttaattcggtgttttttaatggtaagtgttgtgtggttttgggaaggtaaagagttttttaggtttttggagcgtgttcggtttgggtatggaggttggaagtgttaaatagttgatatgttttgggattatttttaaattaatagtagatgggagcggcggagaaatatttttagtttttttgttttttagggagaataacgttgtagtgtgttttttttttttttagaggttttagtaagatgaagttttatttgtttagtagtggtttttttttattgtttgttttatttttttgtttttagattggtgttttttgggattattttttaaataaagtgagtataatttaagaaagttatttaatgtaatgacgtttttttatggttataaatgtagttagagatatttgtgtatttatatatattttttttatataggatttaagggagttaaaaattattttttgagttttttatatatgtttagtgtagtgggatttaaaaaaaggaaattatagttttgtattatattttagggtttttttttagtaaaatttatttattttttttgttgtaaaagtgatagatgtttattgtagaaaatttagaagttatagtttaaaaaataggataatatttattttattaataattttgttatttaggtggtattattg

SEQ ID NO: 1994 - DNA, 2460 bp, Artificial Sequence
  chemically treated genomic DNA (Homo sapiens)
agtattttatataaaagtatttagaggttttttatttgttttgagtatgttttagatgtataaatattatttattttaaattttaaattaaaaggtgtattgtaattgttttaaataaaatattagttaagattgaaatatatataaatttaaagtaatattttttttttttatttatgtgaagggagtttagttaataaattttaggatatacgtcggaggaattgtttagtaatatattttaagtaagtaagtatttaataaaggaatttatttttagttttttaaagataaatattataaatttattttatagttaagttgcgaagttagttttttgttgtagatttttttaaatgtttgtttgaataagatggggggtaaaattgattttgaagaagtgaagtttattagtgaaatgtatttagggtgtttatttgggggggtattttgaaaaaatgaagaaaaatatttagttataggtttagttttatataaatttgtttgtagtatgagggttatgaaggttgatgagtggaattttagttttgggagaaaatttttttttgtgagtatttaaattaatatattagaaattatagtatattttagagaatatggtagaaattgtgaaaaatagagtaagatttttttttgtttttaataataataataataagttttaaggattatattaataaagtagattgattcgtttaggaataaaatttttaaataattttgtgaaagataagtattttttattgtagtaaaaataatgagtatgatttttttttttcgatgaagattttgtttaatgttttaaaaatattttgtagtgatttttatttttattttttttttttttagttttttttttgaatatggaattagagtgttttttgttgtgaagtatttttgggaaagaggcgttaattttgtatcgtttttgagtgtaatatatattttttattttaaatgggagtttataatgatattgtgtggaagggattttaggtttttgtgattattattatgtttttttgagttgcgtttttggaaaaaaatgtgaaggaggtagttttttggaatgaataaattttgtcgtttgtttgtaattatttattaaaatagattaaagaaataggttaaaaaggaattcgttatttatgttagagatagtataataagagtatatagaaagggaaaattaatattagggaggaaggaatgttagatatgtgtttttaagaatacggttatgtttgtattgttggtttatacgtagatatacgttcgggttttttatttggtagggtgggttgtgttgatgaaaacgtgggttattaatattgatgtgtatgtttttaattaatattagaattgagtggtaaatataattaggagagtatttaagagagaaatgggttaaaagagaagttaatgtgtagagaggagggggaagagacgggttggagagaagaaatcggttagtttttgtttagatgggtttaatttagttatttgagttaaaattggaaatttgttttttagtataattgtttttgtgtttagtgggtgttgtttttgtaggcgttttttattgtaggtgaattttataaatagtatattattattaaattattttgggggttaattttttttatttgtgtttttagtttttacgtaagtatttttatagtgttttttaatatataggatttattttcggttttgagaagagtttttaaatttaattttttattggagtattaatttgtttttttatttttaaattagtattttcggttaatttttattagaaacggtagatttttttagtatggttattcgagaaatataggtttgtgttaattttttgttttgttttgtggttgtttttgtttgtgattgttgggagaataatagggtgggggagattttgatgatggtcgttgatattatttttgtatttttgttttttaaagtttaaagtatataattggaaatatttgtggacggttgttttaaaaatatttttaattatattcgtttaaagaaaataaaaattattatttatttttaaaaaaaggaatgttagaatttatttttgtttttttattttggttttttttatgatatttgagtggaataatatgttatgatgtttatgtatgaaaaatagaatatatttgtatatgttatgaggaagaaagttgtttttaggaaaacgaattttttttttttttttttatgttttaggaaatgatttattaaagtaataaaataatttattgggaaagtagtgttatttataaaaataattagtttttgatttttttttatttttataaggttaatgtaataaggatgttgtagaggtaaaaatgaattcgaatttttttaattatatgaatatttatgaattttattgtagtttttatgtaattattttattta

SEQ ID NO: 1995 - DNA, 2460 bp, Artificial Sequence
  chemically treated genomic DNA (Homo sapiens)
taaataaagtggttatataggagttgtaataaaatttataagtgtttatatggttaaaaggattcgagtttatttttgtttttgtaatatttttgttatattagttttataaaaatgaaaggaagttaaaggttgattgtttttataaataatattgtttttttaatgagttattttgttattttgataaattattttttaaaatataaaaaaagaaaaaaaaagttcgtttttttagaagtagtttttttttttataatatatgtaagtgtattttgttttttatatataaatattatagtatattattttatttaaatattatgggaaaagttagaataaaaaagtaaaaataagttttggtatttttttttttaaaaataggtagtagtttttattttttttaggcgaatatgattagaaatatttttaaggtaatcgtttataggtatttttagttatgtattttgaattttaagaaatagaaatataagaataatattagcgattattattaaaattttttttattttgttgtttttttagtagttataaataaaaatagttataaaataaaataaaaaattaatataaatttatgtttttcgagtggttatattaaagaaatttatcgtttttgatgaaagttaatcgaaagtattggtttaaggatgaagaaataaattagtattttagtgagggattaagtttaaaagttttttttagaatcgaagataaattttgtatattagaagatattataaaagtatttgcgtaagagttaaaggtataagtggaaaaagttgatttttaagatggtttgatgatggtgtgttgtttataaaatttatttgtaatgaaaggcgtttgtaaggatagtatttattaaatatagaagtaattgtattagaaaataggtttttagttttgatttaagtgattaaattaaatttatttgaataagggttgatcgattttttttttttaattcgtttttttttttttttttttatatattggttttttttttagtttattttttttttgaatgtttttttagttatgtttattatttaattttaatgttaattagagatatatatattagtattagtaatttacgtttttattagtatagtttattttgttaaatgaaaaattcgagcgtgtgtttgcgtgtaagttaataatgtagatatggtcgtatttttgaaagtatatatttaatatttttttttttttggtgttaattttttttttttatgtatttttattatgttatttttaatatgggtggcgggtttttttttagtttatttttttaatttattttaataaataattataggtaggcggtaggatttatttattttagagggttattttttttatatttttttttagaggcgtagtttaaggagatatggtgataattatagaggtttggaattttttttatataatgttattatgagtttttatttaaaatgaaaaatgtatattatatttaaaagcgatataaggttagcgttttttttttaggaatgttttataataagggatattttggttttatatttaggaaaggagttggaggaagaaggaatgaaaataaaaattattataaaatatttttaagatattaaataggatttttatcgggaaaaaaagattatatttattgtttttgttataatagggaatatttattttttatagggttgtttgagaattttatttttaaacggattaatttattttgttagtatggtttttggggtttattattattattattaaaagtaaaaagagattttattttgttttttataatttttgttatgttttttaggatgtattataatttttaatatattgatttaaatgtttatagaaaagggtttttttttagggttgaagttttatttattagtttttatgatttttatattataaataggtttgtatagagttgagtttgtagttgaatgtttttttttatttttttaaaatgtttttttagatgagtattttgggtatattttattgatgagttttatttttttaaaattaattttattttttattttatttaagtaaatatttaagagagtttgtaatagaaaattaatttcgtagtttagttgtagagtgggtttgtaatatttatttttggaggattgggaatgaatttttttattaagtgtttgtttgtttgaagtgtgttgttaaatagttttttcgacgtgtattttaaaatttgttaattgagttttttttatataaatggaaaaaaaaagtattgttttgaatttatatatattttagttttgattaatgttttatttaaaatagttatagtgtattttttgatttgaagtttaaagtaaataatatttgtatatttgaaatatatttaagataaatgaaaagtttttagatgtttttgtgtgagatgtt

SEQ ID NO: 1996 - DNA, 2463 bp, Artificial Sequence
  chemically treated genomic DNA (Homo sapiens)
ttatgaagtgggtggggaggaaagatagatttaaaaatttattagtatttaattttgttaagattttttttattatatgttagtataataatttatttgaaatgtgtattaattatttttgttgtattttgtgtgtacgttttttacgtagtttttgattttttcgttaataattttgcgttgtattcgttgatttgaaataaattgaatttagtggtatttatttaagaattgaattatatagtttttttaattggtgttttatttaaatgtgagaaagtaacggtttgttatttgtaatacgtttttaataaaataaaattagaattttaatatttttttttattttagggaaaggtttggttatgaaaatattatttttgtatgattttaaaaataaaattttttgaattttttttattgttaatgtcgtgaaaattgtttatatagatatatattaattggagagatttatgtaaattagttgggttaggaaggttttttttggaagtggtttttaaaataggcggtaatttgttttcgttgttaatagttatattgtttttttttttttagtttttggatttcggattatgtgatttaatatattttcggttggtaaaataggaagcgttaagataggaatatgttaagtatttgaagatattttttattgtatttgttagttttaagtttttgagtcgtattgtttgttggttggagggggtagaaatttaattttaggagtttagtgatgtttttttattgacggttttataggtaatagatattgcgggtaatattgtttttaatatcgtttatttatgttttttttcggaggatttttgtaagcgatcgaatagataggagtagttggaaattttgggttttgttttttaattttagtgtgaaattaattgttttaattgtaaagaacgatttatttttttatttattatatttaatttaaaaatgtaaatgttattagtggattgattattgataagggtgtttttgtgttcggttttaatttttattagtgaggattatgaggacgtagttatattggtattttttaagtgttatcgtgatagtatttgttgtataaatgtttagttgttatcgtgagttttattatttagttttttttttcgaatgtagattaataagtttagaaattataattgtttttttgtcgaatttgtgataggcggaaataatgatattagtgttttgttaatttttttgtttttgcgtttggtattgttttattgagttatttgttatatttcgttttgatgaggcgaatttaatttttttgttgtaatgataatggggttattttaatgtttggaaatgattatgtggaagttttatcgtgttttgttttggtaagtaaattaaggtattgtgtacgttaggagagcgggttttggttgttaggtaggtagtggagatgttgagttattattaggatttagacgtagaagtcggttttattttgagtttttggtggtggttttgtaggagggaagaaggatggggaggggaaaggtgggattattgttgtagaagtatagttattggttaattttttagttgtttgtataaatttgtttttagaagggttttttaggttatttgtgttgtttaaggaggttagggtggttggagtttataaataatcgtggtgatattattaatattatttgttggggtttttggtgtgtggattgtggattttttttttaggatattaattgaattaaattatttttatattaggtttgattttttttggttttttgagaataatattgttgtagaataaaaaaatatatataatttggaaaatattaggtgttaatgaggatttggagtaattagattttattattgatgttgatttttaaaattattttagaaaagtagtagtttttattgaagttagatatatataaatttagtaaattttgtattgatatagaatattttatatatttataaagtgtatgtgagtatttgttatatgtatagaatgttaaaattagtaattttgtttttaggtagataattaatagagatgtaagtgtgtatttgataaaatatatgaattagaatgtttatagtagtattttttatgataatgttaaattgtaattcgtttaaatgtttattaatagtagaatgttttaggagttggtttttggtggaatattatatagttatcggaatgaatgaattataattgtgtggatggattttataaataggatgttggatgaaagaaattaagtatgatagagtatatatgtaaagaattttaggttgggtacgttgatttatgattgtaattttagtatttcgggaggttgaggtaggtagattgtttgaggtcgggagtttaagattagtttgattaatatgaagaaattttgtgtttattaaaaatataatatatta

SEQ ID NO: 1997 - DNA, 2463 bp, Artificial Sequence
  chemically treated genomic DNA (Homo sapiens)
taatatattgtatttttagtagatatagggtttttttatgttggttaggttggttttgaattttcgattttaggtaatttgtttgttttagtttttcgaagtgttgggattatagttatgagttaacgtgtttaatttggaattttttatatatgtattttattatgtttggttttttttatttaatattttgtttatgagatttatttatatagttgtagtttatttatttcgatgattgtatggtattttattaaaaattaatttttaaggtattttattgttgatgggtatttggacgaattatagtttggtattattatgaaggatgttgttatgaatattttagtttatgtgttttgttaaatatatatttgtatttttgttggttatttatttaggaataaaattgttggttttgatattttatgtatgtaataaatatttatatgtattttataaatatgtaaaatattttgtattaatataaaatttgttgggtttatatatgtttggttttagtagagattgttgtttttttgaggtggttttagaaattagtattagtagtgggatttggttgttttagatttttattgatatttagtgttttttaagttatgtgtatttttttgttttgtagtagtgttatttttaaagaattaggaaagattaggtttggtgtaagagtaatttgatttagttaatgttttgaagaggaaatttataatttatatattaaaagttttagtaaatgatgttggtagtgttattacgattgtttataagttttagttattttggtttttttgaataatataggtggtttgggaaatttttttagaggtaaatttgtgtagataattaagagattagttaatggttatgtttttgtagtagtgattttattttttttttttttatttttttttttttttgtaaggttattattaaaggtttaaaatgaagtcgatttttacgtttaaattttaataataatttagtatttttattgtttgtttgatagttagagttcgtttttttggcgtgtatagtgttttggtttgtttgttaagatagagtacggtgaagtttttatataattatttttaaatattaaaatggttttattgttattatagtagggagattgaattcgttttattaaagcggagtgtgataggtgatttaataggatagtgttaagcgtagaggtaagaagattagtagggtattgatattattattttcgtttattatagattcggtagggaggtaattgtaatttttgggtttattagtttatattcggagggaaaaattgagtgataaaatttacggtgatagttaggtatttgtgtagtaagtgttgttacggtgatatttagaaaatgttaatgtggttacgtttttataatttttattaatagaggttaaagtcgggtataaaggtatttttattagtgattagtttattaataatatttgtatttttaagttaaatatagtaagtaaaggagtaagtcgttttttgtagttgggataattaattttatattggaattagagagtaaagtttaaaatttttagttgtttttatttgttcgatcgtttgtaagaatttttcgaggaaagatatgagtgaacggtgttaagaataatgttattcgtagtatttattgtttgtgaagtcgttaataggagaatattattaaatttttgaaattagatttttgttttttttaattaatagataatgcggtttaaggatttaaaattaataaatgtagtggaaaatatttttagatgtttaatatatttttgttttaacgttttttattttgttagtcggaggtatattaaattatataattcgaaatttaagagttggggagggaaaggtagtataattgttggtaacggagatagattgtcgtttattttaagggttatttttaggaaaagtttttttagtttagttgatttgtataaatttttttaattaatatgtgtttatataggtagtttttacggtattggtaatgaaaaaaatttagagaattttatttttgagattatataagaatgatatttttatggttaaatttttttttagaatggggaaaaatattagaattttaattttattttgttggaaacgtattataggtggtaagtcgttatttttttatatttaaataagatattaattaagaagattatgtaatttaatttttgagtgagtgttattgaatttaatttgttttaggttaacgaatgtaacgtaaagttattaacgaaaaggttaggggttgcgtagaaagcgtatatataggatataataggggtaattagtatatattttaaatgggttgttgtgttggtatatggtggagaaaattttaataggattagatgttaataaatttttaagtttgttttttttttttatttattttatga

SEQ ID NO: 1998 - DNA, 2499 bp, Artificial Sequence
  chemically treated genomic DNA (Homo sapiens)
gttgtagattgagattttttgtttatttggagggtgaatttggggtgttgaagggtattggggtgtttagggttttttatgtttttttttagtgttatttttgggattttattttgttagagtttttgatattttatgagaaagttggaaatttaggttttttttttttttaattagaaatgttaggatttaaaaatataagtagttaattaaaaatttaaaaatttttaattattgtgtaagttaaatgaaataggtataataaatatgagttgttatgtttttaggtgtttggttagttgggatataggtgaggggttgacggtaggtgtaggtgatttttttgtttattgtttgtttattttatgtgttgttgtttggatttattaatattgtttgttttatatttttgtttgaagaaagttttgttacgtgggtgagttttgtttatattgagagtagggttgagttgtagttagttataaagtttatttttagtgggatattataagggtttatatgaattgaattaataatatttttatatttgaggttatataattttaaaggaaatgtgatttttatagagagaatgaagatgtttttagtatttttaaatatatcgagcgttttttaataagtgtattttttttattttgtgtattttgtgtatgaaagttttttgtgaggttatgtttatgaaaataaacgttttttttttttttttttataaaagcggaataatgaaagataaggttaaggttatattatggttatagtggttgttaataagttttttgagattgtttttttttgttgaaattagttaatgaattggagttttttattgagtttatagaaggtagttttttagatttgggagtagataattagagagatattttttttatgtagtatgttgaagggtattatttggttttgtggttatattagttgagtttggtttaggattaatttcgttaattattataggtggatttttggtttaaggaagtaaataaggttttggggtatttttttatggtcgttttgggattttttagaagtgataagtcgttaatttggaagttgtttgggtgataatgattttcgaatgggtttttatgtggacgagtaatatgatttaaggtattagggatattagaaaggatattttttatgtagtttgaaatgtgagtagagagtaaaatagattttaaaagacgagtatcgtcgttttttcgatattataaagtgttttttgagtgataatagtgtatttttgtgtatgaattgtatttaagttttgtatttttggaaaataataatttgtgttttttggttattatagatttagtatgggtttagaggttttatgtgtgtaggattttattcgtgtaatttttttagtgattgggagaggtaggagtggtttttgtttttattttataggggaggagacggagatttttaagttagtgaaggatttagttgggattttttagttgaagtttgtggattttaaagtttgtgtttgttgaggattaagagatgatagaatttgtagtggtttggatgtggtaggaatttattttatttatttttttttaagatatgggtggtgggagtcgttaggttgatagagtatttgacgggaagttaaaagaaatttagtttggttagtagtgtgtttggaattattttgtagggtttattttaaattatggggattgttgtagatttattatttatgtaaaaaaaaaaagttttttagtgatgttatgggagggttattgtggattattgtttgattaattacggttgagtagggagagttgttgttattttttttttttttttgtttttgtgaagttttttatttttttattttagttagatgtttttattaattttatttttttttagttttttgggaaatttattatatttgttttttttttatttttgaatagtttttttttgttaattggattttttttatttttttttttattaatgttgtaaaagttgaaagaattgtatagagaaaattacgtatttattatttagatgttataattggtatttgttgtatgtgttggattatatatttggttttttgtttatttttttaatcgtttattaagattttaaaaaaatgtattttaaagtaggttgtagatattatatattcgttttttatatattttagtttgtatattattgattagattttaagatttatttttgttgttttttttgttaagtaaaaatttatagtgaaatgtataatttttatatgtagtattgggtaagttttttttattagtttttaatatatttgttaattttttttattaaaaaattaagttaaatttgtttttattttaggtttatttagttattgtttcgaattgtttttttttatttttaattagatttttcgaaagtattgtattcgttttttttttttagtttttttttgtatttatttggttt

SEQ ID NO: 1999 - DNA, 2499 bp, Artificial Sequence
  chemically treated genomic DNA (Homo sapiens)
gggttagatgggtgtagggagaggttggagagaagaaacgggtgtagtgttttcgaaaagtttgattggaaatgaggaggagtaattcggggtagtagttgaatgggtttgaggtgagggtagatttggtttggttttttaataggagagattagtagatgtattaaaagttaatggggaaaatttgtttaatgttatatgtgagaattatgtattttattgtaaatttttatttaatagaaaaagtaataaaaatgaattttgaaatttggttagtggtatgtaggttgaagtgtgtaggaagcgagtatataatgtttgtaatttgttttgaaatgtatttttttaaagttttggtgggcggttagaagaatggatagaagattagatgtgtgatttagtatatatagtaaatgttagttgtggtatttgggtggtaagtgcgtgattttttttgtataatttttttaatttttgtaatattggtgaaaaagaaaataagaagagtttagttgatagaaaaagattatttaaaagtaaaaagaaaatagatgtggtaagttttttaaggagttgggaggagatggggttgatgaagatatttggttgagataggaaggtgaggaattttatagaaataagagaaaaaggaaaatgatagtaattttttttatttagtcgtgattaattaagtagtaatttataatggtttttttatggtattattgagaggttttttttttttatatagataatgaatttgtaataatttttatgatttaaggtaaattttataaggtgattttaaatatattattaattaggttaaattttttttaatttttcgttagatgttttattagtttgacgatttttattatttatgttttgagaaaagataagtgaaatgagtttttgttatatttaagttattgtaagttttattattttttgatttttaataagtataagttttgggatttatagattttagttagagagttttagttggattttttattagtttagggattttcgtttttttttttgtaaaatgggggtaagaattatttttgttttttttaattattgaaagggttatacgaatgaggttttgtatatataaaatttttaggtttatattgggtttatagtaattagaaaatatagattgttattttttaaaaatataaagtttaagtgtaatttatgtataaggatgtattgttgttatttagaagatattttataatgtcgagagagcggcggtgttcgttttttgaaatttgttttgttttttatttatattttaagttgtataaaaagtgttttttttggtatttttggtgttttaggttatgttgttcgtttatataaaagtttattcgagaattattattatttaagtagtttttagattggcggtttattatttttgaagggttttaaggcggttatggagaagtgttttaaagttttgtttgtttttttgggttaaaggtttatttgtggtaattagcgagattggttttggattagatttagttggtgtagttataagattaaatgatgttttttaatatgttgtatggaaaaagtgtttttttgattatttgtttttagatttgaaaagttattttttgtgagtttagtggaaaattttaatttattaattgattttaatagaaaaagataattttaaaaggtttgttgataattattgtagttatggtgtaattttaattttattttttattatttcgtttttatgaggaaaagaaaaaaaggcgtttgtttttatggatataattttatagaaagtttttatatataagatgtataagatgaaaaaaatatatttattggagaacgttcgatatatttgaaagtgttaggaatatttttattttttttgtagaagttatattttttttaggattgtgtagttttagatataaaaatgttgttaatttaatttatgtgaatttttataatattttattgaaggtagattttataattgattgtagtttaattttgtttttaatatagataagatttatttacgtagtagaattttttttaaatagaaatatgaggtagataatgttaatgggtttaagtaataatatatggaatggataggtagtgggtaagggggttatttgtatttgtcgttagttttttatttgtattttagttgattaggtatttaggaatatagtagtttatgtttattatgtttattttatttggtttgtataatggttagggatttttgaatttttagttagttgtttatatttttaaattttgatatttttgattaaaaaaaaaaaaaatttggatttttagtttttttatgaaatattaggaattttgataaaatggagttttagaggtagtattaagggaagatataggaagttttagatattttagtgttttttagtattttaaatttattttttaaataaatagaaaattttagtttgtaat

SEQ ID NO: 2000 - DNA, 2323 bp, Artificial Sequence
  chemically treated genomic DNA (Homo sapiens)
tgagaatttatgttttttaaaggttttaggtgattttgtataaggggttttcgttatattagttggacgttttgaggtttttcggagtagaatgaggtgttaaggtgttgtgtttaaacgtatggtttggttaagtgttttagtgtagtgatttttagagggttagatgtagcgaaagtgaaaatgagtatgtgggttatttagatattttaagtttattattttgtttgggttagggtgtatgacgtttatttttgtaaaatagagtgagtaggtagggttgttttttttttttgtagttgggaagttttagttagtttgttttattgaatttttagttttcggagttggtttatttttttttagagaaaatagttttattataaatatataaatttgagttggggcgggggttataggtttttgtttaagtttattttgtaaaattgatttttttgttaatgagaatatagttttgtttttattttttttgtgtgttttggtagtttttgtttggttgtaaaatttatttaaggaaaattggtatttattttgggtttatttgtatttagtaaaattgataaatagatgggggttggttaggttacgggtaatttggttagtattttataaaatataaatgttattttttatttttatagggattatttattgtgaattaggaagttattggtttgttatattttaataggattatttattttagttaagggatttatgtttttattataaagtggtggggggtgttttgggtggaagagattttttggtattgttggtaataaaggaataaaatggttttgttgggtttgcgtatgtatatatagggtatttatttgtgaagattgtgaaaaaagaaagaagtaaagaaagaaattaataagatttgatggggaagtttgtaaaggagattagaatttagattaaatgttttattttagtgtttttggagtttttttttttttgtgttttagttaaaggtattgggaggattagagattttattttagttttgtttattttgggaataatcgttggtgtatgaataataatgtttttttttgattatgattaattgaattgtagtttgcgggtagtggggaggggttttgtcgggttagtttattacggcgttttttaagtagttatcgatagtgatggatgtagcggcgttttttagagtgtattttcgaatatttaagagtaggggtatgaatttgtatttcgagtttttattagtcggggtttggtagagaggacgggaatggcggtagttaaagatgagttggttgattaaaaggaagaggagaggtagttttttttttaattttttttttttatatttgattttaagtaagttttgtttatggggataaatgagaaaatatttatcgtgtgattatgtaggttttagtggggttatttttgttgaggtcgtgtttgttaaaagtattgggtttgtttggggtgtagtgggaattttggtttggaaaataaaaaaggtaaaatagttaaagatttgttttgttagaggatgtttagaagttaataaatgaggtagaagaggagatagaaagataagagagaagtaggggtagttggaaacggagtttatggttatgtttataatttaataatggattatatagggattttaatatttggtcgttttgttgtttgcgttgtgtttatatagtagaattatgtagttggggttttgggtttagtcggattttgtttttatagtatgaaggtgatttttggtgaattgcgattcgggaagtttgtgtagtttagtagtttttatggtggtttggatataggggaagtcgtttaattatagggttattgttttttattttagtcggatttagttcgggttaaattttagattggtatttttttatgagagttgtgtacgttattttggttttttttggtggtagaggttggttgaaattttaggcggattttggaggtagatgttggttttaagggagttttggttggtttgttttttttggaaagttttgataaaagtattcggggtaggggttatattttttttgtatttaaaattttgaaattttaaatttttttaaatagttttttataatttttttgttagtttattatgttttaaaaattatttataggttttagtattaatagttattttattgtatagaagttttttagttttttttttttatttaagaatgagatattttttgtttattttgaattttataggaataatttagggtgttttgtttttataaataaaaaatttttaaaaaat

SEQ ID NO: 2001 - DNA, 2323 bp, Artificial Sequence
  chemically treated genomic DNA (Homo sapiens)
attttttaaaaattttttatttataagaataagatattttgagttatttttgtaaagtttagaatgggtagagagtattttatttttaaataagagaagggagttgagaaatttttgtgtagtaaaatgattgttggtattaagatttatggataatttttaaagtatagtaagttaataaaaaagttataagaaattgtttggagggatttaaaattttaggattttagatataagagaagtatagtttttgtttcgaatgtttttattagggttttttaagaggagtaggttaattaaagtttttttaaagttagtatttgtttttaaaattcgtttggagttttagttagtttttgttattaaaaggagttagggtggcgtgtatagtttttataaaaaggtgttaatttggggtttggttcggattaaattcgattgagatagaaagtagtgattttgtaattggacgattttttttgtgtttagattattatagagattgttgggttgtataagtttttcggatcgtagtttattaggggttatttttatgttgtgagaataaagttcgattgagtttagggttttagttgtatggttttgttgtgtaaatatagcgtagataataggacgattaaatgttagggtttttgtgtgatttattgttggattatagatatggttatagatttcgtttttaattgtttttattttttttttgtttttttgtttttttttttattttatttgttggtttttaaatattttttaataggataaatttttggttgttttgttttttttgttttttaagttagggtttttattgtattttaaataagtttagtatttttaataggtacggttttagtagaggtggttttattgaggtttgtatggttatacgatgaatatttttttatttgtttttatgaataaaatttgtttaaaattaggtgtgggaggaggaggttaggaaaagggttgtttttttttttttttttaattaattaatttatttttaattgtcgttattttcgttttttttgttaggtttcggttaatagaaattcggaatgtaggtttatatttttgtttttaggtgttcgaggatgtattttgggaagcgtcgttgtatttattattgtcggtggttatttgagaaacgtcgtgatggattggttcggtaaagtttttttttattgttcgtaggttgtaatttaattagttatggttagagggaggtattattatttatatattaacgattgtttttaaagtaaatagagttgggatgaggtttttgatttttttagtgtttttagttgggatataaaagaaaaaaaattttagagatattggggtgggatatttgatttgaattttgattttttttgtaagtttttttattaaattttgttgatttttttttttgtttttttttttttttatagtttttatagataagtgttttgtgtgtgtatacgtaaatttagtagggttattttatttttttattgttaataatgttagaaagttttttttatttaggatattttttattattttataatagggatatggattttttaattggagtgaatgattttgttagaatataatagattaataattttttaatttataataaataatttttgtaaaaataaaggatgatatttgtattttgtaaagtgttaattaaattgttcgtggtttggttagtttttatttgtttattagttttgttgagtataagtgaatttaagataaatgttagttttttttggataaattttatagttaagtagaaattgttaaagtatataggagaggtaaaagtagagttgtgtttttattgatagaaaagttaattttgtaggatggatttaggtaagagtttgtgattttcgttttaatttaagtttgtatgtttataatagggttgttttttttgggagggaatgagttaatttcgggagttgaaagtttaatggagtaggttggttggggttttttagttgtagggggaagaaatagttttgtttgtttattttgttttgtaggagtgagcgttatgtattttggtttagatagggtgataaatttggggtgtttggataatttatatgtttatttttattttcgttgtatttgattttttgaggattattgtattgggatatttgattaagttatgcgtttagatataatattttagtattttattttgtttcggagagttttagagcgtttagttgatatgacggaaattttttgtgtagagttatttagagtttttaagaaatatgaattttta

SEQ ID NO: 2002 - DNA, 2466 bp, Artificial Sequence
  chemically treated genomic DNA (Homo sapiens)
gtttgaaataaataaataaataaataaataaagggtttttatgtatgatgtttgtgttttaagtaattcgggtaagagtgatattattgtttgtttattagtatttgtaaagaaaaattaattattgttagttttttttaaaaaaatgtatttgttaaaattgtttgatgatatggaaatttatattgaggtgtttatatttaggggtaattaagttttttttgtagttggggtttataattatattttttttattttataaaaattaaaagtttaggaattacgaggaaggagtaagaataaatattattataaattttaaattaatagcgttgagagattatagtagttttattttgttatttggggttagagattgtttatatttattttgtggttagcgtttattggaaagtaacgtagtatatattacggttgtgtttgagttgatatttattaatattgaattaattgtattttaatttaaagatttcgtaagtgtttttttttttaattgggaatttggtagaatgttatatttaaatattaaacgttgttaattatgttagcggtattttagtttggataaaatgttttttttattgtagttaattgtttgaatatttgtagattgatatattttttgtagatatttatgttgttttttttttataattttattttattttttttttatttttggtgttgatttaaagggtttttattattttatgttgataatttgtgttttatggtcgttggtgtgattgggagtagttgaagtcgcgtgtaataatatatatatataaatatttgaataggaaaaagaaggtttgtttgatgtagattaaggaagaaatgtatttaaataaataatgttattagagggattttgattttgaattacgaataggtagggttagatttggaagggtatttttttattgttcggtttgtacgggtgggcgttagtgttacggtttattttaaaaagtaggtttttttaggttttatggtatagggagtcgagttgggtttatgttagtaggtttatgacgttattgttgtagtttgtttatttggttaggattattaaaataattttttttgagaagaataaatttgtttttgtagaaagttaaagatttgagaggttttaattagtttattttgttttcgtttttggtcgttaaacgttattgtagagtttaaagaatatgatgttgtgtgttttttttttttatttttgcgtgggggttttttttttttttttagtattttttgtgaatagttgaaaatgagtggtaaaatgatattcgatttagaaagtaagagtattaggaagtaaaattggaggtaaatatagtagttaattttattaggtatagttggtgttgttcgcggttgtttttgatagcgcggtcgatatagaattatttgtgtttgtttattagttttttttaatttgcgagaaaatggttcgggtcggttatatggtagttagataggttaggtattatgggaatataaaagtcggagtttttagtagagttaattattaatgcgttttttttttgttttatttaggagtgttgatagggttttgatagtttgtatttgttattagtcggttgtagttttagttaggtattaatgagatttttggttttaggttttttggtagagtttagagtttagtttggatttaggtgttgttattaatttgaagtttgtttgttttttgagtttttttttgttgttcgttgtgtttttattttttaggttttgttttggttgattatttatttgtttggaattttgtacgtttttgtaaagtatttgtttgagtttagcgaagtaaggttaggaaatgtgtgattataaagtttataattttttttttttttgtgttattttttttttagttaggaaaaaaaaaaaaaaaattagaaagttaagttgaattttttttttgtttgtttggatgtgtattaaggatggattgttttgttttaatattagtggggtgttttttttttaaaatttagtttagagagttatttacgggtatattttaatatttttatttagtaagtaaaatgtaggtgtttttgatagtaatttttttaaatagaaaattttattttaatatttttaatggtaagtagtttgtgtgttaatatgattggagttagggtgaatgagaattatattaaaattttttagttattagtttttttttttttttttttttttttttgtgatggagttttgttttgtcgtttaggttggagtgtagtggtgcgatttcggtttattgtaattttcgttttttgggtttaagtaatttttttgttttagttttttgagtagttgggattgtaggcgtatgttattatttttggttaatttttgtattattagtagagatggggttttattatattggttaggttggttttgaat

SEQ ID NO: 2003 - DNA, 2466 bp, Artificial Sequence
  chemically treated genomic DNA (Homo sapiens)
gtttaagattagtttggttaatgtggtgaaattttatttttattaataatataaaaattagttaggagtggtggtatgcgtttgtagttttagttatttaggaggttgaggtaggagaattgtttgaatttaggaggcggaggttgtagtgagtcgagatcgtattattgtattttagtttgggcgatagagtaagattttattataaaagaaaaaagaaaaaaaaaaaagaattggtagttggaaggttttaatgtggtttttatttattttagttttagttatgttgatatataagttatttattattaaggatgttaaggtgaggttttttatttaaaaaaattgttgttagggatatttgtattttatttgttgagtggaaatattagaatatattcgtgggtgattttttaagttaagttttggaaagaaaatattttattgatgttagggtaaaataatttatttttggtatatatttaaataaataaaaaaaaaatttagtttagttttttaatttttttttttttttttttagttgggggaaggatgatataggggaagagaggattatgggttttataattatatattttttagttttgtttcgttgaatttaggtagatgttttgtagaaacgtgtaggattttaggtaggtgggtgattaattagaataaggtttaaggagtgggggtatagcgggtagtaggagggagtttagggggtaggtaggttttaggttgatggtagtatttgggtttaggttgggttttgggttttgttagggagtttggagttaggggttttattagtatttggttaggattgtagtcggttgatggtaaatataggttattaaagttttgttagtatttttgaatgggataaagaaaaggcgtattaatgattaattttgttaaaagtttcggtttttgtatttttatggtgtttggtttatttggttgttatgtgatcggttcgggttattttttcgtagattggggaaagttagtgagtaaatataggtggttttgtgtcggtcgcgttgttagggataatcgcggatagtattagttatgtttggtgaaattagttgttgtgtttgtttttagttttgttttttggtgtttttattttttaagtcgaatgttattttgttatttatttttaattatttataggaggtgttaaaaagggggaaaaggtttttacgtaaaaatgggaaagggagatatataatattatgttttttgaattttgtaataacgtttggcgattaaaggcgagggtagggtaaattaattaaaattttttaggtttttaattttttgtaagagtaaatttattttttttaaagggaattattttagtgattttgattaaataagtaagttataataatgacgttataagtttgttggtatggatttagttcggttttttgtgttatggggtttggaagaatttgttttttaaaatgggtcgtggtattagcgtttattcgtataagtcgggtaatgagagggtgtttttttaagtttgattttgtttattcgtggtttagagttaaggtttttttagtggtattatttgtttaaatgtattttttttttggtttatattagatagatttttttttttttgtttaaatatttatatgtgtgtattattgtacgcggttttaattgtttttaattatattagcggttataaagtatagattattagtatgaggtgataaaggttttttgagttaatattagaaatgaagagaaaatgaaataaagttataaaaagaggatagtataaatgtttataaagagtatattagtttgtagatatttaagtaattagttataataggaaagatattttatttaaattaaagtatcgttgatatgattaataacgtttgatatttaaatataatattttgttagatttttagttaagaaagagggtatttgcgaagtttttggattggaatgtagttagtttagtgttagtgaatattagtttaaatatagtcgtggtgtgtgttgcgttgttttttaatggacgttgattatagaataaatgtgagtagtttttagttttaaatggtagggtgaggttgttgtaattttttagcgttgttggtttgaggtttgtagtggtgtttatttttgtttttttttcgtggtttttaaatttttgatttttgtgaaatgaaggaaatatggttataggttttagttgtaggggagatttggttgtttttgggtataagtattttagtgtggatttttatgttattaagtaattttagtagatatatttttttgaagggggttgatagtaattggtttttttttgtaagtgttgataggtaggtagtggtgttatttttgttcgaattatttagagtataagtattatatataaaaattttttatttatttgtttatttatttattttaaat

SEQ ID NO: 2004 - DNA, 2473 bp, Artificial Sequence
  chemically treated genomic DNA (Homo sapiens)
tttagtttataattagtttttagtttatggtggtttttttttattttttaaatgttaaagtttttagttttttattttttttttatttttgattttaagtttttaaattgggtgattattaatattattgttaggagtatttttagagtattttatatttatagcgtttttttttttttaaattgttttcggtttttttttcggaataggtattaaaaatattttattggataaatttttttttttagaagatatattatgaatatggttggagaaggtaggattataattcggagaatttagggttgattttttttatttttttgtttttttgttgtaaagttcggagttttaggaagtgtcgttaaattattttttattttttttttaagagtagggtagaataaattgttattttgtttggttttgttttttatatataaggttttttaggttttggaatttaggttattggtattttaattaatgttaatgattgggatgattttttttttattgaatttgagtaagggaaataaataggtaaattcgaataaagttatgtgcggatgtggtattttttagaaaagttgattttttcgatggttggttagggtttttaattaggtttatattttttttttatatatttttaattttgaatttttttagtttaaatagaaattggttgtagggggaagtaggtagatttttttttttaatatataaatgattttgggttttcggaattagaatttttatttttttattattaggagtatttttattttgagattaatataattagaatgtgtttaattataattttataataatagaaaagatatatagtaaatgtttttaaatatttggaatttggttttgaaatcgatttggtatttaaatcgatatgtatattttagttgggttaaaatatagttaaggttttttttagagatattttgttttatttttttttttaagtaaatttttatttttttttttaatttttatagtttaagcgttttatttagtttaaacgttagggatttaaattgttattttagtggaagaggtttgattaaaatttgtgtttttattaaattattggatagtggtttttgggttttgtttatattagtgttaattttaatttaaatttcgtataattatatttgtttcgttaaatgtatttattaggaatatattataaattattttgtattatgagtcgagtttttttgtttattgtaaagtgttttgaaattagtattataagtaattagttgtaagtgttattttatttttttaatgttttattaattaaattttatggtagttgatgtgatgtttaagtttttaatatataagattagtattatttattttttgtatttgattacggtttttaaatttgatttgttatttgtgtatttgttttcgttggagttttgttttttttttagtggttttttaatacgtggggttttgtatggatattagttgtatgtgtattttttgtagaaattggaaataaaaatttattttttatgttgtggaaatgtatagttttaaagttaggaaatttttttaatggaagaagagttttatttatttttttgagttatttatagtgattttttatgatttttagattaatgttaaaatgttataatggaaaaatttttttgggtaagtttttttttatgttaagaattagagaaaggaattacgtttatttaggtagattataatttttattttggttttagttttttaaaaaattagatatatttagtttaagtatttaattaggaaaaaaaaatgtattttttttttattatgtgatacgaattattttgtattaaatataaaattttagaatttatgtttgtaaagaaatatagaataatttatatttaataattttattatatgtatatataaaattatagtaaaatatgatatattttataggatttttttgtttttttatgatgttatcgaatatttgtaaatgtttaaatggaattttttttttattttttatataagtttaaaaatataaatatatacgtatatatatatatttatatatatgtatttttttaattaaaggtaatatttattggtgttaaaattaatagttttattggataatggttttatggatattttagaggtagttttaagtttgttgtgggtataggtatgtcggatatgatttttttgtagggatgttttttcggtggttgtgggggatgtttgcggtttttcgtttgttagcgttgagtttagttttatagtgagtcgagatgaataggtgtttttttttttggcggcggcggtacgtgaggtcggttttttgtagaatagcgttttagtgggagatttttagttttacggtttttttttttgattatttagtaggaaaaatatacgaaagcgtttttttttgttagttttgtcgatg

SEQ ID NO: 2005 - DNA, 2473 bp, Artificial Sequence
  chemically treated genomic DNA (Homo sapiens)
tatcgataaaattggtagaaaaaaacgttttcgtatattttttttgttgggtggttagaaggaaaggtcgtgaagttaaaggttttttattgagacgttgttttgtaaggagtcgattttacgtgtcgtcgtcgttagagaagagagtatttgtttatttcggtttattgtgaggttgagtttagcgttggtaggcgaggggtcgtaagtattttttatagttatcgagagggtatttttgtagggaaattatattcgatatgtttgtgtttatagtagatttaagattgtttttaaaatgtttatgaagttattgtttagtagagttgttagttttaatattagtgagtattatttttggttaaaaggatgtatgtgtataggtgtatgtgtgtgcgtgtgtgtttgtgtttttggatttgtgtggagaatgaagaaagggttttatttaggtatttgtaaatattcgatggtattatgaaaagataaaaaaattttataaaatatattatattttgttatgattttgtgtgtatatgtaataaaattattaagtataaattgttttgtatttttttgtaagtataaattttaaaattttgtatttagtatagaataattcgtattatataataagggaaaaatatattttttttttttgattaagtgtttagattaaatgtatttggttttttggggaattgaggttaagatggaaattgtagtttgtttgggtgaacgtaatttttttttttaatttttgatatagagaaaaatttgtttagggaaatttttttattatggtattttagtattaatttgaaaattatggggaattattgtggataatttaggggaataagtggaattttttttttattaaaagaattttttgattttgaggttatgtatttttataatatgggaaatgggtttttatttttaatttttgtaaagagtatatatgtaattggtatttatataaagttttacgtgttgggaggttattgagggaggagtagagttttagcgagggtaaatgtataaataataaattaagtttaaagatcgtggttaaatgtaaggagtaaatgatattgattttatatgttaggggtttggatattatattagttgttatggagtttgattaatgaggtattaaggagatggagtgatatttatagttagttatttatggtgttaattttaaaatattttgtaatagataaagagattcggtttataatgtaaagtaatttgtggtgtgtttttggtgaatgtatttagcgaagtaaatatagttatgcggaatttaaattaaggttgatattaatgtaaatagagtttaagaattattgtttaataatttgatgaggatataggttttaattaagttttttttattaaaatagtaatttaaatttttaacgtttaaattggataaaacgtttaagttgtaaaggttggggggaaaaatagaaatttatttgaaaaggaaaatgaaatagagtatttttgggggaaattttgattatgttttgatttaattgggatatatatgtcgatttaaatgttaggtcgattttaaggttagattttaggtatttgaaggtatttgttatgtattttttttgttgttgtaaagttatggttggatatattttggttgtattgattttagagtaaaaatgtttttagtaataagaaagtggggattttgatttcgaggatttagaattatttatgtattaaaggaggaaatttatttgtttttttttgtaattaatttttatttgaattaaaaaaatttaaaattgggggtatatgaggaaggagtatgggtttggttagagattttggttagttatcggagaggttagtttttttagagggtattatattcgtatatggttttgttcgggtttgtttgtttattttttttatttagatttaatggggaggaggttattttagttattaatattaattaaaatgttagtagtttaggttttagggtttgggaggttttgtatatgagaaataaaattaaataaaatagtaatttattttgttttgtttttggagggaaaataaggggtagtttggcggtattttttggggtttcggattttatagtaaaagagtaggaaggtaagggaaattaattttgaatttttcgaattatgattttgttttttttaattatatttatgatgtattttttaaggaaaggaatttgtttaatgaggtgtttttaatatttatttcgaagaaaggatcgagaataatttgggaaggaaaaaacgttgtaaatgtaaagtgttttgaaaatgtttttagtagtaatattaatggttatttaatttaaggatttagagttaggaatggaagggaaatgggaagttggagattttgatatttgggggatgaaggggggttattatgaattgagaattgattatgaattagg

SEQ ID NO: 2006 - DNA, 2437 bp, Artificial Sequence
  chemically treated genomic DNA (Homo sapiens)
ttgggaaggttggggaggtagagttggttttttagtagtttggggttttttcgggtggtttttgtgtaagttaaatatgttaagaaagtttggttgtaggattagtgtttgattagatgtttttgttttttattggttggtgttgttatatatatatatatatatatatatatatatatatatatatttttgatgttgtgagatttggtagttataggtttattgggtatttttttttggagaattgttcgaggttggtagaattatttggttttaaaatgtttggaggtttagttttttttatttatttttagttgattcgatgggtttttcgttgtgttttttttttaaggtaggatttgttgtggataatttattttttatatttttgttcggttttttttatttttttatttagttttgtttatttttttttttttaataatatataagtattaaatttttgttttaggatttgtttttaggagattatttaagttaagtggttatttggtttagttaatttttaagattggtatttatatggttgtaatacgtagaattgtatatttaaaagggtgaattttattgttttttaattatattttaataaatttgtttttagaaataagatgaattttatggaaaaatagttattgttattttggagaaaatatttaaatatgttaattaatgaaaaattttagaaaagtaaaaagggaggtagggaaaagttattttgtatttaaaatatttttttggtttatcggtttgtagttgttataggtggaggataagataaggggtgggtttttttagggtgttttaggtgttgattgagtagttagtatgtgataaaattttttttttgagagaaaaggaggaagtataagatagggaagggaagcgtagttttaggaaaggggtgggcggaggggttatggtttttgttgtgttatttaaacgcgtgtcgtagggatttttgagggttgtgtttttatttgtttggttgttttgtgtttatagggttagtatgtgattatttgggatttggtgtgggtttttttttggttgttttattttttatttattagttgcgtgttaatagaaagttttttgattgaaggatttgttcgggatttttgtaataaaaatagaaggatttgttataaacgttggaaggattttttgtaaaagtggtattttttacgtgattatgagttttagaatatattgttatttcgggttgtaagtttggtttttttattgagtggtagtgatagatgttttttgttaatgtttagtgattgaatgttattgtagaggttcgtttttatttatataatttgtttttttttttttgtagttattgtgttacgtttgttataaaatttatattttttgtatattgttggttttttttagtagtgagtttttgtgttaattttgttttgtttttttttcggtttattttcgaggatattgggggataaatagtattattattgttaagtgataataaaggttggtaggaatatatttttagtttggggcggttataaggaaggaaagaaataaagaaaaaagtttatgaagttgttggagttatagtttttttttgggaatttagtttaagaatataatttattagaaataaaaagttttatttagatggagatttattgaagtatttgttattataataaaatattgagaataatttgaaaatttttttataggtaaataaatgatgataaatttttttgattggttacggtaggatttttaataattatggggtattggttaaacgtggtaaattgagtagtagtttttgtttttattgtttttttaagtattattaaaataaaagtaaaagggaaaagtatataaatgtatagagataaagaaaacgggaggggagaaaaaggtaaaggaaatagtagataaggaaggttaataaagatggaaagagcgtgaatagaaaaggtttaagtttttgaggaggggatattattaaaatgtgggttatcgtgtgttatagaaatttagaaaggtttaggaattggattttttaagtattagggaaagtaggatgaggttggagttaagagggaaagtttgtaggggaaataagtagatgtttagaagatattgttagggttttagtggttttagaattatttttttttagtcgtcgggaagtgggagtgttttttttggagaaatgatttagatatatttttaaggtggagatatttagtagtgggggtaggattaaggtattagatagaaaggagtgattatgatagaaaaatgtgagattatttaggtttaggttattagtttggtgtttaatgatttgtaggaaaatttataggttagtaagtgtttttattatatttacgtgtatatttttatatgtatttatatagat

SEQ ID NO: 2007 - DNA, 2437 bp, Artificial Sequence
  chemically treated genomic DNA (Homo sapiens)
gtttgtatgagtgtatgtgaggatgtgtacgtgagtgtggtgggggtatttgttgatttgtgggtttttttgtaggttattaggtattaggttagtgatttaggtttgagtgattttatatttttttgttataattatttttttttgtttggtgttttagttttgtttttattgttggatgtttttattttggaaatgtatttaagttatttttttagagaagatatttttatttttcgacggttgggggaggatggttttggggttattggagttttgatagtgttttttaggtatttgtttgttttttttgtagatttttttttttagttttagttttattttgttttttttggtatttggggagtttaatttttgagtttttttgggtttttgtggtatacgatgatttatattttagtggtgttttttttttaggaatttgggttttttttgtttacgttttttttatttttgttgattttttttgtttattgttttttttgttttttttttttttttcgttttttttgtttttgtgtatttgtatattttttttttttgtttttattttggtagtatttggggaagtaatgaaaataaaaattgttgtttaatttgttacgtttaattagtgttttataattattaagggttttgtcgtaattaattaagagaatttattattatttatttatttgtaaaaggatttttaagttgtttttagtgttttgttatgatagtaagtgttttaataaatttttatttaaatagagttttttatttttgataaattgtatttttgggttgaatttttaggaggagattatgattttagtaattttatgagtttttttttttatttttttttttttttgtagtcgttttaagttgaggatgtgtttttgttagtttttattattatttagtagtgatggtattatttgttttttagtgttttcggggatgggtcgaggagggagtagggtagggttggtataagggtttattgttggagaaggttaataatgtgtagaaaatgtggattttgtgataagcgtgatatagtggttgtagaaagaaaggaataggttgtgtgggtgaggacgggtttttgtagtgatatttaattattggatattaataggggatatttgttattgttatttagtgaggaggttaggtttgtagttcgggatgataatatgttttggggtttatgattacgtgaaaaatattatttttgtagagggtttttttagcgtttgtgataaatttttttatttttattatagaaatttcgggtaaattttttagttaggggattttttattaatacgtagttggtaagtgaaaaataaaataattaagagaaaatttatattagattttaaataattatatgttggttttgtgagtatagggtagttaggtagatgagagtatagtttttagaggtttttgcgatacgcgtttgaatggtatagtagagattatagttttttcgtttattttttttttggagttgcgttttttttttttgttttgtgtttttttttttttttttaagaaggagattttattatatattggttgtttagttagtatttggggtattttggaaagatttattttttgttttgttttttatttgtggtagttgtaagtcggtgggttaggagaatattttaaatgtaggatagtttttttttgtttttttttttgtttttttgaggttttttattggttaatatgtttggatattttttttaaaatagtagtaattatttttttatgaagtttattttgtttttaagggtaggtttattgaggtataattgaaaagtaataaagtttatttttttaaatgtatagttttacgtgttatagttatataaatgttagttttggaggttgattaagttaaatgattatttggtttaggtggttttttggaagtagattttaaggtagggatttggtgtttgtgtgttattgaggagaagggagtgagtaaagttggataggagagtggaaggaatcgagtaaggatgtgagggatgaattgtttatagtaagttttgttttgaggaaggggtatagcggaggatttatcgggttagttgagggtgagtggaggaagttgggtttttaggtattttggagttaggtggttttgttagtttcgggtagttttttagggaaggatgtttagtgagtttgtagttgttaagttttatagtattaggggtgtgtgtgtgtgtgtgtgtgtgtgtgtgtgtgtgtgtgtggtagtattagttagtaaaaggtaaaggtatttggttaggtattgattttataattaaatttttttagtatatttaatttgtataaaaattattcgaggaaattttaggttgttaggaagttagttttgtttttttagtttttttag

SEQ ID NO: 2008 - DNA, 2215 bp, Artificial Sequence
  chemically treated genomic DNA (Homo sapiens)
aggggtttagattggtaggttttagtttttcgtttattgttttggggtttttttggaaaataggatgggaggtgaaaggtggatataggtttggatttttatattttttgaaataatttaggggtatagtatagaatttttaggagggagggtttggggatagtttttattttgtggatgagaaaattgaggggttttatttttattaaaagggagagagtttgaagttttatattttttatgtgtttatttatagttttttgtcgggtttgggggatggaaaaatgatattttagaatggaaataaaacggtttattgtggtttttatttttgaatgtttattatgtgttaagtgtagaagtgttataattttgtaggttaagtttatattttgtatttattttgtataggagtatattgaattataaggtaataatttattttttaaaggatattattttaaatattattgtattttaagtagtacgttgtgtgattttgagtaagttgtttattttttttgggttaggttttagtttagttttgggatatagtagtgattaaaggagtcgtggtttttgtttttttagagtttatagtttgggtagggaggaggaggtaaggaatggtaaatatataagaaaataaagattatttttgatggtaatgaatttagtgaataagagtaggagaatgtaaaagaaagtagtttagggggatttgagaaggtttttggggaggcgatatttgatttgagatttgaagaatgaggagtttggtaaagatttggggttgattagtgttttaggaataagtaatagtaagggtaagggttttgaggtaggatagagttattaatagtttaaggagggaggtttttgggttggtgagagaaagggaaggggtttagttgggtagtgggtaggggaggagtttggattttatttttcgtgagatgtgttggttttggtggtagtgggggggtttgtagttttttgttataagggttgggggtgtggggatagttagagttaaaggttttttttttatagtttcggtagttttagtttagaggcgtcggtttggcggttggaagattgtattgtgggtatatttggggagtagttgtcgagttagggttagagtgggttacgtggtatagggtaggatcgttttggagtttataaggttaagatttttaggaggggtagtggagaatattttggacgagaatagtgcgttaacgaggaggaattgtgtattgtagacgtttaggtatacggttttttgtagttttatatagtttttgttttaggatagagtgtttgggtttaatgttattttttagttttgtgatttgaaataagttatttaatttttttgggttttatggttttagttgtgaaggggatatgatattattattatagttttataggttgttttttttttttttttttttttttttttttttttaattttttgagacgtagttttattttgttgtttaggttggaatgtagtggtattattttagtttattgtaatttttgtttttcgggttcgagcgatttttttgttttagtttttttagtagttgtagtagttgggattataggttttcgttattaggtttggttaatttttttatatttttagtggagatggggttttattatgttggttaggttggttttaaatttttgattttaggtgaattatttattttagttttttaaagtgtttttaggttgtttatttttaatttaataaatattcgttgagtattttttatatgttaggtgttgtatgaggttttgcgtgatagtagggaataggattttcgtggtttttttttttttaagtatataattaatgttttagaattaggtttggtattgaggaaatttttagtaaatgtaagttatttgtttggagttttggaggttagaggaggtattttggaaggtagagaaggaggtgtggtgatagaaaaattttaaggaaagtgtatttttttttattattaggtgttgtagttggtttttggtatggtttattttatttttataattattttacgaagagggatgagtattagttttaatttatggatgaggaaattgaggtttagtttgttaatggtatagttaggattggaggtagtgaagggttggtttttttttttttttggggtttaatatttttatttgt

SEQ ID NO: 2009 - DNA, 2215 bp, Artificial Sequence
  chemically treated genomic DNA (Homo sapiens)
atagatgggaatattgagttttagagagaaaaagggattagttttttattgtttttagttttggttgtgttattgataaattgggttttagtttttttatttataaattggagttaatgtttattttttttcgtagggtggttgtgagagtgaaatgagttatattaggagttaattgtagtatttggtgataaaagggagtgtattttttttaggatttttttgttattatatttttttttttgttttttagggtgttttttttggtttttagagttttaggtaaatggtttatatttattaagagtttttttaatgttaggtttggttttaaagtattaattgtgtgtttagaagggaagggattacggaggttttgttttttgttgttacgtagagttttatgtagtatttggtatgtgggaagtgtttaacgaatatttgttgaattagaaataaatagtttgggagtattttgggaggttgaggtgggtggtttatttgaggttaagagtttgagattagtttggttaatatggtgaaattttatttttattaaaaatatgaaaaaattagttaggtttggtggcgggagtttgtagttttagttattatagttattagggaggttgaggtaggagaatcgttcgaattcgggaggtagaggttgtagtgagttgagatggtgttattgtattttagtttgggtaatagagtgagattgcgttttaaaaaattaaaaaaaaaaaaaaaaaaaaaaaaaaaaaaagaatagtttgtggaattgtggtagtaatattatgttttttttatagttgaggttatgagatttagagaggttgagtgatttgttttagattataaagttgggaggtggtattgaatttaggtattttgttttgaggtaggggttgtgtggggttgtagggggtcgtgtgtttggacgtttatagtgtatagttttttttcgttgacgtattgttttcgtttagagtgttttttattgttttttttaggagttttggttttgtaggttttaggacggttttgttttgtgttacgtgatttattttggttttggttcggtagttgttttttagatgtgtttatagtgtaattttttagtcgttaggtcggcgtttttgggttgggattgtcggagttgtgggggagagatttttggttttggttgtttttatatttttaatttttgtaataggagattataggtttttttattattattagaattagtatattttacggagaataagatttaaattttttttttgtttattatttaattgggtttttttttttttttttattagtttagaggtttttttttttaaattattaatagttttgttttgttttagggtttttgtttttgttgttatttgtttttagaatattgattagttttaggtttttgttagattttttattttttaagttttaggttaaatgtcgtttttttagaggtttttttagatttttttaggttatttttttttatatttttttgtttttatttattgaatttattattattagaaatgatttttgtttttttgtgtatttgttattttttgtttttttttttttgtttaggttatgggttttaagagagtaggaattacggtttttttggttattgttgtgttttagagttgaattagggtttggtttagagaaggtaagtaatttgtttaaggttatatagcgtattatttgaaatatagtaatgtttagagtagtgttttttgaagaataaattgttgttttatggtttagtgtatttttgtgtaaaatgggtataaaatatgaatttaatttgtagagttatgatatttttgtatttagtatatggtaagtatttagaaatggaaattataatagatcgttttgtttttattttggggtgttatttttttattttttaaattcggtaggaggttgtgggtgggtatataaagggtgtggggttttaggtttttttttttttaataggaatgaaattttttagtttttttatttataaaatggggattgtttttaggtttttttttttaaggattttgtgttgtgtttttgggttgttttagggagtgtgggggtttaggtttgtgtttattttttattttttattttgttttttagagaggttttagaataatggacgggaggttggagtttattagtttgggttttt

SEQ ID NO: 2010 - DNA, 2431 bp, Artificial Sequence
  chemically treated genomic DNA (Homo sapiens)
tatattagatttattgagttaggtacgttgagggtggggtttagtaacgtatattttaataagtattttaggggatagtgatgcgtgtttaagtgtgaggattattgtgttaggagagggatttgtaaattttgatagataataggttttttaatgtaggtatttatgggttaaggagttagtagttatttttttgtgattttagtgtttagttagttaagagtttgttttagggtgagaatattttttttttttttatagttttttgaggggttatttttgtatagtttgattgagttagatacgggagagttgttgagtttgttgagtggatgttttatttttttagttaagattttatttttagaatgaagacggagggaagaatgtttttttatatgtttttttaataagttatatgatagatgaggaaatcgaggtttagagtttaagttatttatttaaagttatgttgttaataaatggtagagttagaatttggatttacgtttatttgttttttagtgttttttttatcgtagtaatttgtattttttgattagagttagttttaggaggatagggtttggttttttttggatttgagttggagtttttattgaatttttgattttgttgtgggaatttttagttaagttttttagatattgggaggtaggttttttttttgtttttattttgttagtatagcgggtatttcggattatgttggatttcgttagggatgtggtagttgttagttagttaagttataagttttagtaggtttgaatgatagttaaggtggttatcgtgttaagtggattgtagttaggaggtgttttgtttagtttattttttattttttatttggaggttttttattattttaggtagggttttttttttttagtagttgtttagagtttgttatgtattttttggtttttatggtagtttagtttagtaaacggatttgaagttttataaatagcgtaatggtaggttgggaagttgttttgtgtaagaggatagaatatgtattttttgtttttcgagttattttttgggatcgggtgatgggagtgatttttagtgtagataaagtcgaattatttttattttttaggtttatattttatatttggttttgtttttattgtttggtatgtttgtggtttttttttattgtttttgtttttatgtgatggtgtttttaagtttgttttcgggacgttttttgtttttggaatagttgtattagtttggggtatttttttgttatttgattttatagggaggtgtttagtggttgtgggtaatttttagatgattttgttcgtttgacgttattagatcgttatttttggttttgttgtttatgttgtagaagttgggttggaatgggagaggaggaatgaaggaggggttgtttttggttttttattgttttagggttttattaagtaggtgtatttatttttttatatttatagagtatttattgaatgttaggttttagggtaattaaattgattttttatttatttatgaatttattttttaatgggtattgttttgtggtacggagtagtaattaaatgtgagggttttggagtaagagagtttggatttaaattttagttcgttatttattatttttgaaatttttttgtgttttagtttttttttggaaatgggagtgattatagtatttattttataaggttgttttgaagattaaaagagttaatatttttgtttgatatattgtaaatatataatgaacgttagtggttattattattaattataatagtattacgtattgtattaggtatttgggatatgaaattgaatgtgatgtagtttgtatttgttttgtattggtatttggattttaagggttttagatattgggatggggtatttagttaatatcgttagaaagaatatttgttgtgtgtattattttttttattttatgttggagggtatttaagggaaatagaaattgaagtttttggttgggcgtagtggtttacgtttataattttagtattttgggattatagggaggttaaggtgggtggattgtttgaggttaggagtttgagagtagtttggttaaaatggtgaaattttgtttttattaaaaatgtaaaaaattagttgagtatggtagtgtataattgtaattttagttatttaggaggttgaggtagaagaattatttgaatttaggaggtggaggttgtagtgagtagagattgtacgattgtattttagtttgggtaaaagagtaagatttcggtttaaaaaaaaaaaaaaaaaaagaaatatataaaaaagaaaatgaagtttttgttttaggaaagttttagattagtggttttttattttgttatatattagaattttttggagagat

SEQ ID NO: 2011 - DNA, 2431 bp, Artificial Sequence
  chemically treated genomic DNA (Homo sapiens)
atttttttaaaagattttgatgtgtggtagggtgaagagttattgatttaaggtttttttaggataggaattttatttttttttttgtatgtttttttttttttttttttttttgagtcggagttttgtttttttatttaggttggagtatagtcgtgtaatttttgtttattgtaatttttattttttgggtttaagtgatttttttgttttagttttttgagtagttgggattatagttgtatattattatgtttagttaattttttgtatttttagtagaaatagggttttattattttggttaggttgtttttaaatttttgattttaagtaatttatttattttggtttttttataattttaaagtgttaggattataggcgtgagttattgcgtttagttagaaattttaatttttgttttttttgaatgttttttaatataaggtaggaaaaatagtatatatagtaggtattttttttgacggtgttgattgggtattttattttaatatttgagatttttggagtttagatgttagtgtaaaatagatgtagattatattatatttaattttatattttaagtatttagtataatacgtggtgttgttgtggttagtagtaatagttattaacgtttattgtgtatttataatgtgttagatagagatattaatttttttaatttttagagtaattttatgaggtagatattataattatttttatttttaaaaggaaattgaggtatagaggagttttagaggtagtaaatggcgggttggaatttaaatttaaatttttttgttttagagtttttatatttaattattatttcgtattataaagtaatgtttattgaaaaataaatttataagtgagtgaagaattagtttggttgttttagggtttgatatttagtaggtgttttgtaaatgtggaagaataaatgtatttatttggtaggattttggaataatgggaaattaagagtagttttttttttatttttttttttttattttagtttaatttttgtagtataaatagtaaagttaaaaatagcgatttaatgacgttagacgaataaggttatttgaaaattgtttatagttattggatatttttttataggattaagtagtaggagggtattttaggttggtgtagttgttttaagaataggaaacgtttcgggagtagatttggaagtattattatataaaggtagaagtagtagggggaaattatagatatattaaatagtagaagtaagattaagtgtggagtatagatttagaagataagagtaattcgattttatttgtattagaagttatttttattattcgattttaggaaatggttcgaggagtagagaatgtatgttttgtttttttatataggatagttttttagtttgttattgcgttatttataaaattttaggttcgtttgttaaattgggttattataagaattagggggtgtatggtaagttttgagtagttgttgggggaagaagattttgtttgagatggtgaggggtttttaaataaaggatgaggggtgggttaggtaaggtattttttggttgtaatttatttggtacggtgattattttggttattatttaggtttgttgaggtttgtgatttaattgattggtagttgttatatttttgacgggatttagtatggttcgagatgttcgttgtgttgatagggtgaaagtaaggagaggatttgttttttagtgtttgagaagtttagttggaggtttttatagtaaggttaagagtttagtgagggttttagtttaaatttagaaaaagttaggttttatttttttggagttggttttggttaagggatgtaagttgttgcggtagaaaggatattggagggtagatggacgtgggtttaaattttgattttgttatttattagtagtatgattttggatgagtaatttaaattttgagtttcggtttttttatttgttatatgatttgttggaagaatatatggaaaagtattttttttttcgtttttattttgggaatggagttttggttaaggagataaaatatttatttaataagtttagtagttttttcgtgtttaatttagttagattgtataaaggtgattttttaaggggttgtggaagggaggaagatgtttttattttgagataggtttttgattggttgggtattaaggttataggagagtggttgttggttttttggtttatgggtatttgtattaggagatttgttgtttgttaggatttgtaggttttttttttggtatagtggtttttatatttaggtacgtattattgttttttggagtgtttgttaaaatatacgttgttgggttttatttttagcgtgtttgatttagtaggtttagtgtg

SEQ ID NO: 2012 - DNA, 2460 bp, Artificial Sequence
  chemically treated genomic DNA (Homo sapiens)
tttgttttgggagattaagtttttttttgtttttagggtggtttagataaaggcggcggtgtgttcggttttttggtattcgggttgtttttttgttttttttttttttttgttttagggtattcgtagaggttttttttataaaggagttggaggatggggggtagggttgggtagttttaaggtaggggaagggagtattggtgaggttacgttttgttaggtttgattttttttttagtttcgttatataggtatttagtgggtattaatcgtggtttgttgaataatgattattttgagtattgagtgtggttagggtggggttttggtatacgtggatattattaattttttcgataagagatggggttttatatttaggttgaggaggggagcgtgttaagggagttattatttttttagtgtagttaagaggaaattgaggtttagagaggtcgagttatttgtttaaggttatacggtttaaagtgggataaatttattttcgatttaggtttatttgattgttatagatggtatgttattcgttgttttaattgttatttaataaataattaataataaaaagagaaataatgaatatttagtaagtatttaatatgtggtaggtattgtgtttaaggtattatttatattaagtgatttaatttttttaataattttatgaggtaagaattgttattatatttattttatagatgaagaaattgaggttggtaaggtggggtaatgtattaaaggataaatagtaaggatttggtggagtgggttttaatttagttttttagaatttgtgcgttaaattatagttttattttggacggttggatgggggacggatagattgacggatgggattgatgattgatagttttgttttatttgtattaggtttgaggttgggtatttagtaggagtttagttagtatcggttataagaatattgggtatttttacgtagtgtttgtcggaggggttttatgtttttagtagggtcggagtttgggggcggtgggtagtgtgtttgggttgttgggggggtttaattttttttcgagtagagttacggcggtatgacggatgtgttcgttatcgcggggagtttagggtatagtagttgtttggaaataggttgttttcgcggtttatatttagatttttgttattattttaaggatttttttttttttttttttttttttacgatggagttagattttgtacgtaggtgagaaatcgtagttaattttattagtagttttttgttattagggattatgggggtttttggggtttggttgcgggtggggaggtaggtgggtgtcgggaggatgaggggaatttgtagcgggaagttagcgttttacgggcggtttagtcgaggtttggaaaaatttcgacgttggaatgttttttttattggttttattttttttaagtttttttgataaaaaacgaggttgagtttttttttttaatggcgtaatataagaagtattagtttttagagtcgagggtgtgtttaaaggatttgggtagggttgggtttttggggggtttagagtaggggataggtgtggtgtttttagtatagtaggtattaattggtttttatgtcggtggttttgagaggggattaattgggttttggggaattggttggggatggggttacgttttagttagggttgggtttggggataggagtgtggaggagtaatagtgaggattttggggttattttagtatgggtttaaattttagttttgttttttgggtaagttatttgttttttttgtgatttagttttttttttaatgaatggggaggatttaaaagggtggttatgagaattaaataatataattcgtgtaaagtatttagtatattagttgggtatggcggtacgtgtttgtagttttagttattcgggaggttgaggtgggaggatcgtttgagtttgggaggttgaggttgtaatgagtcgtggttatgttattgtattttagtttgggtgatagagtgagattttgttttaaaaaaataaataaataaataaataaaatatttagtatatagtaagtgtttaatgaaagattataggcgcgtttatttcgagggttatggggtgtttggttttaggtatgtcgttaggattattttatttttattttaagtatttagggaggtaggaagtttatagtttatttattggttataggtagaattgaggttttaggaggaatggtatttgtttagtgatattggggagtatgagatgttagattgatttttattttttattcgtttattaggttttcggttttattgttttagttattattttaattttttcgattagtagtgttgaacgttgattttgaaaattagattttaacgtcgtttgttttaaatatttttgggttttttagtgtt

SEQ ID NO: 2013 - DNA, 2460 bp, Artificial Sequence
  chemically treated genomic DNA (Homo sapiens)
ggtattggggagtttaggaatgtttggggtaggcggcgttgaggtttgatttttagggttagcgtttagtattgttaatcggggaggttgagatagtggttgagatagtgaagtcggaagtttgatgggcgggtggggggtggaagttaatttgatattttatgttttttagtgttattaggtaaatgttattttttttggagttttagttttgtttatggttagtgagtggattgtggattttttgtttttttgagtgtttagggtgagaatgaaatagttttgacggtatgtttggagttaggtattttatggttttcggagtaagcgcgtttgtggttttttattgagtatttgttatatgttagatattttatttatttatttgtttatttttttgaggtagagttttattttgttatttaggttggagtgtagtggtatgattacggtttattgtagttttaattttttaagtttaagcgatttttttattttagtttttcgaatagttgggattataggtacgtgtcgttatgtttagttaatgtgttaggtattttatacgaattatattgtttgatttttataattatttttttaggttttttttatttattgaggagaaaattgagttataggggagataaataatttgtttaagagataaagttgggatttgggtttatgttggggtgattttagagtttttattgttgtttttttatatttttgtttttaagtttaattttggttggggcgtggttttatttttagttagttttttagggtttagttaatttttttttagggttatcggtatgagagttaattagtgtttgttgtgttgggggtattatatttgttttttgttttgggttttttagaggtttagttttgtttagattttttgggtatattttcggttttggaagttgatgttttttgtattgcgttattaagaaaaaggatttagtttcgttttttgttagggaagtttggggaaaataaagttagtgagagaagtattttagcgtcgggatttttttaagtttcggttgggtcgttcgtggagcgttgatttttcgttgtaggttttttttattttttcggtatttatttatttttttattcgtaattaggttttaagggtttttatggtttttggtgatagggggttgttggtggggttggttgcggttttttatttgcgtgtagggtttggttttatcgtgaaaggaggaagagggaaaaaaaggtttttgagatggtgataaaggtttgagtgtgggtcgcgagagtagtttgtttttaggtaattgttatattttgggtttttcgcggtggcgggtatattcgttatgtcgtcgtggttttgttcgggagggagttgggtttttttagtagtttaggtatattgtttatcgtttttaagtttcggttttgttggggatatgaggttttttcggtaggtattgcgtgagaatgtttagtgtttttgtggtcgatgttggttaagtttttattgggtgtttagttttaggtttggtgtaggtgggatagagttgttaattattagttttattcgttagtttgttcgttttttatttagtcgtttaggatagaattgtggtttggcgtataggttttggagggttgggttgaaatttattttattaaatttttgttgtttgttttttggtgtattgttttattttgttagttttagtttttttatttatgaaatggatataataatagtttttattttatagggttgttgggaggattaaattatttaatataggtaatgttttaggtatagtgtttgttatatattaaatgtttgttaaatgtttattgtttttttttttattattaattgtttgttaggtgatagttggggtagcgggtagtatgttatttgtggtaattaggtagatttgggtcgggggtgagtttgttttattttgaatcgtatgattttagataggtggttcggtttttttgagttttagtttttttttgattatattggggaaataatagtttttttgatacgtttttttttttagtttaagtgtgaaattttattttttgtcgggaggattagtggtgtttacgtgtgttagggttttattttggttatatttagtatttagaatggttattatttagtaggttacgattggtgtttattgggtgtttgtgtgacggggttgggagaggagttaggtttggtagggcgtggttttattagtgttttttttttttgttttggggttgtttagttttgttttttattttttagtttttttgtgaaaagaatttttgcgagtgttttggagtaagaggaggaggaggataagaaggtagttcgagtgttagggggtcgggtatatcgtcgtttttgtttgggttattttggaggtagagggaggtttggttttttagggtagg

SEQ ID NO: 2014 - DNA, 2408 bp, Artificial Sequence
  chemically treated genomic DNA (Homo sapiens)
agttgtttttgaggtgtgaggataggaggggttgttgtttgaggttttttgtttatttttatttattgggattttttgtttggtttaggttttggataggtgcgtcgtatcggttgtagaggtggttttgggttgtataaggttggagtttattattttgggttttttttttattttggtttttgttattatttttttttattgttttagggttttttagtattttaaaaaagtttgtttaaaatttaaaaaaattattaatttttttagatttttttagtagggagggttggtttgaaattattttatttgttatttttttttttttttttttttttgttagggtttcgttttgtcgtttaggttggagtgtaatgggattttggtttattgtagtttttgtttttcgggtttaagcgatttttttgttttagtttttcgagtagttgggattataggtatgtattattatttttagttaatttttgtatttttagtagagatagggttttagtattttggttaggttggttttaaatttttgattttaagtgatttattttttttagttttttaaagttttaggattataggcgtgagttattgtgtttagttttatttgttatttttgtattataataatggttatggtggtaaaatgttttattgagtggtatggttgtttttatttttaatagttttttatttagggggtagttagtttattttttatttttttgacggggtggttatgattaatgttgttttagtaatgttttttttatatagggattattttttttggttagattttgataagtgttatttttgagttaataggtttttattaaacgttttagtgcgttttagtttgtattgttttgtgatatagggtagaggaggttttgtttttaaaagtggtttatgttgtagtagggggttttgaacgtttgtttttttagtggatggaggggaggggttaaggtaggttggagattatttttgggagtggaggtttcggtttttttagtagtttttagttgtgtgttttttataggtggtgagtggttgtttgcgcggtatagtgagtgtgtgggaggtcgtgacgggtaggaagacgatggagtttgttgtgtttgggggttagtacgtggagatgatcgttatggttttggatgagttagagcggtgtttgtttataggtttgcgggatggtataatgaagatgtggaattataatattggtaaatgtttgttgattttttttagttcggaatagttggaggttagttttgtttgttaattatagttagggacggttttttgggaagtaaagtatagtttttttgattttgggatgtattattttttgtatttttttgaaagggtgtttattatagttaggtggtttggttttaaatttttttgagtttttgtgtttttatgtatgaaatgaagataggtaatagtgtttggattaatgggtttttattaaggttagttattgttgttttttaaatttgttagtattttttattttatatattggagttttggattgtatttttagtagtgggattagttaatttatagttatttatggttatttttatttgggaaatgtttgatggtattatagggttagtttatgggagtggtatagggtaaagttagtagttttattttaatttttgtgatatagttttttaattaatttagaaagtgtatttagttggttaggtagtggtttacgtttgtaattttagtattttgggaggtcgaggtagggggattatttgaggttaggagttcgagattagtttggttaatatggtgaaattttcgtttttgttaaaaatataaaaaaaattagttaggcgtggtggtggttgtttgtaattttagttattcgggaagttgaggtaggataagtcgggaggtggaggttgtagtgagtcgagatttcgttatcgtattttagtttgggtagtaagagtgaaattttgttaaaaaaaaaaaaaaagaagaagaagaaagaaagtgtatttagttaagatgttaggggttgagtattgttttagattttattatttagtagtgatttgattttagttaggttatttgtttattttttagttattttttttgtaaaatggatatggatgtttattttattttatttttttaagtttattaaatgagggaataggatgtgagaatatgatgataaatatatggtggtattatttgtaggtgattttcgttatttagagatttgattttttgtttggtatttttaggaagatatttagggtttagagttattttttttgataagttttttagttttgtttttttttatttttaatagattagtgggattatttatatgaataaagtgttttatg

SEQ ID NO: 2015 - DNA, 2408 bp, Artificial Sequence
  chemically treated genomic DNA (Homo sapiens)
tatagaatattttgtttatatggataattttattaatttgttgaagatgaaagaaaatagaattagaaaatttattagagaaaatggttttgggttttaaatgtttttttaaaggtgttaagtaagaagttaaatttttggatgacgaaaattatttataggtgatattattatgtatttgttattatgtttttatattttatttttttatttgatggatttaggggagtgagatagggtaggtatttatgtttattttatagagaggatagttgggaaatgggtaagtgatttggttaaggttaagttattattgagtgataggatttggagtagtatttaatttttggtattttggttaagtatatttttttttttttttttttttttttttttttttgatagagttttatttttgttgtttaggttggagtgcgatggcgggatttcggtttattgtagtttttatttttcggtttgttttgttttagtttttcgagtagttgggattataggtagttattattacgtttggttaattttttttgtatttttggtagagacgggagttttattatattagttaggttggtttcgaatttttggttttaggtgatttttttgtttcgattttttaaagtgttgagattataggcgtgagttattgtttggttagttaagtatattttttgagttggttaaaggattgtgttatagaagttagggtggaattgttggttttgttttatgttatttttatggattggttttataatattattaggtattttttaaataggggtgattatgggtggttgtgaattaattgattttattgttagaaatgtaatttaaagttttagtatgtggaatgagaagtgttagtaaatttaaagagtaatagtagttaattttagtggaaatttattagtttaggtattgttatttgtttttattttatgtatgaggatatagaggtttagggaggtttgaagttaggttatttgattatgatgaatatttttttagagaggtataaaaaatagtgtattttagggttaaaggagttgtgttttgttttttaagaggtcgtttttggttgtaattgataagtaagattgatttttagttgtttcggattgggaaaggttaataggtatttgttaatgttgtagttttatatttttattgtgttatttcgtaaatttgtgagtaggtatcgttttgatttatttagggttatggcggttatttttacgtgttggtttttagatatagtaaattttatcgtttttttgttcgttacgattttttatatatttattgtgtcgcgtaggtagttatttattatttgtagggagtatatagttgggggttgttggagaggtcggggtttttatttttaagggtggtttttagtttgttttggttttttttttttatttattgagaaaatagacgtttagggttttttgttatagtataagttatttttgaaaataggattttttttgttttgtattatagggtagtgtaaattggaacgtattggaacgtttggtgaagatttgttaatttagaaatggtatttattaggatttagttaaagaaaataatttttatatggaaaagatattattgaaataatattaattatgattatttcgttaaaaaaataagaaataaattaattgttttttaagtagggaattgttgagaataaggatagttatgttatttaatgaaatattttgttattatgattattgttataatgtaagagtagtaggtaaggttgggtatagtggtttacgtttgtaattttaaaattttgggaggttgaggagggtggattatttgaggttagaagtttgagattagtttggttaaaatgttgaaattttgtttttattaaaaatataaaaattagttgggggtggtggtgtatgtttgtagttttagttattcgggaggttgaggtaggagaatcgtttgaattcggaaggtagagattgtagtgagttaaggttttattgtattttagtttgggcgatagagcgagattttggtaaaaaaaaaaaaaaaaaaaaaagtagtaagtgaggtggttttagattaattttttttattgagaagatttagaaaagttgataatttttttaaattttaaataaatttttttaaggtattgaagagttttgaggtagtgagagagggtggtggtaggagttaggatgggagagaagtttagaatggtgagttttagttttgtgtagtttaaggttatttttgtagtcgatgcggcgtatttgtttagagtttgggttagataagaggttttagtgggtgggagtgagtagagggttttaggtagtagttttttttatttttatattttagaagtaatt

SEQ ID NO: 2016 - DNA, 2461 bp, Artificial Sequence
  chemically treated genomic DNA (Homo sapiens)
aattttagttgttagggttaagattagttacgtgttttttttttttggttatggttttggatattttaagttggtagtgagtgttaggtgagggggttgttaggagtcggtaggggggattttatttttgtgttatttatgtttttaattaggggtaatttttttaaatttgtatttttaaattttttttttagtttgattggagaaattattttaatttttaatgatagtaattttaaattatagtaataataatttattgagtgtttatagtgagttagatatagtgttagtattttgtattagtagtttttaaattttttggttttaggaattttttatattttaagaatgattaaggtttttaaagtttttgtttatgtgggttgtatttattattaattattattttaggagttaaaataaattttaataatatttatttataatttatttaaaatagtaataataaatattatatgtgagtataaataatatatttttatgataaataattatattttataatatataaaatttaaagagaaggaagtgtggttttgttttatatttttgtagatttttataatgttagttttaatagaagatagtttgatttttatatttgtatttgtaagtttttgagatattatatgttatgtagtttttgtaatattttattgggagttttaaaaagtttttattgagagtaaaaaatttttataaataatatgtttgtattattgttaatattattttgaattttatggattatttgaaagggttttagagattttagaggtgtttataatatattgtggaaattgttgtttgatatatatgatgggtagtttttaatattgttttatttttatatatgaggaaattgaggtataaggagattaaagtgatttgtttaaggttatgtagttaggtattaaagttagttggggagttatttgattttggtgtttagggttttagtattgagttttgaaagagagggtaggaattgggtatagaaaaagtcggaagggtaggttgggttatgagtgggggagttgggtgtgtagtgaggggtgggggtgggaggggatcgggggattagttagttattaagtggttttggtgatagggttggagatggtagttggcggcggatgtagtttcgggttggaaaattaataggtgattagcggtttaggggtaagttgtttattaggtgcggtagaggggtaggggtaggggcgggggggttgggaggaaatattattgattttcggtaggattgattaaatagttagatatttaaggttaaatttattaataaagtgagatatttagtttagttcggcggttgttgttgaaggttttaaaaaaatcgtttattggggagtttttgataaattgtttttgttttttgaggtaagtgggagggaggatagattgtggggaggtttggttcggttgtcgtttggtttgggatttatggtttgttttaggtttggattatagaattttggtgtttgtatggtatgtgtgtttgtattatagtatatgttatttgtatagggtatgtgtagatatatatgtgtatattatgtcgtatatatttaaatgtgtttgtatatgtttttgtacgttcgtgtatatgttataatttatatttgtttatggtatgtgtgtatatatatgtatgtgttatagtatatgtgtataaatatgttttgtatgtgtgtatagatatgcgtgtatcgtattatatggtatttatatatgtatatgttatggtatatatgtgggtataaatgtgttttgtatgtgtgcgtatacgtgtatgtgtcgtagtatatagaatttgtttttgaggggtgagtatgtgtgtttgggggttaaattttttttttattgttttattgatattattattttttttgtttgtagttttaaaggtgttatatttgtaatgatagttatgattattatggggtggggagatggacggaaaagtagggattggaaaattgtatttaaaaggttaagttgtataatagagagaggtaggtgtgaataggaagaaagagggggaggaaaagtgaagggtcggtatggtaagggttaaatatcgtttggattgggagttgagggagagaaaatggtaggattcgggggtggttgggtagttgttgggggagtaaattaaagaataaaggatatgtaaatataatttttatttttattgatttattttttttaagatagagttttattttgttttttaggttggagtgtagtggcgtgattttagtttattgtaatttttattttttgggtttaagtagtttttttgttttagtttttagggtggttgggattatagttttatgtagttacgttcggttaatttttatatttttagtagagatagggttttattatattgtttaggttggtttcgaat

SEQ ID NO: 2017 - DNA, 2461 bp, Artificial Sequence
  chemically treated genomic DNA (Homo sapiens)
gttcgagattagtttgagtaatatggtgaaattttgtttttattaaaaatataaaaattagtcgggcgtggttgtatgagattgtagttttagttattttggaggttgagataggaaaattgtttgaatttaggaggtggaggttgtagtgagttgagattacgttattgtattttagtttggggaatagaatgagattttgttttaaaaaaaataaattaataaaaataaaaattatatttgtatattttttattttttaatttgtttttttaatagttatttagttattttcgaattttgttatttttttttttttaatttttagtttaaacgatgtttagtttttattatgtcggttttttattttttttttttttttttttttttgtttatatttgtttttttttgttgtatagtttagttttttagatatagttttttagtttttattttttcgtttatttttttattttataataattatgattgttattataaatgtggtatttttgggattataggtagagaaagtggtgatattagtgaaataatggagaaagagtttaatttttaagtatatatgtttattttttaaaggtagattttgtgtgttacggtatatgtacgtatacgtatatatgtaaggtatatttgtgtttatatatgtgttatagtatatgtatgtgtaaatgttatgtgatgcggtgtacgtatgtttatgtatatatgtaaggtatatttgtatatatgtgttgtagtatatgtatatgtgtgtatatatattataagtaaatgtaggttgtagtatgtgtacgggcgtgtaaagatatgtgtaggtatatttgaatgtgtgcgatatagtgtgtatatatgtgtttgtatatgttttgtataaatggtatgtgttgtagtgtaagtatatatgttatataagtattagggttttgtggtttagatttggggtaaattatgagttttaggttaaacggtagtcgagttaggtttttttatagtttgtttttttttttatttgttttaagaaataaagatagtttattaagaattttttagtaagcggtttttttaagatttttagtagtagtcgtcgggttgagttgaatgttttattttattagtgagtttggttttgggtgtttggttgtttgattaattttgtcgggggttagtgatatttttttttagttttttcgtttttgtttttgtttttttgtcgtatttgatgaatagtttgtttttggatcgttgattatttattgattttttagttcgaggttatattcgtcgttagttgttatttttagttttgttattaggattatttggtgattaattgatttttcggtttttttttatttttattttttattgtatatttagtttttttatttatggtttaatttgttttttcggttttttttgtgtttagtttttatttttttttttagggtttagtgttgggattttggatattaaaattaagtgattttttagttagttttgatgtttggttgtatgattttggataagttattttaatttttttgtgttttagtttttttatatgtaaaaatggggtaatattggaagttatttattatgtatattaggtagtagtttttatagtgtattatgggtatttttggggtttttgagatttttttagatggtttataaaatttagaataatgttgataataatataaatatgttatttgtgggggttttttgtttttagtgaaagttttttaaaatttttagtggaatattataggggttatatgatatgtggtattttaaaaatttgtagatgtagatataaaaattaaattgttttttattaaggttgatattatagagatttgtaaaaatataaaataaagttatatttttttttttttaaattttgtgtgttgtgaaatatagttatttgttataggaatatattatttatgtttatatgtagtgtttattattgttattttaaataaattataaataaatattattaaaatttgttttgatttttaaaatggtaattagtgatagatataatttatatgaataagagttttgagggttttgattatttttagggtgtaaagggtttttgaagttaaaaagtttgagaattgttggtataagatgttagtattgtgtttggtttattgtaagtatttagtaaattattattgttatgatttggagttgttattattgggagttagagtgatttttttagttaagttggggaggggatttgggggtgtagatttggggaggttgtttttgattagggatataagtggtataaaggtgagattttttttgtcggtttttagtagtttttttatttggtatttattgttagtttggagtgtttaaagttatggttaagggaaaggagtacgtggttgattttggttttagtagttgggatt

SEQ ID NO: 2018 - DNA, 2417 bp, Artificial Sequence
  chemically treated genomic DNA (Homo sapiens)
tatagtttgagtatatttatttattttttattatttatattagaatatttgaaattgggtgatttatgaagaaatagaatttattttttatagttgtggaggttgaggagtttaagattgagggtatgtatttgttgagagttttttggttggtggtgtagagtttcgaggtggtgtaaggtattatattatgaggggtatttgtttgttatagtagtaagtataatttaagttaattttttttgtttatggagaattttttgttagtaagagaaatgaggtatttatttaagtgttttagtatagagatgatttataggaattttagattttggaggatgattttttacggtgatattaggttgttttgttatgtggtataattgtaggaggagttatttatattttttatgtgaatagtatttttcgtatttgtataatttgttattttgggtaggatttttagaggagtgggtttgttgttgagattttaaggatgagtaggaattttatttatggagatggggaaaagttattgtagttggatgaaatagaagggatagagatatagtatatggaaaattagaggtatgtatgcgtgtagtagtaatagttattagtgtttattgagtaggaacgataggttagatagtgtgttaagttttttatatatattagtttatttaattttataatagtttgtgtaaatttagatattttggttttagagtttgtgttttaaattttttaatagattttgtttattattattaatattggtatagtattttatagtttataaaatttttttggatttatgatttgtttttattatggtaatagagtaattgtttttattttataggtgaagaaatagtattaacggttttgtgatttgttaaggttatatagagagtaaattgagaggttaagatttgaattttattttttggttttagataaaggatgttatagtaaggtgtttgtaaagtagtttttttttttttttttgttttgtagggaggtgaggtgtttatatttagattattataaggagttgttgagagaatgtttttaggttatgaatttagttttatacgtaaatttattgtagatttaggagaaggttaggaataaacgggtgggagaaggtttttgattttaaatagaaattgagttgattaaatatagtttgagtatacgtagaggttgtaggagggaaacgagattaattttaaattttgtgtatttagaagttttttttagaatttaggttttattggtaggaaattgttatttcgtgtatttgtttattttttttatgttttttgttaggtttcgtgttttattgagtttttattttttttgtgtatgtttataggttgttgggttggaaatagtttaaagttatttagattattttaggtattgagttgtattaaggatattttttgtgggtagagtaaagatacgtttttattttttagttgggtttattgaggtttttttttattggggaattggttgggtttttttggtagagatgtttgttatttattaaaaatgtacgttttttttattgtggtatagagttgtttttgagaaatatagtttaattaggaattatattttttagttaattttgtagttaagtgaggttatgtgatttgtttttattaatggaatatgaatagagtgataggttttttatttgggtaaaatagagttgatgtgttttttttatattttcgtttagtttttgtttggatttagattttagggaatggtagagttataagatgaaagtaaattgggtatttataaagagaaaatatttgtgttagtttattaaaatgatgagagttatttgttatagtagtaagtataatttgaattaatatatttttttttttgatttttggtaattttagttttttatggagataggggttggaatattatttgtttttttaaagagagttgtaatttattgttttttgttgtgtgttggttttatttttatatttggttttttgttttagtttttttgaatagaatagtagattttttttaagatagaggtgatttttatttaagtttatttgggattgattgtttagttttggttaatattaaaatgcgttaagattttagtgttataattaatgtttatttattttttaatttatgtggttattgtttagtaattttgttattgtatttgttttttttgaggttgttattggttgggtttgggttttaaatagtttttagttgtattggtggtttgatattagaaatttgggagaagaatggtgtaagaggaagagtgtattagtttatttttacgttgttgataaagatatatttgagattgggtaatttataaaaaaaaagaggtttaattggatttatag

SEQ ID NO: 2019 - DNA, 2417 bp, Artificial Sequence
  chemically treated genomic DNA (Homo sapiens)
ttgtaagtttaattaaatttttttttttttgtaaattgtttagttttaggtatgtttttattagtagcgtgaaaatggattaatatatttttttttttatattattttttttttaagtttttggtattaagttattagtatagttagagattgtttggggtttaaatttagttagtagtaattttaaagggaataaatatagtagtagggttgttgagtagtggttatatgaattggggggtaggtggatattaattataatattggagttttagcgtattttgatgttgattaaggttgggtagttagttttaaatggatttggataagagttatttttgttttaaggggaatttattattttatttaggaaaattgaggtaggaaattaggtgtgagggtgaagttagtatataatagggaataatagattatagttttttttgggggaataagtggtattttaatttttgtttttatggggagttaaagttgttaagagttaggaaggaagatatattaatttaagttatgtttgttgttataataaataatttttattattttagtaaattaatataagtattttttttttatgggtatttagtttatttttattttgtggttttattattttttagggtttgaatttaggtagaagttgagcgagaatgtggagaaagtatattaattttgttttgtttaggtgagaagtttattattttgtttatattttattggtgagaataggttatatgattttatttagttgtaaggttagttgggaaatgtagtttttggttgggttgtgttttttagagataattttatattatagtggggggaacgtgtatttttgataagtagtaggtatttttgttagaggagtttagttagttttttaatagggggaggttttagtgagtttaattggagagtgggagcgtatttttgttttatttataagaaatatttttgatataatttagtgtttgaaatggtttgaatggttttgggttatttttaatttagtagtttgtggatatgtatagagaagataaggatttagtgaaatacggagtttggtagaagatatgggaaaaataaataaatgtacgaagtgataattttttgttagtgggatttgggttttggggaaagtttttgagtatatagggtttgagattaatttcgttttttttttgtagtttttgcgtgtgtttaggttgtgtttgattagtttagtttttgtttggagttaaggatttttttttattcgtttatttttggtttttttttggatttgtagtgaatttgcgtgtaaggttgaatttatagtttgaggatatttttttagtagttttttgtaatgatttaaatatagatattttatttttttgtagagtagggaggaagaaagagattgttttgtagatattttgttgtggtattttttgtttaaggttagaggatggggtttaagttttggttttttaatttattttttgtgtaattttgataagttataagatcgttagtattgtttttttatttgtaaaatgggaatagttgttttgttgttataatgaaaatagattatgagtttaaaagagttttgtaaattgtaaagtgttgtattaatgttagtgatagtaggtaggatttgttgggggatttaaagtataggttttggagttagagtgtttgaatttgtataggttgttgtgagattgagtgagttaatgtatgtaaagagtttagtatattgtttggtttatcgtttttgtttagtagatattggtggttattattgttgtacgtatgtatgtttttggttttttatatgttgtgtttttgttttttttgttttatttagttgtagtggtttttttttatttttatgggtggggtttttatttatttttggagttttagtaataggtttatttttttgggaattttgtttagggtggtaggttgtataaatacggggagtgttgtttatatagaaaatgtgaatggttttttttgtagttgtgttatatggtagaatagtttggtattatcgtgagaaattattttttagagtttgaagtttttgtaagttatttttgtattaagatatttgggtgaatgttttattttttttattggtagagagttttttatgggtagggaaggttagtttgggttatgtttgttgttgtaataaataagtgttttttatgatgtgatgttttgtattatttcggggttttgtattattagttagaaggtttttaatagatgtatgtttttagttttagattttttagtttttatagttataagaaataagttttatttttttataaattatttaattttaggtattttgatataagtaatagaaaatggatgaatatatttaggttgtg

SEQ ID NO: 2020 - DNA, 2486 bp, Artificial Sequence
  chemically treated genomic DNA (Homo sapiens)
gttaaggaatttggatatttgtagagtttagttagattgtatataacgttagttgggtgtggtggcgtatttttgtagttttagttatttaggaggttgaggtaggagaatcgttttaattttagaggtagaggttgtagtgagtcgagattgtattattgtattttagtttgggtaatagagtgagattttgtcgtaaaaaaaaaaaaaaaaaaaaaaaaaaaaagattttatataattttaaatgatggttgtttgattattttttttttatattacggattatttttgtcgttatatatttatttgttgattgtttttttttttattagaaaggataaggattttgtgttgtttattgttgtgtttttaatagttagaagagtgtttggtttatatagatatttaataaatacgtattgaatgtatgattttattggtttgtgttttttgtttattgagttattgaaagttagggatttgttggatttattattgcgtttttagggtttagtatagagtttgatgtatatgttgtttaataaatattgaaagaataaatgaatggaaaaacgttttttttaatgtgttatatattttcgtagggtcgggattatttgatttatgtatttagcgtttaatatattgtttggtagaaagtagatttttaataaaggtttgttgagttagataagagttttttttgtatgcgggtttttgttaggtttgttatgggagtttaaataaaggtaattagattttatattattggattaggtagaaagagatattttgttggtaaaggattttaggattttggagttataggttgtgtaggtaggattagtttgtatgtgtagggtggttagagagattaaagagggtttttcgggggttaggaattttgtttttgtttatgttttttagtattgtttttttttggtaattggtaggtagttttattaatgaggtttgggtatagttgggggtggaatgggatgggatagatggtgggagataaggaaatttttatgtttttttttatttgttatatttaattgatttttcgtagaaagaaaaaaaaataaattagttgtaaggatgaaattgttaattaaaaggttttttgattagatagataaatatttattaattatgtttgattttgtttgtttttttttacgtttgcgaatttttttattagtattgtggttatattatatttagttggtggtttttttattaattatttttttggggtttagattggttgcgggtgaaatagggtagaagaaaggtgaatattgtaaatagtcgtttaataaacgcgatgtttgttgtatggttaggtttagtgttgggtttttggaagttatagtagaatttttatggatagttttttaagttgtgtgttgtataaaggtgtatttgtaggagagtgggggttttttttgttaatttgggatttttggtattaggtaagggggatttttattttttttgcgtaacgggttattagtttgttaagttgaatttataggattttgtttgtttagagggggtatttttttttaatttatatagaatgggttagtggtagttttatagagatgaagatagtttagtttttgatttttaagggttttagggatagtgggggagaaaaatatgtttatgatgtataaatatttatgtgtgatttttttttttttttttttttttttttttttgaggatagggttttattgtgttatttaggttgagtgtagtggtacgattacgatttgttgtagttttgagatttttttttttttagtagttttttgaggagttgggattattggtgtgtattattatgtttggttaattttttattttttgtagagataagatttttttatgttatttaggttggtttcgaatttttggatgtaagtaatttttttgttttagttttttaaagttttgggattataagtgtgagttattatgtttggtttaaatatttatttaataaatattttttgtttattggttattaatgtttgttaagtattgtattagattttgggagagagagagatgagtaatatatgttttttgttttttagaagtcgggttatttgggggagatagagatatttatttgggtttgtttttttttttttttttttttttttttaattttaaataatttttatttgggaggtatgaataatcgttttggatttttattatttaaattttggttttatcgtgttttggttgtgtgattttgggtaagttattttatttttttttgttttaggttgtttttttgtaaattggagataatggtaattgtattttagggttattataatgattaaataaattagtatatggaatttatgtttgatacggagtgtttagtaaaggttagttattgtgtgattgttttttttttttttttgagtgtttattgtgtgttaggttttgagttttgg

SEQ ID NO: 2021 - DNA, 2486 bp, Artificial Sequence
  chemically treated genomic DNA (Homo sapiens)
ttaggatttagggtttggtatatagtaggtatttaaaaaaaaaaaagaaatagttatataatagttaatttttattgagtatttcgtgttaggtatgaattttatgtgttaatttatttaattattataataattttgggatgtagttattattatttttagtttatagagaggtaatttgaggtagagagaggtgagataatttgtttaaggttatatagttaagatacggtaaagttaggatttgaatggtgagagtttagagcggttatttatattttttaggtgaagattatttggaattaaaaaagggaaggggaaaaaggaagggtagatttaggtaagtatttttgttttttttaaatagttcggtttttggagggtaggaaatatatattatttattttttttttttttagaatttagtatagtgtttggtaaatattagtggttagtaaataagaaatgtttattgaatgaatgtttaagttaggtatggtagtttatatttgtaattttaggattttgggaggttgaggtaggaggattgtttgtatttaggagttcgagattagtttgggtaatatagagagattttgtttttataaaaaatgaaaaattagttaggtatggtgatgtatattagtaattttagttttttaggaggttgttggggagagaggggttttaaggttgtagtaagtcgtaatcgtgttattgtatttagtttgggtgatatagtgagattttgtttttaaaaaaaaaagaaaagaaaaaagaaaaaaaattatatatgaatgtttatatattataggtatattttttttttttattatttttagagtttttgaggattaggaattgaattatttttatttttgtagagttgttattagtttattttgtgtgaattagaaaaaggtattttttttgggtaggtaaaattttgtggatttagtttggtaagttaatgattcgttgcgtaaagaaaataaaaattttttttgtttggtgttaggggttttaggttgatagggggagtttttatttttttgtaggtgtatttttgtgtagtatataatttgaaaggttgtttatggaaattttgttatggtttttaggggtttagtattaagtttgattatgtaataggtatcgcgtttgttgaacggttgtttgtagtatttattttttttttattttattttattcgtagttagtttgagttttaagagagtgattggtggaagagttattagttgggtatgatgtggttatagtgttgatgggggagttcgtagacgtaaaaggggataggtagggttaggtataattggtaaatatttgtttatttaattagagggttttttaattagtaattttatttttgtaattggtttatttttttttttttttgcgggaagttaattaaatgtaatagatggaggaaaatatgggggtttttttgttttttattatttgttttattttattttatttttagttgtgtttaaattttattggtggggttgtttgttagttgttagagaagggtagtgttaggggatataaataaaggtaggatttttgattttcgggaagttttttttggtttttttggttattttatatatgtaggttgattttgtttgtatagtttatgattttagggttttaagattttttgttaataaggtatttttttttgtttgatttagtagtatagggtttggttgtttttatttgagtttttatgataggtttgataagggttcgtatgtagaagagatttttgtttagtttaataaatttttattgagggtttgttttttgttaggtaatgtgttgggcgttagatatataaattaaatagtttcggttttgcgggagtgtgtaatatattggggaagacgtttttttatttatttatttttttaatatttattaaatagtatgtgtattaagttttgtgttaggttttggggacgtaatgatgaatttaataggtttttgatttttaataatttagtaagtagaggatataggttagtaaagttatgtatttaatacgtatttattgagtgtttgtgtgagttaggtatttttttggttgttggggatatagtagtgaatagtataaagtttttgttttttttagtagggggaaagataattaatagatggatgtataacggtaggggtgattcgtgatgtgaagaaaaaatagttaaatagttattatttggagttgtatggaatttttttttttttttttttttttttttttttgcgatagagttttattttgttgtttaggttggagtgtagtgatgtaatttcggtttattgtaatttttgtttttggagttgaagcgatttttttgttttagttttttgagtagttgggattataggggtgcgttattatatttagttagcgttgtatgtaatttaattgagttttgtaagtatttagattttttggt

SEQ ID NO: 2022 - DNA, 2463 bp, Artificial Sequence
  chemically treated genomic DNA (Homo sapiens)
agttttgttttattttgtagatgttatatttttattttatttttttggggttttatgggtatagtgtattagttttggattggatggtaatgttttttagttttagttttatgatatttttggtattaagtgatagtaattgttgttgtagattttaggttaggagtggttttgtatgtttttgagtttaaggtgtttttgatggtattgttagtgtttttattggggtattttattttgtatatttttttgaaaggtaattttattttgtatattttgtttttggttaatttagtagttttatagttttttttgagattttgagtttgtaatgaggtttttagagattggaattttatagagtttttggttattgttttgaatttgtatttgtggatttaatttttggtgatttaaaggtaattaattttggggtggaattttatgagttggttttttaggagagaattggtagtggtagttagaggaagtgtgtgagaggttttgtttagtagggtgagtatatgttttgtttattcgaggtattgatagtggtagaaattaaaggaaaggagtagaggtagagtggtttggggtattataatgattcgtgtagttagatgtgttcggtgttgatgttagacgtgttttttttattgatgatagtggtaataatagtattgatttttttaatattattgaggtttattatgtgttaggtattgtgttaaaaatatttagtttttatggaagttttgtgatgtaggttttatttttatttttattgtatagatgaagaagatgaggtataataatttgtgtaagtttatatagttaatgtgtcggagttaggttttgaatttcgatagtttgattttagattattttttttttttagtatttatgttttggtgttttttgtggtatatttagaagatggtttgtatgtgtatgtgtttatttttgtgtgtgtgtatgtatgtatgtttatgtaggattgggaatgtaggggagttagagtttagttaggaaggagagaggaaatatgatttttttgttgtatgtgggtatcgtaattttagttaggtaaagtgttggtttgttgtagtttatttttatgtttttatttagaagttttaatattagagttgatggtagaaaatgtgtagtaaaatgcggggaggtcgttgggtaatggtttttgtaaagtgttaattgtttattgagattgtagattttgtttatgttttaggatttgaattattgataggttttaatttatttcgggtttataaagcgggttttttttttaaataggtttttaattagttacgtttttttgggtttgttaagaagttttagtcgataagtatgtttgttgttttaattttttgaagttggtcgtgtggtttgattttggtttgttttaaggaaatttttatgtataatggttttggatgaaaatttatgagaattaagtgttgatttcgtgttgggtttttagttgggtgttttatatgtattgtttttgatttttatcgtttagagaagtaggtagtatttttttaaggatattttaattttagagaagttgaattaattgtttaagtgattattatgattatattttagattgttacgggttaaattgtgtttttttaaatttatgttttgaagttttagtttttagtattttggaatgtgatcgtatttgaatatagggttattaaagaggtgatttagttataacgaggttttagggtgggttttgatttaattttattggtgtttttttaagaagaggaaatttggatatagataaatatagaggggtgatttattggaagatatagggagaaggtagttatttatagattaaggggagaggttttagaagaaattaattttgttgatattttaattttaaattgtaagtttttagaattataaggaaatgaatttttgttgtttaagttatttagtttgaggtattttgttatggtagttcgagtaggtgattatatatatttaggatttggtgtggttttgaatttatgtatatgattattgtaagtatgaaaattttgttttttggtttatggttttagttagaataagaagtagaaagtgggtaatattatttttttgtagtaaatttgtttttaggttgggtttttaaagggtttatgtttatttattagaaagaaaaagaaagttagatttgggattttaagtgtaaaaagaagttattgattgtttttaagtagagttagtaatataattagaatttttttttttttttggaaaaaatagttttttttggttattgtgtatagagaatggatggtagaatataaaagtgaagtaaggagattttagaggaggttgttgtattgtaggtaagagatgaaagtgatttgatggagagtggtggtaatagagaaggaaagaggtgaatagatt

SEQ ID NO: 2023 - DNA, 2463 bp, Artificial Sequence
  chemically treated genomic DNA (Homo sapiens)
aatttatttatttttttttttttttgttgttattattttttattaagttatttttattttttgtttgtagtgtaatagttttttttggggtttttttgttttatttttgtgttttattatttattttttatgtatagtagttagaggagattattttttttaaaaaaagaaagaaattttgattgtgttattgattttgtttagaaatagttaatgatttttttttgtatttagaattttaaatttagttttttttttttttttaatggataggtatgggttttttgaggatttaatttaagaataaatttattgtaaagaggtaatattgtttattttttgttttttattttaattggagttataagttagagaatagagtttttatatttatagtggttatgtgtataaatttaaggttatattaagttttgggtgtgtgtagttatttgttcgggttattataataaaatattttagattgggtggtttaagtaataggaatttatttttttataattttggaggtttgtagtttgagattaaggtgttagtaggattggttttttttgaggtttttttttttagtttgtagatggttgttttttttttgtgttttttagtgggttatttttttgtatttatttgtgtttaaattttttttttttgaaagaatattagtaagattagattagggtttattttaagatttcgttgtagttgaattatttttttaatggttttatatttaaatacggttatattttaaggtattgagagttagagttttaaagtatgaatttgagggaatatagtttagttcgtaatagtttgaagtataattatagtggttatttaaataattaatttaatttttttgaggttaggatgtttttgaagagatattatttgtttttttaagcggtaaggattagagataatgtatgtaaaatatttagttgggagtttagtacggagttagtatttgatttttatggatttttatttaagattattgtgtatggaagtttttttaaggtaagttagaattagattatacgattagttttaaagggttaaggtagtaaatatatttatcgattggagttttttggtaggtttagggaagcgtgattgattggaagtttgtttagaggaggagttcgttttgtgggttcgaaataaattagaatttgttaatagtttagattttggagtatggataaagtttgtagttttaataggtaattaatattttataggggttattatttagcggttttttcgtattttattgtatattttttgttattagttttggtattgaagtttttaaataaaaatataaaaatgagttataatagattagtattttgtttggttggagttacggtgtttatatgtaataaagagattatatttttttttttttttttaattggattttaatttttttgtatttttagttttgtataaatatgtatgtatgtatatatatagaaatgagtatatgtatatgtaggttattttttgagtgtgttataggaggtattagagtatggatattgggaggaagaggtggtttggagttagattgtcggagtttaaagtttgatttcggtatattaattgtgtgggtttgtataaattgttatgttttattttttttatttgtataatgggagtaagaatagagtttatattataagatttttataaagattaggtgtttttagtataatatttggtatataatagattttaataatgttaaagggattagtattgttgttgttattattattaatgggaggagtacgtttagtattaatatcgagtatatttaattgtacggattattgtaatgttttaagttattttgtttttgttttttttttttggtttttgttattgttagtgtttcgaatgagtaaggtatatgtttattttgttgaatagagttttttatatattttttttagttgttattgttaatttttttttaggaagttaatttatgaagttttattttaaagttgattgtttttggattattaggagttaaatttataggtgtaaatttaaagtaataattaggaattttgtgaggttttagtttttgggaattttattgtaaatttaaggttttagagaagattgtggggttattggattggttagaagtaggatatataggataaaattgttttttaggaggatatgtaggataaaatgttttagtgaggatattggtagtattattaggagtattttgggtttaggagtatgtaaggttatttttgatttgaagtttgtagtaataattgttgttatttgatgttaaggatattatggagttagagttagaggatattattatttagtttagagttggtgtattgtgtttatggagttttaagaaggtgggatgggggtgtagtatttgtaaggtagagtaggatt

SEQ ID NO: 2024 - DNA, 2461 bp, Artificial Sequence
  chemically treated genomic DNA (Homo sapiens)
tattatcgaggataattgttttttgagttatatttttattattaggtgttatattatagtaatgttttatattatattattttattttatttttgtgaggtagggtttttgttgtttaggttggagtgtagtagtatgaatatagtttattgtagtttttattttttgggtttaagtagtttttttattttagttttttaagtagttgagattataggtgtgtgttattatttttggttaaattttttaattttttgtatagataaggttttattatgttgttttggttggttttgaatttttgggtttaagggattttttttttttggttttttaaagtgttgggattataggtatgaattattatgtttggttttattgtagtattttaaatttagattggaaaattagtaattaaaagtgttaaatatagaattattaaatagatggattaaagatatattaagtttttggtaagaataatagttttggattgataatttttgagttaaaggatagtcgtgtttttagaatgagagtataattagataattgattggtttatttttttttttttggttggtgttgtattttggttgtaaatatgtacgaagtgtgtgtatgtgaatgtgggattggagggaaattatgagtatttaattaggtatgtttatatgtgatttgtgtgtttatgtgtgtgcgtgtgtgtttgtgtgtgtgtatgtatgtgtttgcgtgtttttgtgtttttatatatgggtttgtgtgtatatgtgtgtgtgtttgtgtatatttgtgtgtatgtgtgttgtgtgtttgaaggtaaattttaagaaggtaggggttatgtatttagtatagttattggtatagaataaatatttattatttgttaaatgaatgaatgaatgtgtatgcgtgtttgtgtgtgtgtgtgtgtatgtatgtttatatgtgagtgcgggtgtttgggtttttgagagtggggttattaatgtttgagtgggtgtgagggttttatatttgattatgtgtttaggtttttgtaagtttagaatttgattatgtagagataatgaatttttttgtatttttttgatttttatttgtgtttttatttattttttttagggttttttttgtttggggagttattttttttattagtttgtagttagtttttatttggatttttatttttgtgtgtttttcggaggatatagatggtaggagtacggaatcggaagtatttggtaatgaagtagtaatttatttcgtaattttttcgtatttatcgtaataatgtttgttttgatgggtttcgcgcgttgaatgtagtttttaatgtgtaatttagcgggaattgtggtgttttgtggtttttattacgtttatttattgttaagtgttgttgagaatttttttattcgggatgagggaattatttgttttagtaattgattttcgaaattttttttgggttggggtatttgcgaagtttttggtgatgtgttattgtttttggtttgtgttttggatatttatgtgttttgttgaagtatgtaaattgttataatgtgaggaaatgtgatataaaaataatttcggggtaataaatattagaggagttttaagattggtatagttttttttggttttgttttggggttagggagtattttttgtcggtagtgttggtagtaaaggtttgagatgttttggaatgattattgtttatttttttgtagttgtttagttggtttgttggagaagggcgggtgagattttttttaggaaggtaggaatagttggatgtggatcgtttttttttttcgtagttggttaatagaattataggttttgttttggttaaagggaatttgttatttttgattatttaggtggttgtatatatttaggggtaaatttatatttattgttggtcgtttatagttcgtttattttgttagtagggggttgttttttaggattttaggttaggtggttttagttgggatttattgggaagtattgatggggagtggaggatagcggaggggaggatggagataggaggagttgggaaagtttttgttttttttttttttttgatttagataatgtttttaggagtagttggttttttttgtggatttagattttaaaggtgattttttgtggttttagtttttggtagaagatttttgtttttggttattttattttttttttgattttttggtttagcggtggtggtgattttttgttgttgtttatttttgggttgatttattggtttttgtttggttttttagtttttttattatttatgtgatagatttttggtatcgaagtttttttgttttaagtgtttagtagttttttttttttgtttagattttgatattttattaaggacgttttggattattagatttttttttatggtttgtcgaggaaa

SEQ ID NO: 2025 - DNA, 2461 bp, Artificial Sequence
  chemically treated genomic DNA (Homo sapiens)
ttttttcgataggttatggaggaagatttggtagtttaagacgtttttgatgaagtattagagtttaaataagaaaaagaaattattgaatatttaaaatagagggatttcgatgttaggaatttgttatatgggtaatggaagagttgagaggttaaataagggttagtgagttaatttagagataaataatagtaggagattattattatcgttaggttagagggttagaggagagatgggatgattaggagtaagggttttttgttagaagttaagattataggaggttatttttagggtttggatttatagaggagattagttgtttttgaagatattatttgagttagagaggagagggaaatagagatttttttagttttttttgtttttattttttttttcgttgttttttattttttattaatgttttttagtggattttagttgaagttatttgatttgggattttgggaaatagttttttgttggtaagatgaacgggttgtgggcggttaataatgaatgtgaatttgtttttgagtgtgtgtagttatttgaatagttaggggtggtagattttttttagttagagtaaagtttgtggttttgttgattagttgcgaaaaaaggagacggtttatatttagttgtttttgtttttttaggaggggttttattcgtttttttttagtaggttagttgggtagttgtaggaggatgggtagtggttattttagggtattttaggtttttgttgttaatattgtcggtaagagatgttttttagttttaaggtaggattaggaaaggttgtgttaattttggagtttttttggtgtttgttgtttcggagttatttttatattatatttttttatattatggtaatttatatattttagtagagtatatgagtgtttaaaatataaattaggaataataatatattattaggagtttcgtagatattttaatttagagaaggtttcggaaattagttgttaaaataagtggtttttttatttcgagtgggagaatttttagtaatatttgataataagtggacgtgatgaggattataaagtattataattttcgttggattgtatattgaaagttgtatttagcgcgcggagtttattagagtaggtattgttgcgatgaatacgaagggattgcggaatgaattgttgttttattgttaagtgttttcgatttcgtgtttttgttatttgtgtttttcggaagatatatagaagtaaaggtttaaatgggggttggttataggttggtgaggagggtagttttttaggtaaggggagttttaaggaagatgagtgggagtataggtaggggttagaggagtgtaagaaaatttattgtttttgtatggttaagttttagatttatagaaatttaaatatataattagatgtaggatttttatatttatttaagtattaataattttatttttagaaatttaaatattcgtatttatatatggatatgtatgtatatatatatatatagatacgtatatatatttatttatttatttaataaatagtgagtgtttattttgtattagtgattatgttaagtatatggtttttgtttttttggagtttatttttagatatataatatatatatatatagatatatataggtatatatatatatatatatagatttatatgtagaaatatagagatacgtagatatatgtatgtatatatatagatatatacgtatatatataagtatataggttatatataaatatgtttaattagatatttatggtttttttttagttttatatttatatgtatatatttcgtgtatatttataattaaaatgtaatattagttagagggaagaggatgaattaattaattatttagttgtgtttttattttgaaaatacggttgttttttaatttagaggttgttagtttaagattgttgtttttattaagagtttgatatgtttttagtttatttatttgatagttttatatttaatatttttaattgttaattttttaatttaggtttaaaatattgtagtaaggttaggtatgatgatttatgtttgtaattttaatattttgggaggttaaggggagaggattttttgagtttaggagtttaagattagttagggtaatatagtgagattttgtttgtataaaaaattaaaaaatttagttaagggtggtggtatatatttgtggttttagttatttgggaggttgaggtgggaggattgtttgggtttagaaagtggaggttatagtgagttgtgtttatattgttgtattttagtttgggtagtagagattttgttttataaaaataaaataaaatgatataatataaaatattgttgtgatatggtatttggtaatggaaatatagtttagagagtaattattttcgatggta

SEQ ID NO: 2026 - DNA, 2495 bp, Artificial Sequence
  chemically treated genomic DNA (Homo sapiens)
attatgttagaagggttagaaaattttgaaagtaattattagtttagtagaagttgtaagaggtttttatattatgaatagtttaattttgataaatagaatttgtttatttagtgattttaaatgtatttaatgatgttatgatagtagtggttataatagtattagtttttgatagtagtgtggatataggttttgagaattttatataatagttgattagataatgtgatattggtgtgaggatgtgtgatttagattattgttttagagtgatttagagttggttgtgaaattgtaaggaggtattaaggggtaggtattttagattttgagttatgtggaaagtgttgagttatatggaaagtgttgatatttaggggtgggtttgggtgtattacgaggttagtatttagttgttttttggatgtaataaagtttggatattaataatttaatgatttttgattttatgggagttagtggatttgttttatattatttttatgttaaattatggtttatataaggacgttatttagttagagatttatattcgaaaaaagattatttcggaaatttttaaaaattaatatgtgatttggaaattgttttaatgttttataaacgttgaatattatgattcgtatgaatgattatgatgtttagttagtagagtattaaaaattttatttatgtttttgttagtgttgtaattttattaatattttttattattatggtaatgttttttaaagttgtttaagatttataataagttgtaaaaatagtgtaaaatttttgtgtattttttatttatttttttttattaataatattatatataattatagtatagtgttaaaatgaggaaattaatatagtattatattgttaatttgattatagaatttgtttagattttattaggatttacgtgtatttttgtgcgtatatgtatgcgtgtgtgtgtggtttatttttatttttaaggattgtttttttttataatttttatgttaaggttatggagttttagttattgttaggtagaggtggagttatatatgattgcgtttttatataattatattttttttatttaagaatatttattttatatggagaaatagattatgtttattaattattttagaaagtatgtaattttattagattaagttttgtttttgggtattgattaatagagggaacggttttttagcgatttagaatttttacgatacggtttgtggagattatattttggggttagttgtttaaatgtattgttggaattttaggtagaaatgtgtaatggtatgttaagggttgttgagttgttatagtttaagtagggttatttgtggtttttaaagagaggttgtaattttttatggtatttataaattttagtttttaagagttagggagaaaatgtaattatgttgtttgatcgagttaattttttttttattttgttttttttttatttttattattattttatttttaattttgagtagtttgtatagttgttttagggtaaagaatatggtatgagatattatttttagtattattttagggttagataaaatggttaggtattttttttgatttaatgagggaaagttttagaaagttgttgataaagtagaaattttttaatttgaggttttgaatatttattgttttttttgagtaagatagaaaagttttatttattggttggggtatttttaatggtagttgtaggttagggatagttatgtttatatatgtatttttttattattgattaggtttattagaatgttagagttaaagaatattttttttttgttttgtaggtatatggagaagggttttttgttgttttttttgatataaatatagtgtttgaagtattttttttggtaatttttttgatttatttgtatgtgtatttatttattttatttattaggagagttaaatgagtgaaatggttataaatggtggttttggaattagatagatttgggttttaatattatttttaatatttattggttgtgtggtttttatattaggatagaaagtttatatgttgaatttttaatttttagtatttagaatgtgattttatttggagatagggtttttatagttgtgttttttatagttgtttttaagaatatttaagattggtgtttttaggaaggggtgatattggagataggtatatataggaagaatattataataacgcgaatttagagattggggtaatgtttttataagttaaggaatgttaaagattgtttaaaaattattggaagttaggaaagaggtttagaatagattttttttttattatttttatatggtgttaagttttttgattttgattttggatttttagtttttaggattgtgagaaaataaatttttgttgtttaagttattatttagtatgtggttttttgttatagtagttttagtaagttaat

SEQ ID NO: 2027 - DNA, 2495 bp, Artificial Sequence
  chemically treated genomic DNA (Homo sapiens)
attggtttgttaggattgttgtaataaagaattatatattaagtggtgatttaaataatagaaatttatttttttatagttttggaggttagaagtttaagattaaggttagagggtttggtattatgtgagggtagtaaggggaagatttgttttgggttttttttttagtttttagtgatttttggataatttttggtattttttggtttgtaaaagtattgttttaatttttgagttcgcgttattatggtgttttttttatatgtatttgtttttaatgttatttttttttaaggatattaattttaggtgtttttaggaataattgtaaagggtataattgtaaagattttatttttaaataaagttatattttaagtattggggattagaagtttaatatgtgaattttttattttaatatgaaggttatatagttaataagtgttagaggtagtattgaaatttaagtttgtttgattttagagttattatttgtaattattttatttatttgatttttttggtgaatgaaataagtgaatatatatataagtggattagagaagttgttagaaaagatattttaagtattgtgtttatgttaaaagggataataggaaatttttttttatgtgtttgtaaagtaaaggagagatattttttagttttggtattttaatgggtttgattaatgataagagagtatatgtgtagatatgattgtttttggtttatagttgttattaaaagtattttagttaataagtaaaatttttttgttttgtttagaaagaataatgaatgtttaggattttaaattagaaagtttttattttgttaataattttttgggatttttttttattgaattagaagggatgtttggttattttatttggttttgaggtaatgttaaaggtaatgttttatgttatgttttttgttttgggatagttatgtagattatttagggttgggggtagagtgatggtgggagtgggagaggggtaaggtggggaaagagttagttcggttaaatagtatggttgtattttttttttgatttttgaaggttgagatttgtggatattataaaaggttatagtttttttttggaagttataaataattttgtttggattatgatagtttagtagtttttggtatgttattatatatttttgtttggaattttagtagtgtatttgagtagttggttttaaagtatggtttttatagatcgtgtcgtaggggttttgggtcgttggggagtcgttttttttattagttaatgtttagagatagagtttgatttaatgaaattatatattttttggagtgattaataaatatggtttatttttttatatgggatgaatatttttaaatgaaaggaatgtgattatgtgggggcgtagttatgtatagttttatttttgtttagtaatggttaaaattttatgattttggtatagagattgtaaggaaagatagtttttaaaaatagaggtaaattatatatatacgtatatatgtacgtataagagtatacgtaagttttggtaaaatttggataaattttgtaattaagttaatagtatgatattatgttaatttttttattttgatattgtattgtggttatgtgtgatattattaatggaggaaggtgagtaaagggtatataggaattttgtattatttttgtaatttattatgagttttaaataattttaaaaagtattgttatagtaataaaaagtattagtgaaattataatattgataaaagtataggtagaatttttagtattttattaattgaatattataattatttatacgagttatgatgtttaacgtttatgaaatattagaataatttttaaattatatgttaatttttaaaaattttcggagtggttttttttcggatatgggtttttaattaaatgacgtttttatgtgagttatggtttgatatagaaatggtgtaaagtaggtttattgatttttatgaagttaagaattattaggttattgatgtttaggttttattgtatttagagggtagttgagtattgatttcgtggtatatttaggtttatttttggatgttagtattttttatatgatttaatattttttatatgatttaggatttggagtgtttgttttttgatgtttttttgtaattttatagttaattttgggttattttaaagtagtggtttgggttatatatttttatattaatgttatattatttagttagttgttgtatggggtttttagaatttgtgtttatattgttgttaggaattgatattgttgtggttattattgttatgatattattagatatatttaggattattaaatagataagttttatttattaaaattaggttatttatggtgtagaagttttttgtagtttttgttgaattaataattatttttaaagttttttaatttttttaatatggt

SEQ ID NO: 2028 - DNA, 2425 bp, Artificial Sequence
  chemically treated genomic DNA (Homo sapiens)
atgtattttgagtgatttaggaaaattgtttttttttttttttttttaatttttaagtatttaaattaagttttttttttttgtaacgttttatttttggtgtttatgggagttgagaatatattattggagaatttttttagtttaaagatattagattaataaaataatttggatgttaattttgaagttagtttataataattagggtttttggtttaggtttataatgagtaggagatttttgttatttttagtgttatttttttgtaaaattttaataagttattttatgtgaaaatattaattattgtttattgtagcgtttaaaattagttaaggaagtttttttgaaggtggtgacgtaggggtttatataagggattagttgatggaaaggagaaagatgcgcgttttagagagaagaaataagttgggtagttttgtaaatggtttatgtttatgtggagatacgttaggttagagtaggtttgtgtgggagagaagttgtggttaggggtatggaattggatagagattaaaaatatgggttttagaaagttaaattggaggatttttattttgtaattttattttttttttttttttttttttcgaaattaatcggatttattttttattttttttatgggagattttatagttattatttttatttttttaatagttttgggaggtataattatttttatttattagttaaggaaattaaggtttaggagggtttattgataggagcgggagtagtttgggtttatgttacgtgtttttatagttagtatatagttttatttgttttattttgtatttgttgtgttttattgtatttagattgtagttagttttttttttgtttttttgaattttagtataggtaggtattgtatttatttatttttatagatggtaaatcgaggtttagagatgttaaattatttttttaatgttatattgttaggaagtcgttaatatattattaaatttggggatatttgttttttagggtagtatttcgttgttttttaatatttagtagttgtgattgttagatgatgatgatgattattaatagagttattgtttttggggtaatattagtagtgtagtagcgagtaggttagtagggtttagggtagtttgttcggttatatttgttttggagttgttgtttgttgtgtattaggaattcgtcgaagtttgagagttgttagtatagattttattagggagttagtaacgttttttatttttttaggtttttttgaaatttagttaaggaataggcgttgagtttatagttagatagttttcggagttttcggttttgggtacggtgttttagttggtggagatggaaatagtaaggtttttttgatttaaagattttttattgtttttgatattttagatttaaaatttattattattgttatttagtatttattttgttaggtatgatgtagggagagaggaggggataaaaaagggaagggtcgtatagagttagggtagagggaggaatcgagttggagaaagtattaaggatttatttgtgaaaattttttggagtgttgaggttaaaagtttatttgggtgggattaaaggggagtttttaatatagtttatgattggaggattagtaatttgtaggtttagttaggttttgattttttttttttttagtttttgaggagaattatagttattgtttgagaaaatgtagttttaggatataggattttaatttagtgtttgtatagttttttaattagaggtttgtaaatggtagagtcgtttatttggattattttgtaaattgtgaggttaaattgtattaataaaaaaaagtattttttttttaatttttttttttttttagttttttattagattgggatgagatgtagaaatgtattagattgggaaatatatttaattttttgttaagtttttttttaaataataagtttaatttttggtaggtaagggtgttttggtaaaatttaaatagaattgtttagtttttattatatttattttgatagtgaattttttagaataggaagtattttttgtttaaagtttttgtttagattttatatatgaagtttttaaaagtaaaaggaaattatagtttagttttttgtagatattttgaatattttgaggagaggtagggataatcggaggtagggaaacggggtttcggatgataagttttagttttgggaaagttttggaggtggtaggatagttaggttagagttgttcggtggagatttggtttttgaagttagcggggtatttttgagtagtaggttttttttagagtaaatattagttttttttttttttgtttttaatgattatagttgggtaggggggagaggttttaatttttaa

SEQ ID NO: 2029 - DNA, 2425 bp, Artificial Sequence
  chemically treated genomic DNA (Homo sapiens)
ttgggagttaaagttttttttttttatttagttgtggttattaaggataaagaggagagagattgatgtttgttttgagaaaggtttgttgtttaggggtgtttcgttggttttaggagttaagtttttatcggataattttggtttggttgttttgttatttttagaatttttttagagttgaggtttgttattcgagatttcgtttttttattttcggttgtttttgtttttttttaagatgtttagagtatttgtaaagggttgagttgtgatttttttttgtttttaaaaattttatgtataggatttaaatagaaattttagataagaaatattttttattttaaaggatttattgttaaaatgagtataatggaaattaggtaattttatttaggttttattaagatatttttgtttattagagattgggtttgttgtttaaaagggagtttagtaaaggattaggtgtgttttttaatttgatgtatttttgtattttattttaatttgatgagaaattgaaagagaaagagaattaaaaggggaatgtttttttttattaatgtaatttgattttataatttgtagaatgatttagatggacgattttattatttgtaggtttttggttggaaggttgtgtaggtattgaattagaattttgtgttttgaggttgtatttttttaggtagtgattgtagttttttttaaaagttgagaaaaagggaaattaaggtttaattaggtttgtaagttgttgattttttagttatgggttgtgttgggggtttttttttgattttatttagatgggtttttagttttagtattttaaaggatttttataagtgggtttttaatgttttttttagttcggtttttttttttgttttggttttgtacggttttttttttttttatttttttttttttttttgtattatgtttggtagggtggatgttgaatgatagtgatggtgggttttaagtttgaggtgttaggggtaatgaggagtttttgagttagaagggttttgttgtttttatttttattagttagggtatcgtgtttagggtcggaggtttcgggagttatttgattgtgagtttagcgtttgttttttggttggattttagagaggtttgaggaagtgaggggcgttgttggttttttggtggaatttgtgttgatagtttttaggtttcggcgggtttttggtgtatagtagatagtagttttagggtagatgtggtcgagtaagttgttttgggttttgttagtttgttcgttgttgtattgttagtgttgttttaaaagtaataattttattaataattattattattatttaataattatagttattgggtattgggaggtaacggagtgttgttttgaagagtagatgtttttaggtttagtaatgtgttggcgattttttagtaatgtgatattggaggagtggtttaatatttttgagtttcggtttgttatttataagaatgggtaagtgtagtatttatttgtgttgaaatttaaagagatagagagaaagttggttgtaatttaaatgtagtaagatatagtaggtgtaggataggatagatgaagttatgtgttgattatgaagatacgtgatatgagtttaagttgttttcgtttttgttagtgaatttttttaagttttagtttttttagttagtaaatggggataattatattttttaaagttattgagaaaatggaaataatagttgtgaaattttttatgaggagaataagaaataagttcggttaatttcgaagaaaaaaagagaggaaagggtggagttgtaggatgaaagttttttaatttgattttttaggatttatgtttttggtttttgtttaattttatgtttttaattataattttttttttatatagatttgttttaatttggcgtgtttttatatgggtataaattatttgtaaaattatttagtttgttttttttttttggaacgcgtattttttttttttttattagttgattttttatataaatttttacgttattatttttaaagaggtttttttgattgattttgaacgttgtaatgagtagtgattaatatttttatataaaatagtttgttgaggttttataaagaggtagtattggaggtggtagaggttttttgtttattgtgaatttgagttagaagttttgattattgtaggttggttttagggttaatatttagattgttttgttgatttggtgtttttgaattgaggaaattttttaatggtgtgtttttaatttttatgaatattagagataaaacgttgtaagaggaggaggtttagtttaggtatttagagattgaggagaagagaaagaaggtaatttttttggattatttaggatgtat

SEQ ID NO: 2030 - DNA, 2488 bp, Artificial Sequence
  chemically treated genomic DNA (Homo sapiens)
tttttttttttttgagacggagtttcgtttttgtcgtttaggttagagtgtaatggcgcgatttcggtttattgtaattttcgtttttcgagtttaagtgatttttttgttttagttttttacgtagttgagattataggtatgaattattattatattcggttaattttgtatttttagtagagattgggtttttttttgttggttaggttggtttggaattttagattttaggtgattttttcgttttttttttttagagtgttgggattataagcgtgagttatcgcgtttggtcgaattattggttttttttaagtagtggaataataatggtttataatatttagaagatggggttatatatttattagatttatttttttagagtttattttagtatttgatatagggtagattttaataattgttgttaattaataaatatatatttttaaatatattgttagtaatgtggaagatatattgaagaaggaaaagattagtggtaagatataagttaggtggtaaaatttaaaagaaaagttagtgatagaaaagaagtttgttgagaatgatggtttttagttttatttatgttttatgtatatatatgtaataaattagtatattgtgtatatgtagtttagaatttaaagtataataaataaatatgtgtgtgtgtgtatatatatatatatatatatatatatataaagaagttgatatgggagagatatttgaggtagaattgataggttttggagatagtatgattgtgtggttttagagagagatattagttgagaataatttttaaaatttttatttgtgtgtgattttttatgggggatatagaagggggagtttagtcggggattttgagttttagttgtttttggaatatgattgtatagatcgcggtttgaaaggaagtggtagagaagaaaaatttaaaatggttgttaatagtttgttttttggaggttttagagtttcgggggttatggatgtatggttacgtagggtgagtaattgtgatgagagaatagaaaggaaatttaaataagagaatttaaagtagagatgagttaaaaattagtaatacgaattattataagtgggtagttacgttcggtaggagatttaggtaaagcgagggtaaattttttagtttttttttgtggaaaatttataaagtttagattggagaaaacgtattgatagttttgaagttggtattttaagttggaatgtttttttaaagtagtatataacggtataatttaataattttgattattgtggaaaaatgttatgtgttaatagcgattttttataattttgtttagaaaatttgaaagaaatgtaaaaaatggatttgtagttttggtagtaggtagagaaatagtagtagagggttgtaggttagtaattgatgttttaaatattattgagtgttttgtttgtaattttaggggagaatgataataattaaaagtataaatttataagttatttttgaggaggaaaatgttgaatgtatttaaagtgaagggggtttgttgaaatgtttaagtttttttagcgagtttttagatatgtaatgattagttttatgtttatagagtgattttttttttaaatgttttaaagtgttataaaatggaatagattattaatttatgagattttttgggagttagtgatgaaattataattatatgatatttttatatgtttagattttatttgattgtatcggtttttgttataaatagtatagtatattgtttaaaaggatgaaatgaaatttttttttttttttttaattgatttggggttttattacgaggtagatttgagtttgagtttgtatttattttttttagtgttgtgattttaggtaggttattttatttttttttatttttatttttttatttgaaaaatagatagaataatagtatttaatattttatagggtgaatattgaggattatttgagagtaaaataattaatataattttttatttataatttacgtttaataaatattagttattattgatattattattattgttaaaatgataaaggtatattatttttataattatttatttttgttgatagaatgtaaatttggttatagattgtttaaatttttttgatattttaaaataaataaataaataaattagttagagatttaattgagtagtataatttttttttgaaaggaattttttatggttaaataaatttagggattgagttttttatattttagattttattatttattgtattataggttttggtatgtagtgagtattttataaatgtggagtatatatattgttgaatgggtaaatagttttattttttttgagaagtaaggatttttggttttttattattttttgatgattaatattatgtttgtgtttatataagttagttgtgatatttggatttttttta

SEQ ID NO: 2031 - DNA, 2488 bp, Artificial Sequence
  chemically treated genomic DNA (Homo sapiens)
tgaaaaaaatttagatgttatagttaatttgtgtgggtataagtataatattagttattagaaagtggtgagggattagaggtttttattttttaggagggataaaattgtttatttatttagtaatatatgtgttttatatttatagagtgtttattgtatgttagggtttgtaatataatgggtaatagggtttgggatatggaaaatttagtttttgaatttgtttaattatgggggattttttttaggaaagggttatgttgtttagttgaatttttggttggtttgtttgtttgtttgttttaaaatattaggaaaatttagataatttgtggttaaatttatattttgttagtaaaaataaataattataaaaatagtgtgtttttgttattttagtagtaataataatattaataatagttaatatttattgagcgtagattataagtgggaaattatattgattgttttatttttaggtaatttttaatatttattttatgagatgttaagtgttattgttttatttattttttagatgaaaaaatggaagtggagaggaatagagtgatttgtttaaggttatagtattaaaaagggtggatgtagatttaagtttaaatttgtttcgtagtaaagttttaagttagttgggagaaggaggaaaggttttattttatttttttaaatagtgtattgtgttgtttgtaataaaggtcggtataattaagtaaggtttgaatatgtgggaatgttatatggttatagttttattattggtttttagggaattttatgggttaataatttattttattttgtggtattttggaatatttgaggagaaagttattttgtgaatataaaattaattattgtatatttgaaagttcgttggaaaaatttaagtattttaataaattttttttattttaagtgtatttagtatttttttttttagaaatgatttgtaagtttgtgtttttaattattattatttttttttgaaattataggtaaagtatttagtgatatttgaaatattaattattggtttgtagttttttgttattgtttttttgtttgttgttagggttgtaaatttattttttgtattttttttagattttttgaataaaattatggaaaatcgttgttggtatatggtatttttttataatggttagagttattgaattgtgtcgttatgtgttattttgagaagatattttaatttaaaatgttagttttaaaattattagtacgttttttttaatttgagttttataaattttttataggaaaaggttaagaagtttgttttcgttttgtttggattttttgtcgagcgtaattatttatttgtgatggttcgtgttgttgatttttagtttatttttgttttgagtttttttatttggattttttttttgtttttttattataattgtttattttgcgtggttatgtatttatggttttcggaattttgaggtttttagagggtaaattattggtagttattttgaattttttttttttgttatttttttttaggtcgcgatttgtgtagttatgttttaaaggtaattggaatttaaaattttcgattagatttttttttttgtattttttatggaggattatatataaataggaattttgggagttgtttttaattagtgtttttttttgagattatatagttatgttgtttttaagatttgttaattttattttaaatgttttttttatattaatttttttgtgtgtgtgtgtgtgtatatatatatatatatatatatatatatttatttattatattttaagttttaggttatatgtgtataatgtattggtttgttatatatgtatatatgggatatggatgaagttggaaattattatttttagtaaattttttttttattattgattttttttttagattttattatttggtttatattttgttattagttttttttttttttagtgtattttttatattgttgataatgtatttaaaaatatatatttattagttgataatagttattaaaatttattttgtattagatattgaaataggttttagggaaatagatttggtgagtgtataattttattttttaaatgttatgaattattgttattttattgtttagaaagagttaatggttcggttaggcgcggtggtttacgtttgtaattttagtattttgggaggaggaggcgggaggattatttgaggtttggagttttagattaatttaattaatagggagaaatttagtttttattaaaaatataaaattagtcgggtgtggtggtggtttatgtttgtaattttagttacgtgggaggttgaggtaggagaattatttgaattcgggaggcggaggttgtagtgagtcgagatcgcgttattgtattttagtttgggcgataagagcgaaatttcgttttaaaaagaaaaaag

SEQ ID NO: 2032 - DNA, 2378 bp, Artificial Sequence
  chemically treated genomic DNA (Homo sapiens)
ttgaagttatagtttaggttttgatttttattggtagtgaaattttattttgatttttgtgttttttattttgtaaaatgaaggtgggaatagttcgttgagtgattgttgtggggattagatgatatttgtggaagaattttgtaaggggtaaagaggtattattttataaggtaatgttattatttttaaggtggggtaagtgatagttagatatttaagttagagtaaagttaggagaaggttgtattggtatggaaaggggtaaatagtttatttttattagtttttttggagggttaattttaaagttattagagttttaagttttgggtaaaaaatgtttgtttttagagtaattttttatttttttagagttattatgtttaaggtgttttgttttgtttgtttgttttggttttggtttttgttttattttgtttttttgagatagagttttgttttgttatttaggttggagtgtagtggtgtaatttcggtttattgtaagttttgtttttcgggtttatattatttttttgttttagttattcgagtagttgggattataggcgtttattattacgttcggttaatttttttgtatttttttagtagagacggagttttattatgttggttaggatggttttaattttttgaattcgtggtgtttttattttgaaaaagggaaaaatacgttttatgttttgaggtttaattataaaatatttttattttttaagtttgattaggagttatttgttttagaatgatttggagtgtcgtttaaatgtagatttttaggttttatttttgattattatttaatttttttgagttttagtttttgagttttgaggcgtgacgtaatttttgttttaaattttagtaagagagttttaatagaaaaaaatgaataaatgaaaagatgaatggtttgtaagggagaggtagaatatgtatttagataagatgatttttattgttttatttaaattagatttttattattttaggtttttaaagatgtttttagttttaaataattaatagagtggttttatttttatttattgtgtattttggttaagtgtatagtaagtggattttttggtcgggtattttgttaatgttggagttgttaggaaataagaatgtgtgtatttattgaagaaaataaaaatgtttatgcgacgttgtatagagacgatttatgagattttatgaatgtgttattaaaagatttatttagttattgttaatgttaggtttgtaaatatttgggggtttaggtaataaagttttttgatggagttagtgggtaggacgtgtttgtggaggggagtatgagttttgtgttgtaggtgtttgtatttgtgagttgtgtggagttaagtatatttaaattataagtgtatatatgggtgtaaataaatgtatatatattagtggtgtgtaagggagtatgtatatatgtggattttatgagatcgtatagtatgggttatttttggtgtgattaggaagagaggttaagttatagtgtagaagtggatttattatttatattatttttaaaggatatagagttttcgttgtttaaaggaaggggttagttattatttattgttaagattaaaagttttggggtattaagaaaagtagattattaagagaaaaatgtttttagtcgagtatgtaagaatggatagagtttgattaataggaggaagagtagggttttattttgtttattttttttgttgggtttgaattttttattgatattatagtttattagttttaggtttttgaagtttttttgagttttgtgaattaggtttatgttttatcgtttttttgggagtattgttttgtgttttttagttgttaggttggtgtaaattatagaatgaataagtttttttattaagttttttggagtttagagtagtttattgttttttgagggttattttttatgggagaaagtttaagaaaatgtatagaaggtatgttattaaaagaaaagggaagaggaagagaaaaggaggaaggagaaggaggagaaggaaaaggaaagtaagaaagaagtgtttttagggtgagtttttgaattatttagagtttatttttataaaaatagttttaagattttttgtgggttatgtaagaaggaggggtgtttatttttttttttttttttatttttttgtaataaggagagaattataggttttgtaagagttttttgtttgtttggggtacgttattattatatgtatttttttaggtacgtgagggaggttatttttttacgagatagggaggaattttgggtaattgtggtttggaaatgaaattagtttttttaa

SEQ ID NO: 2033 - DNA, 2378 bp, Artificial Sequence
  chemically treated genomic DNA (Homo sapiens)
ttgaaagggttggttttatttttaagttatagttgtttagggtttttttttgtttcgtagggaagtgattttttttacgtgtttgagaagatgtatgtgatgatggcgtgttttaggtaaataaagggtttttgtaaaatttatgattttttttttgttgtagaggaatgaaagggagggaggaagtaggtattttttttttttgtatggtttataaggggttttaaggttatttttatgaagatggattttgggtgatttagggatttattttaaaagtattttttttttgtttttttttttttttttttttttttttttttttttttttttttttttttttttttttttttaataatatattttttatgtatttttttgaatttttttttatagaaggtaatttttagaaaatagtgaattattttaggttttaaggggtttagtaggagagtttgtttattttgtggtttgtattagtttggtagttggagagtataagataatgtttttaggagggcggtaaggtataaatttggtttatagaatttagagaggttttagagatttggaattaataggttataatgttaatgagaagtttaggtttagtagaggaggtgagtaagatgggattttgtttttttttttattggttagattttatttatttttgtatgttcggttagagatattttttttttgataatttgttttttttgatgttttaaggtttttggttttagtagtaggtgatgattaatttttttttttgagtagcgagaattttgtgttttttgaaggtagtgtgagtaatgggtttatttttgtattgtggtttagtttttttttttagttatattaggagtggtttatgttatgcgattttatggggtttatatatatgtatatttttttgtatattattagtgtgtgtatatttatttatatttatatatatatttatgatttaagtgtatttggttttatataatttataggtgtaggtatttgtagtatagggtttatatttttttttataagtacgttttgtttattgattttattagggagttttgttgtttgagtttttaggtgtttgtagatttaatattggtagtgattgagtgggttttttggtgatatatttataaaattttataaatcgtttttgtgtaacgtcgtatgaatatttttattttttttaataaatatatatatttttattttttaatagttttagtattggtagaatgttcggttaagaggtttatttattgtgtatttggttaggatgtatagtggataggaatggggttattttgttggttgtttgagattgaagatatttttggggatttgggataatggaggtttgatttggatgggataataggagttattttgtttggatatatattttattttttttttgtaagttatttatttttttatttgtttatttttttttattgaaatttttttattgaggtttaaagtaaaagttacgttacgttttaaaatttaaaaattgaggtttagaaaaattaagtgatagttaaggatggggtttgaggatttgtatttgaacgatattttaggttattttgaggtaagtggtttttggttagatttgaagagtgaaggtattttgtgattagattttagggtataaaacgtattttttttttttttaaaataaaaatattacgagtttaggagattgagattattttggttaatatggtggaatttcgtttttattaaaaaaatataaaaaaattagtcgagcgtggtggtgggcgtttgtagttttagttattcgggtggttgaggtaggagaatggtgtgaattcgggaggtagagtttgtagtgagtcgagattgtattattgtattttagtttgggtgatagagtaagattttgttttagaaaaataaaatgaagtaaaaattaaaattaaaataaataaatagaataaaatattttggatataataattttgaagaagtgaggagttattttaaggataaatattttttatttaaaatttaaaattttaataattttggagttgattttttagagaggttggtggaggtgggttatttatttttttttatgttagtgtaatttttttttggttttgttttaatttgagtgtttgattgttatttgttttattttaaaaatgatgatattattttataaggtgatatttttttattttttataaagtttttttataaatattatttaatttttataatagttatttagcgagttgtttttatttttattttatagagtgggaagtataggggttaaggtgaagttttattattagtaagggttagagtttggattatgattttag

SEQ ID NO: 2034 - DNA, 2432 bp, Artificial Sequence
  chemically treated genomic DNA (Homo sapiens)
gatttttttatttgtgagtttttgaagaattttgtatataatgttaatatggtgttggttatattttattttgatttttattgtgtttatgttttttattagattgtgagttttttgaggataaggatttggttttatttatttttatttttaggtttattttaatttggaatggagtaggtgtttaataaatatttattgaaatggatattaaatttgaataagttttgaggatttttaagttttttagggttggagagaggaattattaaattttttttgatatttgggatatatatatagtttataataattaaaataattaaatttggatgatttaggatatttgagtttttttttttatattttttattattttggtaaattttttaatttttttaagttttaatagttttatttgttattttgaagtaatttatgtgtcggttagggttaggtatgtttagaaacgttatttgttttagtttttataataattaaggtatatgagtatttgatttttattttatagatgagaaaaacggaggtttagagagattgagtaatttttttattttatatagttagtaagtagtagagttgggattagattaggttttttaatttagagatattatttatttatttatcgttttttttagaaaaatttttattgagtatttattgtattgttggtatagttttagatgttaggggtatagtagtgattaaggtaagtgattaaagtgtttttatatttatggtatttatattttttttttgttatgtatttttttaaagttggtgatataatatgagaggggtaataggattgtagtggttttaataaggtttagtatatatagtagttttagaatgagagtagtaagattaattagttaacgttaatttttattataggtggagatggagtttgatgtgaagttacgttttgtttgtttaggatagggtaggttgaagttttttagtatttgtggttgggttgggttaggatagagaggggagaggtaatttggaagttgtaggttataagtttttttttttgttattttgtgttttttttttagttttgtttttagttaagtataggagtagtcgtttaagtttacgatgtgttgcgtgtaggttgtagatttattattatttataataggttgttgtttttattttttatttatagaggtggttgagttattatttatggttatcgtagtcgttaaattgtttcgggggttgagatttatatagtagttatgtgagttgttataaatttggggttgggaggaggatgtttttaatcgaattagagttgatgattgatagatagggatagtagagattagttttattaattttaaaaagtttaggaagtttttatttagaatgtattttttggagataatagtggtggagtttaggttatgtatgagataaagaaaaaggtttagaataagtgggtgtatattcgtattttggaatagttaggaagatttgggagtgggaattagaggatggatttttattttttttttttatgatattaaattcgcgtagtaattatgttttttatttgaatagtggtttttaataattagttaataacgggatataatttttatagtttttaattttaagattttaaaatatattatgaataattaaatgttattatttagtgatttgggtaattaaagatttttttaattgttatttttttttttttgttgtgtttagaatatagtttagtattatgtttttaaatgaggaaattgaggtatagagaggttaggtgaattggtatagattatttgatattttatcgtggtttttagtttttattttatattttttttttagggtttttagtattgtgtttttgtatgattgattgtttttttttttttagttttaaattttatttttatttttatttattttagatattattatttaaatgttttttgttgaaattatttttatttttattggggtaggtgtagggatttagtaggataaattggttatttttttttttggttttattttggttttttttttattatttaaattttttattttgaataaagtagtaaaatgtatttttttttttatgcggtttagtataaggataggtttggatttttataatgaaagtttatgtttttaataagtgtttatagttagtgttttttgtatttatttaattgttgttttttgaaagttattattttttattttttgtgattaatgtgtattgggagttaaatttatacgtgtgtgtaggattttatttttaaagatatgttttattatcgtttattgatagggtttttaattttaagttaggatttacgtatgttagaggttgtggcgagttacgagtattgcgtttatttatgtatgggtataaa

SEQ ID NO: 2035 - DNA, 2432 bp, Artificial Sequence
  chemically treated genomic DNA (Homo sapiens)
tttatgtttatgtatgagtaaacgtaatgttcgtggttcgttatagtttttggtatgcgtgggttttggtttggggttgagagttttgttaatggacgatgatgaaatatgtttttggaagtagggttttgtatatacgtgtgaatttagtttttagtgtatattagttataggaaatagaaaatgatagtttttaggaggtaatagttaaatggatgtagagggtattggttgtggatatttgttagaaatatgaatttttattgtagggatttaaatttgtttttatattaaatcgtatgagaaggggggtatattttgttattttgtttagggtggaggatttaaatggtaagagaggggttaaggtgaggttaggaagggaggtggttaatttgttttgttggatttttgtatttgttttagtgggaatgagggtgattttaataggaaatatttaaataatggtgtttaggatgggtaaaggtgggggtgggatttggggttggggagaagggggtagttagttatgtagaggtatagtgttgaaggttttggagaaagagtgtggagtggggattaagagttacgatgaggtattagatgatttgtgttagtttatttggtttttttgtgttttagtttttttatttgagaatatggtgttgagttgtgttttgggtatagtaaaagaaaaaaaatgatagttaaaaaggtttttgattatttaaattattaaataatggtatttaattatttataatatgttttgagattttgggattgaaagttatggagattatatttcgttattagttggttgttaggaattattgtttaggtaaaagatataattattacgcgaatttgatattatgggggaaaggagtagaggtttattttttaatttttatttttaggtttttttagttattttagggtgcgaatgtgtatttatttgttttgagtttttttttttattttatgtatggtttgggttttattattgttatttttagggagtgtattttgggtgagggttttttgggttttttggagttgatgaggttggtttttgttgtttttgtttattaattattagttttaattcgattgaaaatattttttttttaattttaagtttgtggtagtttatatggttgttatgtaaattttagttttcggagtagtttaacggttgcggtgattataggtggtaatttagttatttttataaatggaaagtaaaaataataatttattatggatgatggtaggtttgtaatttgtacgtagtatatcgtaaatttgagcgattgtttttgtgtttggttgaggataggattggggagggggtataaagtggtaggagaggagatttgtgatttgtagtttttaggttgttttttttttttttgttttggtttagtttaattataggtgttaaagaattttaatttgttttgttttgagtaagtaggacgtggttttatattaggttttatttttatttgtggtgggggttagcgttggttggttagttttgttgtttttattttaaagttgttgtgtatgttggattttattggggttattgtagttttgttgttttttttatgttgtgttattagttttgggggggtgtatgatagaaggaaagtgtaaatgttataaatatggggatattttaattatttgttttagttattgttgtatttttagtatttagagttgtgttaataatatagtgggtgtttaataaagatttttttgagaggagcggtaaatgaataagtaatgtttttgggttgaggggtttggtttgattttagttttgttgtttattagttgtgtaaagtgggaaagttatttaatttttttgaattttcgttttttttatttataaagtggaaattaagtgtttatgtattttgattgttgtgagggttaaaatagatggcgtttttaaatatatttagttttggtcggtatatgagttattttagagtgataaatgaggttattgaggtttagagaggttaaggggtttgttaaagtggtggaaaatgtaggagggaaagtttaggtgttttgagttatttagatttagttattttaattgttgtgaattatgtgtatgttttagatattagagggaatttggtggtttttttttttagttttgagggatttgggagtttttagaatttatttaggtttgatgtttattttagtaagtgtttattaagtatttattttattttaaattggggtgaatttaggagtaagggtggataaaattaagtttttgtttttaaagagtttatagtttggtggagaatataggtatagtggaaattagaatagaatatgattagtattatattggtattatatatagagttttttagaaatttataggtgggagagtt

SEQ ID NO: 2036 - DNA, 2475 bp, Artificial Sequence
  chemically treated genomic DNA (Homo sapiens)
cggagagtatagtggttttttttaggaagttattttgatttttatttagatttttttttttgtgttaggtattgtgttttttttatagttttttttatagggttttttttcgatataattggtatttgacgtttttgtttttttgaaaataaggaaatagagggttagggaagtaattggtatttagtgttgttagggtttcgttttttgtagatgaggagataaagggttagggaggtagtgggatggatatgttgaggtcgttaggaaaagatagtttgatgtgtatttggagttgtttttgaaggttttatagaatttggtatagcgttaggtaattcggttgttttttttgttatatttattaattttagagtttatattttggtatagaaggaagagatttaggttggtgttgggtcgtaatattttagggaaaggggtaaggagttttgatttgtttttatatttgtttgtttttaaattgggttggattttggttgggtggtcgttgggtggtagttttgttttaggatattcggtagtaggataaggtgggggagttagttgttttgtgagttttttttaggattatttttttttgtttcgttgagtagagatatagtttttcgaggtttgagtttttattttttattatttttattttcgtttttggtatagaaaagttttagtattattttgtcgaatgtggtattgagtgtatgggtgaggtatttttttaagtaatttattatagtaattttttaaatgtttatatagttttttgagaaggggattattattattgttcgtttatagatgaggaaatggaggtttagagaggttaagtgatttattggaagttatatagttggagttaggatttgaatttaggttttttagttttagcgtgtatatttttgtttatatgtttttgtttttagggtagtagtgagtttgaaatacgtgtagtgtttggtaggtagtaggtgtttttttaagttttttttttgttttatttagttttgaggttagcggttcgttttgttttgtgtttgggaggaatgttcgtggtggttttagtttggattcgagaagaaaggtagttttgtgggcgaaaggtgagcggttgggtgggcgcgggcgtgtttatttagggtcggcgtgtggttcggggtggcgtcgttgttagtcgcgtcggttgttttaggtttgtgttggtttttagatgtgagttggttttagtcggtcgggtttttttattttacgtatagaggggttttattaaaagcggttgtgaggaggtttaggaggtcgtttggttttagtttgttggttttgagtttcgggtttgtagaagttaggttagtcgtatttgtgtttttgtgttttggttttcgtgtgttttacggtttagtttttttgtttttttcgagttttttgggggtttaggcgagggatagtttttttgttaggaaattgaagttgtaggagtagttcgggaggggtaataatgttagaatttttttgtagcgtttatttttttgtattttaggggggtagaggtaatttatacggaataaaagtgtaaaatttattaaaatttagagagtgtttagtgagatattaaagtgtagatattcgtgggaaggagaaattgtagatttagagagttagtttttagcggggaggagagtaattggggttggggggtttgtaggggttatgttttttttgcggtatttttttttttaggtgggggtgggggtgttatttttttttttttttttttttggagataggatttcgttttgttatttaggttggagtgtagtggcgttatcgttggtttattgtagtttttgatttattgggttttagtagtttttttattttagtttcgcgagtggttgggatttcgggtacgtattattacgtttagataattttttaaaaatagagatagggttttgttatgttgtttaggttggttttgaatttttgagtttaagtaatttttttgttttggttttttaaagtgttaggattataggcgggagttattacgtttggtttttagggatgttattttgtatattttatttagtggtttgaattattttgtaataataaattataataattgggaaaaaaaatagagaaaaaatttgagatatttatttgttttcgatttttagttttatttttgttaaaaatggtttttaatgttttttagagattgtttgaatatttataagaaaatttatatatattttttgtttttttttgtttttggttttataaatagtattaaaatatagtttgagtatagtggtttacgtttataaatttagtattttgggaggttaaggtggacggattttttgaggttaggagtttgagattagtttggttaatatggtgaaaatttatttttattaaaaatgtaaaaattagtcgggtatggtggtgagt

SEQ ID NO: 2037 - DNA, 2475 bp, Artificial Sequence
  chemically treated genomic DNA (Homo sapiens)
gtttattattatgttcgattaatttttgtatttttagtagagatgggtttttattatgttggttaggttggttttaaatttttgattttaggggattcgtttattttggttttttaaagtgttgggtttataggcgtgagttattgtgtttagattatattttgatattatttataaaattaaaaataaaagaggatagagaatgtatgtggatttttttgtgggtgtttagataatttttagaaagtattagaagttatttttaataggagtagggttgagggtcgggagtaggtggatgttttaggttttttttttgtttttttttttagttattatgatttattattataaaatagtttaggttattgaataaaatatatagaatagtatttttggaggttaggcgtggtggttttcgtttgtaattttagtattttgggaggttaaggtaggaggattgtttgaatttaggagtttaagattagtttgggtaatatggtaaaattttgtttttatttttaaaaaattatttgggcgtggtggtgcgtgttcggagttttagttattcgcgaggttgaggtgggaggattgttggagtttagtaggttaagggttgtagtgagttagcgatggcgttattgtattttagtttggatgataaagcgagattttgtttttaaagaagaaaaagaaaaagaataatatttttatttttatttaaaaaagaaaatatcgtagagaaaatatagtttttgtaaattttttaattttagttattttttttttcgttaagaattggttttttgaatttgtaattttttttttttacgagtgtttatattttgatgttttattgagtattttttgaattttgatgaattttgtatttttgtttcgtgtgggttatttttatttttttggaatgtagaaaaataaacgttgtaggagggttttggtattgttatttttttcggattgtttttgtagttttagttttttggtaaaggggttgtttttcgtttgggtttttaggggattcgaggagaatagaggagttgggtcgtggagtatacgaagattagggtataagagtataagtgcgattggtttggtttttgtaggttcggggtttagagttagtaggttggagttaggcggttttttgggtttttttatagtcgtttttgataaagtttttttgtgcgtggggtgggggggttcggtcggttggagttagtttatatttggaggttagtataggtttggggtagtcggcgcggttgatagcggcgttatttcgagttatacgtcggttttggataaatacgttcgcgtttatttagtcgtttatttttcgtttataaggttgttttttttttcggatttaggttggggttattacgaatattttttttaggtatagggtagaacgggtcgttgattttaaggttgagtgaagtaaaagaagggtttggaaaagtatttattatttgttaggtattgtacgtattttaggtttattgttattttgggagtagagatatgtgggtaagaatgtgtacgttggagttaggagatttgagtttaaattttagttttagttgtgtgatttttagtaagttatttaatttttttgagtttttatttttttatttgtgaacgggtaataataatagttttttttttagagggttatgtaaatatttaaaaagttattgtagtaagttgtttggaggagtgttttatttatgtatttaatattatattcgataaagtgatattgaggtttttttgtgttaggaacgaggataaagatggtgaaaaatggggatttaggtttcggggagttgtgtttttgtttagcggagtaggaagggatggttttgaggggaatttatagagtaattggtttttttattttgttttgttgtcgggtgttttgggataaggttattatttagcggttatttagttaggatttagtttagtttggagataggtaggtatgggagtaggttaaggttttttatttttttttttgggatattacgatttagtattagtttggattttttttttttgtgttaaggtgtgggttttggggttggtgggtgtggtaggagaggtagtcgggttatttgacgttgtgttaggttttgtgagatttttagagatagttttaggtgtatattaggttgtttttttttggcgattttaatatatttattttattgtttttttggttttttgtttttttatttgtaaggggcggggttttaatagtattaggtattagttatttttttgattttttgtttttttgtttttaaaaggataagagcgttaggtgttagttgtgtcgaggagagattttgtgagagaggttgtgggaaaagtatagtgtttggtataaagggagaggtttgagtaaaagttaaggtggttttttggaggaggttattgtgtttttcg

SEQ ID NO: 2038 - DNA, 2456 bp, Artificial Sequence
  chemically treated genomic DNA (Homo sapiens)
tatttgtatataatgtaagatatggatataatatgtagtgttagtttgtatttttttatttgaatattttatataaattattatagataggataaaaaagatatatatttatttaaatgattttttagtttttattttaaaagtagaagatatgtatttaagtagtatatgttatagtgtttttttttttaaattatttgtttttagtttttagggattttgttttgttatgttttattttattgtttaagaaattaagattttgttagtaagagggttaatatgataaattatcgatgatttttagtatggagttaagaagtttgtttttttgattagatttttagttggaaagatatttatattttgtttagtttaatatttgttaagtgagaatataaaatttaaagatgttttgttatattttagatttgtattaatgtttataaatattaaagatttatatgatatatatttaggaaatatatgttattttgttattgtttgaatttttaggaaataatgtttttattggtgtttcgaattgttattattttttgttattttgaagataattaatacgtatttatttgtgtttaattttagttttagattatggtattggtgtgtgagaaataattggtttaattaattataagtaatatattaattttgtttttttttttttttttttgagacggagttttattttgttgtttaggttggagtgtagtggtatagttttagtttatcgcgatttttattttcggggtttaatttttttagatatttttgttttagttttttgagtagttgggattataggcgtttattattttatttagttaatttttgtatttttagtagagatagggttttattatgttggttaggttggtttttaatttttgatttcgtgatttgttcgttttagttttttaaagttttgggattataggcgtgagttatcgcgtttagtttaattttgtttttataggtattggtttttattttttagttattggtttttttttttttgtaatttaggtttgtaatataattttttagttttttaaggaaaatagaattaaagatttttaatagaagattttagtttattaatatagttaatagttattaaagttatttaggtatcggtttaataaaaaattaaagggttgtagtaagtgattagatttttattatttatttttgtgagatgggttttagagggtttcgtttttgttgatattaattatttttatcggtagtttgttaatatataagtagtttatagtagaatattgtagattgtagggtatttttaggttatatagttttaagtttttagaataggaattgaggtttggaagaaggttagtgtagcgtatttagcgaatggataaattgaattattattttataaggttgtaagtttatgtattaatggaattaatatggaattagagttaaattattgttttaaatatttaatgtatgttaagaaatttatttaattattaagtatcgaaattataatatttttaaatgaatttataaagtaaaatagttgaattaatgatttgtaaggattttttggtagataaattttattgggaattaatatattattgttattaagaaagtaggtttaataaatgaataaaagaaatttagttaggtagagaggtttttgtttgtaattttagtattttgggaggttgaggtaggaggatcgttcgcggttaggagtttgagataagtttgggtaatatagtaaagttttaaaaaaaattatttaggttcggtggtttatgtttttatttttaatattttgggaggttgaggtgggaagattatttgagtttaggattttgagtttgtagtgaattacgattagattattgaattcgagtttgggagtaggtcgagattttgagattttgttttaaaaagtaaaaaatagaaatgttagttttttttatttagagttaaaagtttttatttattatttaattttattatggtttttttttaaaagtttattggtatattatattaagttagtaagtttttttttttgtagtagggttttattttgttgttaaggttggaataagttttttttaataaagttaagatggtttatattatttatgtggatgagggtgttgaaggatatttattgtttttttttatggttttattttatgattaaattaagatgtataggaaataggtttgataatttatttttattaagaaagacgatttagtaatagtggtagagttgtttgtttgaatttaattttggttattttagtttgaaatataaatggtagtatggagagtaggttgttcgttttttggttggatattttttttatttttgagtttgaggtatagtaaattttttaaattatttagatgtaaatattttaatatttagattaggg

SEQ ID NO: 2039 - DNA, 2456 bp, Artificial Sequence
  chemically treated genomic DNA (Homo sapiens)
ttttggtttgagtattggaatatttatatttgaatgatttgggaaatttgttgtattttaaatttaagagtgaaagaaatgtttaattaaaaagcgggtagtttgttttttatgttgttatttgtattttaaattgagatgattaaggttaagtttaaataggtagttttattattgttgttgaatcgttttttttggtaaaggtaaattgttaaatttattttttgtgtattttggtttgattatgaagtgagattatgaaggaaggtagtaaatgttttttaatatttttatttatatgagtaatatggattattttagttttgttgaagagggtttgttttagttttggtaatagagtgagattttgttataaaaaagggggtttgttgatttgatatggtatgttagtgaatttttgggagggagttatgatgggattgggtagtaggtgaaggtttttagttttgagtaaaggaaattggtatttttgttttttattttttgagatagggttttagggtttcggtttgtttttaggttcgagtttagtggtttgatcgtagtttattgtagatttaaaattttgagtttaagtgatttttttattttagttttttagagtgttaggagtaaaggtataggttatcgagtttaggtgattttttttaaggttttgttgtgttgtttaggtttgttttaaatttttggtcgcgggcgatttttttgttttagttttttaaagtgttgggattatagataagaatttttttgtttggttgggttttttttatttatttgttggatttgtttttttggtagtagtggtgtattgatttttagtaggatttatttgttaggagatttttatagattattagtttagttgttttgttttgtgaatttatttgaaagtattataatttcggtatttagtaattagatggattttttgatatgtattagatatttaaggtagtaatttaattttggttttatgttgattttattagtatatgggtttgtagttttgtgaaatgatgatttagtttatttattcgttgagtgcgttgtattgatttttttttaagttttagtttttgttttaggaatttgaggttatgtagtttgaaaatgttttgtagtttgtagtgttttattgtgaattgtttgtgtgttggtaggttatcggtaagaatggttggtgttagtagggacggggttttttgagatttattttataaagatgagtggtgaaaatttgattatttgttgtagttttttagttttttattaagtcgatgtttgagtagttttaatagttattagttatgttagtagattgagattttttgttagaagtttttagttttgttttttttgggggattaagaaattatattgtaggtttgaattataggaaggggagaattaatggttagggaatgagagttaatatttgtaaaagtagagttgggttgggcgcggtggtttacgtttataattttaggattttgggaggttgaggcgggtagattacgaggttaggagttagagattagtttgattaatatggtgaaattttgtttttattaaaaatataaaaattagttgggtggggtggtgggcgtttgtaattttagttatttaggaggttgaggtaggagtatttgggagaattgaatttcgggggtggaggtcgcggtgagttgagattgtgttattgtattttagtttgggtaatagagtgagatttcgttttaaaaaaaaaaaaaaaaaagtagagttaatatattgtttatagttagttgaattagttgttttttatatattagtgttataatttaaagttgagattgaatatagataggtacgtattagttatttttaggatggtagagaatagtaataattcggagtattaatgggaatattgttttttgagagtttaaatagtaataaagtagtatgtgttttttaaatatgtattatgtgaatttttaatatttgtggatattaatataaatttagagtgtgatagaatatttttgaattttatatttttatttaataaatattggattaggtaaggtgtggatatttttttagttgaaaatttgattaaggaggtaggttttttggttttatgttaagaattatcgatgatttgttatattggtttttttgttggtaaaattttagttttttaggtagtggaatgaaatataataaaataaaatttttagaggttaggaatagatagtttgaaagagaagatattgtagtatgtgttgtttaagtatatattttttgtttttggaatggaaattaggaagttatttaaatagatatgtgttttttttattttatttgtagtaatttatgtgggatatttaaataggaaaatataggttagtattgtatattgtatttatgttttatattgtatataaatg

SEQ ID NO: 2040 - DNA, 2488 bp, Artificial Sequence
  chemically treated genomic DNA (Homo sapiens)
tagaagtttttttaggtgtaagcgttagggaaggatgttgagataagagggagttagtgaagattgaaggaagagtgttagatagaggggttagtagatgtagagttttagggtgattggtggaagaaaggttagtgtggttggagtttggagggtgatagggagaggggtagaatttgaggttagagttgtgatttggggttgatggaataaggttttatgggttaaggtaaggaatttggtttttattgttagtaagttaaagatttgttagaatgttgagagttttgatttgtgtttgtagagatggatgagattgggtttagtgtaggtttaggatcgggggatgtgtggtttgtgatagggtggtagagagggtatttaggagttgtggaaagattttggatatattttggaggtttttaattatttttatattttgttttttatagtagagtttttttgttagtgatttatgtttggtttttttatattgtggtttgagtattagagagtaatattgtaaagtttaattttttatagtttattgtaggaatgattttatttttgtttttaaggttagtatggtggagggattttatggtatgagtttttatgatgatattagatattggatattaaggagtgcgatgtttatttttggtttttagtgatttttgggtatagtttggatataaaagttagaatttgtttgatggttttttttttaagaaaaaaaaaaaaaaaagtaagtaagtttagggaagtagtttttttttttttggttaatatgaagttaagtgttttattattgtttagtttttttttaaatataaaaatattaattttaaaaagatattgtaaaaagtttaagaaatatgtatattgaatttgatttatgtatattattgtagttaatatttttagggaaatttttaaatgtttgttataggagtttgttagaaaaagaaagatttatttttggaaaagtatgttttttggtgtttattgagtttggaaattatggaaagttattgttagaagggaggtagttgttttagaggcggagtggaagttaggattggagaaggttgttttattgtgggttttagcgtgttttttgttgttagttggttaagagtttcgtagtagttattttatattttattagttttattatcgtaattatttttgttaaaacgaaatataaaagaatggtatgtttatgaatattttttatagaaaatatattcgtttgattattttttataaaatgtgaagttaatttttttttttatttttaattatgaaagtgaagttcggaagttttaatttttttgtaatggaaagatttgagtttgtggttttgtttttattttttattttttttttgttaagttaggaatatgatatttatataatatttttcgggtagtggttttgtttaggaattgtatggttgtttgattgtagagggagggtaaaggttattattaattattcgtgttattgttgggttatgaaatttttaggggataagtataagttttataaaattttattttgaaatttagattagatttggttttatgttttgaggatttttttttttttttaagttttatgttgtttttttgtttttttttatttttttttgggaagagttttttattattataattattatttgaaaaaaaattttaagtaagaaagtagtgtattaattggaaagtaataatttagaaatgttattttttaatagtaagtttttatagtatttttgggtagaaaggtatttttatagaaatagttatttttttatttttttttttatgagtttataaaatagtatttttatattaatttttgttatatttaatatataaaattagtatttttttaagaatttagaagtttaagatatattaaaaatatttttgataataatttttatttttagaggtagcgtcgttaataagttttatgtatttatttttagatttaataaaaatatgtttatttatatttatatatggtatttttgggtgggtatatgttagaagatttttttaaattgtgtttaattatatataatttaaaatttttaggtatatagtttcgtggtattagtatatttatattgttatgtaatttttattattattatttatttgtagaatttttttttttttttttttaagacggagtttcgttttgttatttaggttggagtatagtggagtgattttagtttattgtaatttttattttttagatttaagtaatttttttgttttagtttttcgagtagttgggattataggtatgcgttatcgtgtttgattaatttttgtatttttagtagagatgaggttttattatgttggttaggttgattttaaatttttgattttaagtgatttattcgtttcggttttttaaagtgttgggattataggtgtgagttattgtttttagtttatttata

SEQ ID NO: 2041 - DNA, 2488 bp, Artificial Sequence
  chemically treated genomic DNA (Homo sapiens)
tgtagataggttgggagtagtggtttatatttgtaattttagtattttgggaggtcgaagcgggtagattatttgaggttaggagtttgagattagtttggttaatatggtgaaattttatttttattaaaaatataaaaattagttaggtacggtgacgtatgtttgtaattttagttattcgggaggttgaggtaggagaattgtttgaatttgggagatggaggttgtagtgagttgagattattttattgtattttagtttgggtgatagagcgagatttcgttttaaaaaaaaaaaaaaaaaaattttgtagatagatggtgataataaaagttgtataataatgtgaatatattaatgttacgaaattgtatatttaaaaattttaggttatgtataattaaatataatttaaaaaaattttttgatatatatttatttagagatattatgtgtaaatgtgggtaaatatatttttgttaagtttggaagtaaatatatagaatttattaacggcgttatttttgagaatgagagttattgttaaaaatatttttagtgtattttaaatttttaaatttttaaaagaatattgattttatgtattagatataataaaaattgatataaaaatgttattttatggatttatgagaaaaaagataggaaaataattgtttttataaaaatatttttttatttaggaatattataaaagtttattattaaaaaataatatttttaaattgttattttttagttaatatattgtttttttgtttggaatttttttttaagtagtaattatgataataagagattttttttaagagaaaatgaaggggggtaaagggataatatgaaatttaaaaaaaaaaaaaaatttttagagtataaggttagatttggtttggattttaaaatgaaattttatagaatttatatttattttttgaaggttttatgatttaataatgatacgaatggttaataatagtttttgttttttttttgtagttaaatagttatgtaatttttgaatagagttattgttcgggggatattatgtgagtattatgtttttgatttagtaaaggagaagtggaaaatggaaataaggttataaatttagatttttttattataaagaaattgaggttttcgggttttatttttatgattaaaaatagaaaaagaaattgattttatattttatggaaaatagttaaacgaatatattttttgtgaagaatatttatagatatgttatttttttgtgtttcgttttgatagaaataattgcgatggtggagttagtgaggtataaagtggttgttgcgagatttttgattagttagtagtaagaggtacgttggagtttatagtaggataattttttttagttttgatttttatttcgtttttggagtagttgttttttttttgataatgattttttataatttttaagtttaatgaatattaggaaatatatttttttaaaaataaatttttttttttttgataagtttttatgatagatatttagaaatttttttgaaaatattagttataatagtatatataaattaaatttaatatatatgttttttgggttttttatagtatttttttaaaattaatgtttttgtatttgggggaaaattgggtaatagtgaaatatttggttttatgttgattaggaaaaaggagattgtttttttgaatttgtttgttttttttttttttttttttaaaaaaaaaattattaaataagttttggtttttgtgtttagattgtgtttaaggattattaaaaattaggggtgagtatcgtattttttgatgtttaatgtttgatgttattatagaaatttatgttatggaatttttttattatgttggttttggaggtaagaatggggttatttttgtagtgaattgtgggaggttgaattttataatattattttttaatgtttaagttatagtatgaaagaattaaatatgagttattgatagaaaagttttattgtggaaggtagaatatgagagtggttgagggtttttaaagtgtatttagaatttttttatagtttttaaatgttttttttgttattttgttataagttatatatttttcgattttgagtttatattaaatttagttttatttatttttgtaaatataaattagagtttttaatattttaataggtttttggtttattaataataaaagttaaattttttattttggtttatgaggttttgttttattaattttaggttatagttttggttttaggttttgtttttttttttgttattttttaagttttagttatattggttttttttttattagttattttagagttttgtatttgttgatttttttgtttggtattttttttttagtttttattggtttttttttattttagtatttttttttagcgtttgtatttaaggggattttta

SEQ ID NO: 2042 - DNA, 2471 bp, Artificial Sequence
  chemically treated genomic DNA (Homo sapiens)
tgtaaatgaagttatttgttaaattaggggttaggcgtttagtttttatttatttgggttgtgtttttggttaatggttgaggtgattttttaggtatttatagtggagtatgtttttattttattgaatagttttgaaaattagagaagttgaggaaattatgttaaaattttttgagaaattttttttttgtatttggtaaaggtgaattagaatttgttatgtgagtgaggaggatattttttaatgaggtaagagttttataatttttatagttgtttagaaagtttttttgcgtgttttgagagagattgaaataaagggaagtcgaggatagtttggttttgttttttgaaattatttattaaagtaagattattttaatttaatatgagaagtatatgtgtaattgtgtgagtgtgtgtttgtgtgtgggggtatatattgaaagaaaataaataaggatgaaggaaagaggaaaatagaattgttttatggaatatattgtgtattttaattaatgttttttatatttttattattttgtttgtaattttatttattattaatgaaattgttaatttgggaataacgttttaggtgttaggcgttatatttaataagaatttaaagagtgaaaggataaatggagggttattagtgtttaagatggttttttgttggttgttttggtgaagaatagtaatataaagggtaagagaaggattaatggaaattattgaataaagtgaggttttcgagttatttttagattgttttgtgcgttgttgtatttgtatcgtagcgtggataatcgtggtaggttatcgttttagttttgttgcgagatagattttaatttattattttattttttagtatgagttagttaagggaaaaggatatttttagaattagagtgttttaagttttttgaaaggttattgttatttttttttttttttggtagtttttagtaaagtagaaatatttggaagttaattttgtttttttaatattgttgtgagttgattttatttgtttgagataaaattttttttttgatttagtagcgtttacggttgagttggttacgagatagaggattttgtgtttttaattatttttggatgaaaagttttgtaggcgagtggagattcggggtaaagacggttaggtggagtcgttattagcgagtagtggattgtagaaatggagagataattaaattaaaagtgttaggtgtaggtattgaaaaataattttgggtgttaattatgtagtttagtgttagtagaggaaatgttatcggtttgtttattacgtggtagttgaaaagtttgggaaagatatatttatggtttttagagaatttgttagggttgtttatttgggattttggtgaagtagagattatttattagttggagtgtgtatattttttttattttttatttagttaagttgggtatttggtgggtatttggtgtgtgggggattaattttgatttatatgaaaatttgaacgttggagtgtgttatttttaatttaggtatttaggagtattttttttttttttgatttgaaatgaatttgattttaggggttagaggtagtgtgtttttgttatgaagatggaaggataaatggtggcgtgtttagataatggaatagagtatagtaattaaaaggaggggattttagtagtataatagtagtatgattgtgttataagtatagttgaatgaatgaaagaagttagattttaagatttattttgtatgaatttattttggtgacgttttagaataggttaaattaagttatggaggtggatgttaggtttgtggttgtattagggaatttttggggtaatggggtaatttttttgggttgaagggtatatgaatgtaaatattttttaaaatttgttgaatgtacgtttaaaatttgtgtatatttttgtatggaaattattttttaatgaaaggaatgtgaaaagatttttttatgttttgtttttttatggattttgaattttggttagttagtttattttaaaaggtgataaggattaatttgtttgtggttttttttgattatttagtttttttttgtttatagatttgtttagaaaaggtttttattttaaggaagtagaatggaaaatagggtggtttattatagtttttgggttaaatttgtttaattatatttttgtaagtaaagttgtattgggatatagttatatggttagttatttatgtgttttttgtggttgtttttatgttatagtgatagtcgaggagtttttatagagattgatttattatttaaagtgtttattttttatttttttatagaaaaggttttttggtttttggtttaaatatttatttttttttggaatttttttttttagatttgtgtgggtggaggttttggatggagagtgttttttaggaacga

SEQ ID NO: 2043 - DNA, 2471 bp, Artificial Sequence
  chemically treated genomic DNA (Homo sapiens)
tcgtttttggagagtattttttatttaaaatttttatttatatagatttgaagggagaagttttaaaaagaaatgaatgtttagattaagggttaggaaattttttttgtaaagggatagagagtaaatattttaggtggtggattagtttttgtaaaagtttttcggttgttattgtggtatgaaagtagttatagaagatatataaatgattggttatgtggttgtgttttaatataattttatttataaaaatgtgattgagtagatttggtttaaaggttgtagtgggttattttgttttttattttgtttttttggaatgaaagttttttttgaataggtttgtgaataggaaaaggttgggtggttaggaaggattataaatagattaatttttattattttttgaaatgaattgattgattagggtttaaaatttatggaaggataaaatatgggaagatttttttatattttttttattgagggataatttttatgtaagaatatgtatagattttaagcgtgtatttaatagattttgaaaaatgtttatatttatgtgttttttagtttaagaaagttattttattattttaaaagttttttgatgtagttatagatttgatatttatttttatagtttagtttaatttgttttagaacgttattaaaataaatttatgtagaatgggttttgaggtttggttttttttatttatttaattgtgtttgtaatatagttatgttgttattatgttattggggttttttttttttgattattgtgttttattttattgtttgaatacgttattatttatttttttatttttatgatagggatatattatttttgatttttaaaattaaatttattttaaattagaaagagaagaaatatttttaagtgtttaaattggaagtgatatattttaacgtttaaatttttatgtggattaaagttaattttttatatattaagtatttattaaatgtttaatttggttgagtggaaaatgggggaaatgtatatattttaattaataaataatttttgttttattagaattttaagtaggtagttttggtaaattttttagaaattatgaatgtgttttttttaagttttttaattgttacgtgatggataggtcggtggtattttttttgttaatattgaattgtataattaatatttagggttattttttaatgtttgtatttggtatttttaatttaattatttttttatttttataatttattgttcgttggtgacggttttatttggtcgtttttgtttcgaatttttattcgtttgtaggattttttatttagaaataattaggaatatagggttttttgtttcgtggttaatttagtcgtgaacgttattggattaagagggaagttttattttagataaatggagttagtttatagtagtgttaaagggatagggttgatttttaagtgtttttgttttgttgggagttattaaaaaaaaaaaaaagtggtaatgattttttagaaaatttggaatattttggttttgggaatattttttttttttggttggtttatgttggggaatgaaataatgaattggaatttgtttcgtagtagggttagaacgatagtttgttacgattatttacgttacggtatagatatagtagcgtataaggtaatttggagatgattcggaagttttattttgtttaatagtttttattaattttttttttattttttatgttattgttttttattaggataattagtaggaagttattttgaatattgatagttttttatttgtttttttattttttgggtttttattgaatgtggcgtttagtatttaaaacgttatttttaagttggtagttttattaataataaataaaattataaataaaataataaaagtataggaagtattaattggggtatataatgtattttatgaaatagttttgttttttttttttttttatttttatttatttttttttagtgtgtatttttatatataaatatatatttatatagttgtatatatattttttatattgggttaggatgattttattttgataagtagttttaaagaataaagttaggttgttttcgatttttttttattttagttttttttaagatacgtaagagaattttttgagtagttgtgggaattgtggagtttttgttttattaaaaaatgttttttttatttatatggtaaattttagtttatttttattaagtgtaggagagaaattttttaggaaattttgatatggtttttttagtttttttgatttttaaggttgtttaataaagtagaaatatattttattatggatgtttgggaggttattttagttattggttagaggtatagtttaggtgagtgagggttgggcgtttggtttttggtttgatagatggttttatttgta

SEQ ID NO: 2044 - DNA, 2495 bp, Artificial Sequence
  chemically treated genomic DNA (Homo sapiens)
tttttttacgtttttttttttttttgtcgtatgttttatatttttagtgtgtgtaaatattagagtaaagttgtaggttgaaaattgtagttttaattttgtaagaattttttggtgtttcgaaagaggtagagggtatttagttttatttttttttagaggtcgtgttgttttaagtattagaggttttgtgttttgtggaggggagattatagatttcgattttaaaatggaagggtagaaataagattgtgagtcgggatttgggaggggacgtttaatttgaagtgagttatgtttgatgtttgaagttttttggggtttaagattaatgttgttgttatttttttttttgtttttttagggggtttttaggtaatggtgtgttggagttagtttgttttggtttttaagggttgattgttaaatttttaggaattttgtaaattgtttgttaaatatagttattattaaaaattaaattatagaaatttatagtgtaataaattatattaaaataaagttaataaatatttgaaatttattattttttatttttttttattattttttatgtttttgagggtttttttttaaatgtttgggtttttatatagtagatataagaaataatggttagttattgcgtatttttttttaattatatgtttagtgagattatattgtttatttgatattgattatgatgatagcgtttatattttagaaatcggtaaatgttatagatttgggtttttttttcgtaaatgttgattaggtatttataggtatacgttattttaaggtaattattgttaattagaggaaatagaaagaagtttattaagtttgtttttttgaatagttatggtagttttaggttaggtatgtagtatgtttgagggtaaggttgtgttttgtgggaaatttttattattgaaagggtttttagttataaggattttttttggtttgatagttagtttggaggagtttggggttattattttatataagttttttgttataattgtattttggtttattttgatatttggtgtttattttaagttgaggttttagggaagggtagttggaggttagcggcggtttttagtgatagatgggtagagcgtttgttttggtattatttagggtgtgggtagtagtggttcgagtaggtattattgatttgtaggtagggaaagtttgttaggttagttatgcgtttggtattaggaggagaggattagagttagtagtggttataatgagggtaaaatttttatagtggaatattgttatttaaaagggatgggtggttgtagggttttttggatggaagtataaatgagaaaatatatacgtttttgtaaatggatttgtttgggaagataaggttatagtatatatagttttttagtaatttaaattttatgtgttatgatgtagatatttataggataagtaagaataataaaatttttagttttgttttttagtataagataattgaagatatttgtggtgaaaagtatttttgttattaggaagatagataatagttagtaattaatgtttttttgttgtataagttaaaaagtttattaaatttattttttttttagtgtatatataagaatatatttggatatttttgtaaatttatatttaagaatagtgttttttaaatcggttatttgaaagaaatttaaaggaaaaagtagatatttttataatatgtttttgttttgttgtagtttgtaattgtgaatttttgtaaattgttataattttggatgaatgatgggaatataataggttgtagaattggagaacgttaaatttttgtttttaatggtaaaatatgttttttttatttttattagaatgtgtgatttatgttatttgaaattaaattttaaatataatgagttattagtgtaatagtttattattaatagcggttttataaataatatatttttattatatatatgtagttcgttgtgaagttagtaaaaggtattttaggttatcgaagttttgttgcgttagcgcggttgtagattagaaggatatttttatgtgaattaagatggatgttaattttttttgtcgagagttaggttggtcgtttttttttgtatatatggtagatggattggttaattagcgtttgttgagttttgggtttgaaattatagagaagttagataattgcggttatgtagtttttgtttacgagtgtaaataagataaataattatttgttatttgggaaaaaaattaaaatgtttattttggatttttattaaagtgttaatggttttataaaatagttgtgtaaatttaggtttttttagtaagtattattttagggggtttgtaaagaaaggaatatatatgaaaaaattaatttttaaaaattttttttatattttagtattgagaagaaaatagaggaggttttatttttattttgtaaatacgtt

SEQ ID NO: 2045 - DNA, 2495 bp, Artificial Sequence
  chemically treated genomic DNA (Homo sapiens)
aacgtgtttgtaaaataaaagtgagattttttttattttttttttaatattgaaatatgaggggaatttttaaaaattaatttttttatgtatatttttttttttataggttttttaaaatgatatttgttgaaaaagtttggatttatatagttgttttataaagttattgatattttaataaaagtttaaaataaatattttaattttttttttaaataataagtgattgtttgttttgtttgtattcgtgaataaaggttgtatagtcgtagttgtttagtttttttgtaattttaggtttaagatttagtagacgttgattaattaatttatttattatatgtgtagaaagagacggttagtttgattttcggtagggaaaattggtatttattttggtttatatggagatgtttttttaatttatagtcgcgttggcgtaataaaatttcgatggtttgaaatattttttgttggttttatagcgagttgtatgtgtatgataagaatgtattatttataagatcgttgttagtaatgagttattatattaatggtttattgtgtttggaatttgattttaaatggtatggattatatattttgatgaaaatgagaaaaatatgttttgttattaggaataaagatttaacgttttttaattttataatttgttatatttttattatttatttagggttgtaataatttataaaagtttataattatagattataatagagtaaggatatattgtggaagtgtttgtttttttttttgagttttttttaaataatcgatttgagaaatattatttttaaatatgaatttgtaggagtatttaaatgtatttttgtgtatgtattgaaaaaaaaatggatttaatggattttttaatttgtataatagaaaggtattgattgttggttgttatttatttttttggtgatagaagtattttttattataagtgtttttaattattttatattggagaataaaattgaaggttttgttgtttttgtttgttttgtaaatatttatattatgatatataaggtttagattgttagaaaattatgtgtattgtggttttgtttttttaaataggtttatttatagaaacgtgtgtatttttttatttatgtttttatttaaaaagttttatagttatttattttttttgggtgataatattttattgtgagggttttgtttttattgtgattattgttggttttgattttttttttttgatgttaagcgtatggttgatttggtaggttttttttgtttgtaggttagtggtgtttattcggattattgttgtttatattttggatgatgttaaagtagacgttttgtttatttgttattaggagtcgtcgttggtttttaattatttttttttaaaattttagtttggagtaaatattagatgttaaggtaagttagggtatagttatgataaggaatttgtatgaagtgatggttttaaatttttttaaattagttattaagttaaagaaagtttttgtaattaaaaatttttttagtagtaagggttttttatagggtatagttttgtttttaggtatgttgtatgtttggtttggaattgttatggttgtttagaaagataaatttgatggatttttttttgttttttttggttgatagtggttgttttaaagtaacgtgtgtttgtaaatgtttaattagtatttgcgggggaaaagtttagatttgtagtatttgtcgatttttgaggtgtaagcgttgttattatggttaatgttaagtgaatagtgtgattttattaaatatgtagttgggagggaatgcgtagtagttagttattattttttatatttattgtatagagatttagatatttaaaaaaaaatttttaagaatatggagaatagtaaaaaaaaatggaaggtgatgaattttaagtatttattaattttgttttaatataatttattatattgtaggtttttataatttaatttttaataatagttgtgtttaataagtagtttgtagagtttttgaggatttaataattagtttttgagagttagagtaagttggttttagtatattattgtttaaaagttttttagggaggtaggaaaaagggtagtaatagtattgattttgaattttaaaaggttttagatattagatatggtttattttagattagacgtttttttttagatttcggtttatagttttgtttttgtttttttattttaagatcgaggtttgtggttttttttttatagaatataaagtttttgatgtttgaggtagtacggtttttggaaggagatggggttggatgttttttgtttttttcgagatattaaaggatttttgtagggttggaattgtagtttttagtttatagttttgttttgatgtttatatatattgaaagtgtgaaatatacggtaagagagagaaagaacgtgggggaa

SEQ ID NO: 2046 - DNA, 2364 bp, Artificial Sequence
  chemically treated genomic DNA (Homo sapiens)
tatttggaaaataaatgttaaagagaagattataatggtttagaaggttggaaattgagtagttagtaagtgtgagagagggattatgagatataggatttagattgtgttttattatttatttattgggtgtttttagttaagttatttttttttgtattttttatatttttatttgtaaaaatgagttaggtattgtattttttaagtgtttttttagggttttttgaaattttattggttttttttttttggtttttgtgtttgtattttagtttttgtttttggtattgaggattttatttatgagaaggttttttaattagttaggttttgtttagttttagagtatttagaatgtttttgaaattatgattttaggttatttaatttgtatttagaaatgttttggtttatttgattttatttttttatttaatattgagagataatgtaatagagaagaaagattataggtttgataaatgatttttaatttagatttttgttagtattagtttaatttttttgaattatattattattatttaaaagtgtaataatgggttgggcgcggtggtttatgtttgtaattttagtattttgggaggttaaggaggaaggattacgaggttaagagattgagatcgttttggttaacgtggtgaaatttcgtttttattaaaaatataaaaattagttgggtatggtggcgtgtgttagtaattttagttatttgggaggttgaggtaggagaatcgtttgaatttaggaggcggaggttgtagtgagtagagattttattattgtattttagtttgggcgatagagtgagattttattttaaaaaaaaaaaagtgtaataatgataatagatttagtatatagagaattatttagaagaggaaagaaaaaattgaggtttaagaggtgaagttatttgtttaggtttaggtttatattcgaatttagattttttgtgttttattttagagttttttttttttttagagttaaggttagttgtgtttatatggatatggtagtaaagattggaattgaaagtatgttagtttttttaatattttcgttaatagtttttttaatttttttgtggtacgtgttaataatatagttcgtatttgttttagaaataagcgttttataagtatttttgtttgatttgttttggttggtataggatttagatgtttttagaatagtataatagattttttaaattagtttatttttatttcgagttatttatagttttgatttgttgttggttggggtttattttcgagttttttttatttattatgtgaattacgtttagatttttgttagtttgtttttttttttttgagtagaagtaatatttattgtgtgtatattgtgtgttaggtattgtgataggtattttaaatagattattttttttaatttttataatttattaagttattaatagttttaaaggggaaagttgaggtttagtgaagtgaatgaatttattgaagttatatatttagtttttgaaagagttagagtttgaattgagttttgattttattgattaagttgtaaggtaagttgttttttgagtattatattgtttttttgttttttggttacggtttttttaggagggtagagtgtttgggagtatttaagaataggcgtttggtgttttgagtgtaataggaatgttttttatgtttttagtgtatttttttgagagtttttgtattttgtgttttaaattaatttttttagaatttagatatagagtttagagatttaagtattgagttagaagttatgtttttatcgtgattatggaatagagtttttagtgaaaagtatatttgttttttttaaagttgaatagagagagtattttaagtaataatttttatttgtatgattaattttaaagtatagggaaggaaagggaaagggtttgtattttttaatcgtgataagttttttttagggatttggtaggagtggagatatgtatatataaaagattttaggattaagattgttttgataggtttttaaatttgtatttaatagtttgtaaagtagtttatttttaagaaatcgtattgtgaagaaattgaaggaatttgtttttatgtgatagagttaggggttagagtttaaatttttagttttgataatgttagtgaggttaagttttttttgagagggttttttttttggcgttgggcgtatttagtttttatttgtaaaaggagtaggtttttagtttttgttttttttttagtttttttttgtttttttgtttttttttttatttatttatatttaattgttagggatttattttaa

SEQ ID NO: 2047 - DNA, 2364 bp, Artificial Sequence
  chemically treated genomic DNA (Homo sapiens)
ttgaaataagtttttagtaattgagtatgaatgagtgaggagggggataagagggtagaggaaggttgagaaaaagatagagattaagggtttgttttttttgtaagtggagattgggtacgtttaacgttagagagaaaatttttttagggaagatttagttttattggtattattaagattaaagatttggattttagtttttggttttgttatataaaggtagatttttttagtttttttatagtacggttttttgaaggtaaattgttttgtaaattgttgagtatagatttgagaatttattagaataattttagttttaaaattttttgtgtgtgtatgtttttatttttgttaggtttttggaggagatttattacggttgaggagtatagattttttttttttttttttttgtattttggagttggttatataagtaggggttattgtttgaaatattttttttatttaattttgaaaaggataaatatattttttattagggattttgttttatgattacgatggaaatatagtttttaatttagtgtttggatttttgggttttatatttgagttttagagaagttggtttgaggtatagagtgtagaaatttttaggaaaatatattgaaggtatggaagatatttttattatatttagggtattaaacgtttatttttgggtatttttaaatattttatttttttggaagggtcgtggttagaggatagggaggtagtatgatatttaggaaatagtttattttatagtttagttaatggggttaggatttagtttaaattttagtttttttagagattagatatgtggttttagtaaatttatttattttattgagttttagtttttttttttggagttattaatagtttaatgagttataaagattaagggagataatttatttaaagtatttgttataatatttggtatatagtatgtatataataaatgttatttttatttaagagggaaaggataaattagtaaaagtttgaacgtgatttatatgataggtagggaagattcggggatgaattttagttagtagtagattagagttgtgagtggttcggaatgggaataggttgatttggagagtttgttgtgttattttaagagtatttggattttgtattagttaaagtaaattaaataggagtgtttatggagcgtttgtttttaaaataagtacgggttgtgttattgatacgtgttataggggaattgagagggttgttggcggagatgttaaaaaagttgatatgtttttagttttaatttttgttattatatttatatgggtataattgattttggttttagaggggaaaaaaattttggaatgagatataagagatttggattcgggtgtgaatttgaatttgaataggtgattttattttttgggttttagttttttttttttttttttaaataattttttgtgtgttgaatttattattattattgtatttttttttttttgagatggggttttattttgtcgtttaggttggagtgtagtggtgggatttttgtttattgtaattttcgttttttgggtttaagcgatttttttgttttagttttttaagtagttaggattattggtatacgttattatgtttaattaatttttgtatttttagtagagacggggttttattacgttggttaggacggttttaattttttgatttcgtgattttttttttttggttttttaaagtgttgggattataggtatgagttatcgcgtttagtttattattgtatttttaaatgatggtgatatggtttagaaagattaagttagtattggtaggaatttgaattgggggttatttgttaagtttgtagttttttttttttgttgtattattttttaatgttaaatgagggagtaggattaggtgaattaaggtatttttagatgtaaattgaatggtttgaaattatagttttaggagtattttaaatattttagggttagataaagtttggttggttaaaaagtttttttataaatgaaatttttagtattaaaggtaaaagttagagtataaatataagagttagaaaaaaggggttaatgaaattttagaaagttttgaagaggtatttggagaatataatgtttaatttatttttatagatggggatatggaggatgtaaagagaaatagtttgattgggaatatttaatgagtgggtgatagagtataatttgggttttatgttttatggttttttttttatatttgttagttatttagtttttaattttttaggttattatgattttttttttgatatttattttttaaatg

SEQ ID NO: 2048 - DNA, 2472 bp, Artificial Sequence
  chemically treated genomic DNA (Homo sapiens)
aggagtagaaaaataattattagttagatggaagaaattattagtttataaatgtagtgtgtttagtaataaaattttttaaaatgtggatgatataggtgtaatagaatataaagaggtttttagtggaaagtttgggaagttttgtagagatgtagtggattttgaaggttaagaatatggagttagataaaattaaattttaatttttattttgtgattttgggtaagtaatttaattttttttggatttagattttttatttgtaaagtggagagaatgatgtagggaagggaggggagtgggttatcgtgtagatttatggaaataaaggatagatagtggatacggttagtttggttgttattattatttgttagtagttttagttataataagttagaggtaagattaatatttttttttttttttttttaatttttttgttttttatattgttataattatttttattttttttatttttgtttatttaatggcggttttttattagttagttatataaaagtatttttattgtagttatttatattttagtatgaatgagttagtatttttttgtagtaatttttattggaagttagtgggaagtgaaaggttttggttattttttataatatatgatttaaagtttgtttgtaatagagagtttttgtagagtttttaaaagaaaaggatttgttttttgaagaatttttgagattatagattttatggtgtttagttttttttggttgttatgtgttatttttaaagatagttatgaatatttgttttggttgatttgagttatttgaatgtttaaaatttattttaataataaaagttttttggagggattttaattaatttttttaaattgttttttttaaatttttggaattaatataatttgtttttttgttattaaaaaaaaaaaataaaattttaggatatttcgtaaaattttttttaagttatttggtagttaatattttgttaaggaggtatggtggttaatttttttttgaatgggattggtttttatatagttatttttttcggtttatgatttttttttttatttgttgtttacggacgtcgaaaataatttgttttttggtaagtttgggatgagattttttatgatttaattagatttataatgaagtttttttagtttttaggagaaaatattttgaattgtagggttggttaagggtagggttttggtgaagaggaggagttttttgtttgagtagtatatttggagttaggagagttgtaatagggttatgttatttatttagtggggtgtttttattgtggttgagatttttggtagtgttttaaggtgtgtattatgtaagttgtgtttttttattttttgtagtttagattaaaggttttaaagataataggtaggatatcgtatttgtaaatattagttgtttggtttaggaagagatagttttttatatatatatatatatatatatatatatatatatatatagagagagagagagagagagagagagagagagagagagaaggaggaggagagagattaggatagatttgttttggttgaaattaggatttttttgatggttttaaattgatgttaaattagaggataattttagatatgataataagttgggggtggtaaagtaggtgggtaattagggagtatttgagtaggtgatagagaattggataatgaagaagtaggtaaggtgatgggaagtagttggggtaagagggagtagttaggtaataaggtaaagtagttggagaatgggagagtaatttgatgatgaaggttaggtataaagtgggagttattgtagtggggtaatagaagatagttttagatttggggtagaggttattttgatttgttttagttgtttttattttgttatttttttaggttttgttgttgagaagtaaatttagtttaagtttgtattagttagttggaatttgggttgttgtaaattgttgtggtgaagttttttgggagtgaggttgaggttgtagtagtagtaggtaggtgtggtgagtttatttttttgagggaggggttttttttttttttagttttttaaaggatgggtgaggttgtttgttagaggttttggtataatttatatttgagtttttaatttttttattattatttttattttttttttaattagatttttattggataatttaagtattaggtattgtgttaaaaatttttttatgtattaatttattgtatttttttaataattttataaaataggaatcgttagtaattttattttataggtggataaattgaggtttaaaaagtttaataatttgtttatataagaggcgtagttaggattgtttgattttagaatttgttttttaagttttatgttatagttatggttatttttatatggagtattttttttttaaaagtt

SEQ ID NO: 2049 - DNA, 2472 bp, Artificial Sequence
  chemically treated genomic DNA (Homo sapiens)
agtttttgaaggagaaatgttttatgtagaagtaattatgattgtggtataaggtttagaggatagattttgaagttagatagttttggttacgttttttatgtgggtaagttgttagattttttaagttttagtttatttatttgtaagatggggttattaacggtttttattttatagagttgttgagaggatgtaatgagttgatgtatagaaagatttttagtataatgtttggtgtttaagttatttaataaaaatttggttgagagaaggatgaaggtgatgatggggaaattgggggtttagatgtgagttgtgttaggatttttggtaggtaattttatttattttttgaggggttgagagaagagagagttttttttttaaggaaataaatttattatatttatttgttattgttataattttagttttatttttagggagttttattataatagtttataatagtttagattttagttaattggtatagatttaggttgagtttattttttagtagtaagatttaaggaagtggtaaaatgaaggtaattggaataggttagggtagtttttattttaggtttggggttgttttttgttgttttattgtagtaatttttattttgtgtttggtttttattattaagttatttttttattttttagttattttgttttattgtttggttatttttttttgttttagttattttttattattttatttgtttttttattatttaattttttgttatttatttagatgttttttgattatttatttattttgttatttttagtttgttattatatttggagttattttttaatttaatattagtttggaattattaagggaattttggttttagttagggtaagtttgttttggtttttttttttttttttttttttttttttttttttttttttttttttttttttttatatatatatatatatatatatatatatatatatatgtaggaaattgtttttttttggattaagtagttggtatttatagatgcgatgttttgtttattatttttgaggtttttagtttgggttgtagggagtgggaaggtatagtttatatggtatatattttggagtattgttaggagttttagttataatgggggtattttattgggtgggtggtatggttttgttgtagtttttttggttttaaatgtgttgtttaggtagggggttttttttttttattagggttttgtttttaattagttttgtagtttaggatgtttttttttgaaagttgggagagttttattatggatttgattaaattataaggaattttattttaagtttgttagaaaataagttattttcggcgttcgtgggtagtaaatggagaagaaagttatgagtcggaaggaatgattatatagaaattaattttatttaggggaaggttggttattatgtttttttgataaaatgttagttgttaagtaatttgggggaagttttgcgaagtattttagggttttgttttttttttttaataataagggaatagattgtattaattttaaaagtttagagaaagtaatttaaagaagttaattagggtttttttaaagagtttttgttattaagatgggttttagatatttaaatggtttaagttaattaaaatagatatttatggttgtttttagagatgatatatggtaattaggaaaagttgggtattatgaggtttatggttttagaagttttttagggggtaggttttttttttttagagattttgtaagggttttttattgtaagtaggttttaagttatatattatgaggggtggttaaagttttttattttttattggtttttaatgaaaattgttgtaaaaaagtgttgatttatttatattaaagtgtaaatgattgtaataagaatatttttatgtgattgattgatagaaggtcgttattgagtaaatagagatagagaaaatgggagtagttatggtaatgtggggagtagaagaattagaaagaaaaaggaagagatgttaattttgtttttggtttattgtaattgaggttattggtagatgatagtaatagttaaattgatcgtgtttattgtttattttttatttttatgaatttgtacggtgatttattttttttttttttttgtattattttttttattttatagatgaggaatttgagtttaaaagaggttaagttatttgtttaaggttataaaatagagattaaaatttagttttgtttgattttatatttttaatttttaaggtttattgtatttttgtagagttttttaagttttttattgaaggtttttttatattttattgtatttatgttatttatattttgaaagattttattattgagtatattgtatttgtgaattaataattttttttatttggttgatgattatttttttattttt

SEQ ID NO: 2050 - DNA, 2397 bp, Artificial Sequence
  chemically treated genomic DNA (Homo sapiens)
tatttatttatttatttatttatttatttaaattttgtagagtgttttttttttggcggggtgggtgttaaatattggtaagttattagatgattttaaagtttatgttttttatttggaaaacggaaattataaatttaaaggaatgatgttatatagattgaatgagatttacgtgtgaaaaggttagtaaataagagtcggaacgtaagtttattggtagggtagaaatatttttgattttgttttacgtttttggtattggtattgtcgttggtatatgttagatagtgttattttagtgaataaaataataaatttagtttcgtgttgtagatagggaaatagaggtttagagaaaatggtttgggcggggggggggggggtggggtggtttggtagttttatttagggttttatttattttttttttattttgaagttatgtatttgaaaagattgggaagattttttattttattagtggtttatgtgtttgatatgtttttttaagagatgatgatggtttttgtgggagttatagttgtttttagtgtagttataagtaagagggaagagggtaaagattttggaaaaagtaggataaagttttgtaaatatggatattatgcgtgtattggttgggggggtttttttttcgagggtttttttttggttagtagaatgtttagaagaggggtttgggtgggtataggtaaataatttattttttaaaagttaaattttttagttgtagatagtattaattttgagttatttttagatatggaaaaatattgaggttttgagagttaatagatttggggttttaatttttggtttttatttttgagttatttgattttgagtaagtgatgaatgaaaatattttgatttcgaggattttattagaaaatggggatgagaatatttatatgtaaaatgggatagtgtaagtttagggttcgatatggtgtttaatatttagtgaatgttagtttttttttttttttttttgtttttgtgataaacgttttattaggttagtacgtttgataaagttttatttgaaaatatgttcgagattcgtgtttttgtcgggttttagggattagtcggtaatttattttatggataatattattttttattaggggaaatattaaaaattaatttagaggattttatatttttttgttaggagtaaagttgttatggttattagataatgtattgattgggttggaatatagataaggacgatttttttttgtttttaatattagaaaggtaaaggttttagtgatggtttataggagaaatgttttgtggataaagagaatataattagtattagagtttggtagaaggtatttgattttaggtagtatttaatttattaagtagaggttaggagtttatttgatttttgtttggatgaggaaggtagggagggggtgttgggagaagtgggagataaagttaggaggaaattggaagtatgggcgtatttttaggttttattttttattatatttatatatataatgtatatttatatgtatatatatatatatatgcgtttattgattttagaaggttttaagttataagttaatgttaaaggttttttttttatttttagttatttgttatgattaagttaagattttttgattttgaatttagagttagggtttttatagaggatatgggtattttgtggatagaggttagggtaggtttttagagagttgggataggtattgattttttattattatttttttgtttttaatatttagatttttgggagaaattttaagaggattagaggttagagaagttgttggttttgattttaggagaaagtattttatgtttttgtttattttgagtgagataggagggttatatgggttagatggatgtgaatttagatgggttggggaggggaagttggaagggtttattatattaggtaatggtgtttttggttttgagttttaggaggtgagatgtttgttttttattggatttattaaattgtagggaggtttaagaaatgaattttagagtgtgatttaggagttttgtgtgtgggttgtgttattagttttttgggtgattttgagtaagtttttttttttgtttggtttttgttttttttgttgaaaagtgtatggttggtagtagatggtttatagtttttttttattgtaaatatttgtatattttggaggggaagtgatgataattagaagtattcgaaaaacgtaggggagaagtttaggttcgttggattaggaatatgattttaattttaaattagggtagggtgaagtttttttttggatttgatgataagaaagtggggggtagtggtttttataggat

SEQ ID NO: 2051 - DNA, 2397 bp, Artificial Sequence
  chemically treated genomic DNA (Homo sapiens)
gttttgtgagggttattgttttttatttttttgttattaggtttaggaaggggttttattttattttggtttgggattagggttatgtttttggtttagcgagtttaagttttttttttgcgtttttcggatatttttgattattattattttttttttaaggtgtataggtgtttgtagtaggaaggaattatggattatttattattagttatgtattttttagtagagaaaatagaggttagatagagaaagagatttgtttaaggttatttagggagttagtggtatagtttatatatagagtttttgggttatattttggaatttattttttgagtttttttgtaatttggtggatttaataagaggtaaatattttattttttgaggtttaaaattaagaatattattgtttgatataatgagtttttttagttttttttttttagtttatttgagtttatatttatttagtttatgtggtttttttattttatttagaatagatagaaatatgggatgtttttttttggggttaaggttaataatttttttgatttttaatttttttgaagttttttttaagggtttgggtgttagaggtaggagggtgatgatggaaggttaatgtttattttagttttttaggggtttgttttggtttttgtttatagagtgtttatattttttgtaaaaattttagttttgggtttagaattagggagttttggtttggttatagtaagtagttagaggtggagagaagatttttggtattagtttatagtttagagttttttaaagttaatgagcgtatgtatgtgtatgtgtgtatgtaggtgtgtattatgtgtgtgagtgtgatgagaaatggagtttaggggtgcgtttatatttttaatttttttttagttttgttttttattttttttaatattttttttttgttttttttatttaggtaaagattaaataagtttttggtttttatttaataggttagatattgtttggagttaaatgttttttgttaagttttgatgttgattgtattttttttgtttatagggtattttttttgtgagttattattggggtttttgtttttttgatattaaaaataaaaaaaagtcgtttttatttgtattttagtttagttagtgtattatttggtaattatagtagttttgtttttagtagaaaaatatgaagttttttgggttaatttttaatgttttttttggtaaaggatgatgttatttatgaaatggattgtcggttgatttttgaaattcggtaggagtacggatttcgaatatatttttagataaggttttgttaggcgtgttggtttaatagagcgtttattatagagatagggaaaaagaaaagaaaattaatatttattgagtgttgggtattatgtcgggttttggatttgtattgttttattttgtatgtgggtatttttatttttattttttgatgaggttttcggggttagagtatttttatttattatttgtttaaggttaagtagtttagaaatgggagttaaggattggagttttaagtttgttaatttttaaagttttaatgtttttttatgtttggaaatggtttaaagttgatgttgtttatagttagagagtttggtttttggaaaataaattatttgtttatgtttatttagattttttttttgaatattttattggttaggaaaaggttttcggaagaagggtttttttagttaatgtacgtatgatatttatgtttgtaaggttttgttttgttttttttagggtttttgttttttttttttttgtttgtaattgtattgaaaatagttgtaatttttatagaaattattattattttttgagaaaatatattaagtatatgagttattgatgaagtggagaatttttttaatttttttaaatatatgattttagggtggggagaaaataaatagggttttggatgaagttgttagattattttatttttttttttttcgtttaggttattttttttgggtttttgtttttttatttgtaatacgggattgaatttattgttttatttattggagtggtattgtttagtatgtgttagcgataatattagtgttaaggacgtaaaataaagttaggggtgtttttgttttgttagtaggtttacgtttcggtttttgtttgttggtttttttatacgtaaattttatttaatttgtgtgatattatttttttggatttatgattttcgttttttaggtgaagaatatgagttttggaattatttaataatttgttagtatttagtatttatttcgttaaaaaaaaagtattttataaagtttgaatgaatggatgaatggatgaatgaata

SEQ ID NO: 2052 - DNA, 2466 bp, Artificial Sequence
  chemically treated genomic DNA (Homo sapiens)
tttagatgttagtagttttttttatttttaggtatgttaataaaaatgtttttagatattgtaaaatggttttttttttgggtaggtagaattgtttttattattggtatagttaggtaaatgtaatagtttaatatttagtagatattattatgtgtttagtattttaaatatagtttcgatttttataatattaataaggtagtgattattttttttgttttataggtgaggaatttagggtttagaaaggttaattttaaattcgtaaaataggtaaagggaataggtgggatttgagtttagttttttagtttgttgagagtatgtttttttttttatttaatttggttgtttttttttaatagtaaatgatcggttaaagtttcgtaaatgtttaataatagggaattggtttagtaaattatagtgtattttttggatggaatattatgtagttattaaaatgatggagggttattaaaaatgaaaattatgtaacgatatggaaaaatgttaattggattatattaagttaaaaaaattagaaaataaaaatgtgtttatattgtgattataacgatgaagaagtatatttatgtgcggatggtttatgtgttggattgaggatattaaggataattttttttttttttttgatatttattattgttattagagtgtttttatgattttaatttttaagtagtagtagagtaatgataagatttaagatgttaggtttgttttaggttttttttttatttgaattagaatgaagatttttttaaattttgattatagtaaggggttgatttatttttatttttttttttattagtattgttgtatgtatgtttgtgattttaggtttttttttttgtattgattagttttttttaagtatagaaagttggaagtatagaagaaaataattttgaaggtattggtgtgaattattttgggagttagggttattaggaatatatagttttagagtagtagatggtatttgtttgttatagggtattgagcggtgtattgttttatgtattatgtattaagagtggtttagtattttggttcggttgtgtgggataagttttgtaaaagaaatatttgatgaattgatcgggatgttaaaatgttattaaggataaattaatggatgtgttattttggttgtaagaggtagtgttagtaagataatagatagtcggtgggttgttttttagtttaagatagacggcgtttgtaatggagatttatggtttttatgtaacgtgaggtgttttgtagggagaagaataaatagaaatgttttagtatttaagcgttataaaattataagtatgagattaattaattagtgtatattaggaaggcggttggtttgtttgcgtttttggggaaagttagaatggatggtattgggttagagatgacgggtttttgtattagttttttaaagaaaagtaattgaatttaatgtgtaattataaattgtcgttgatggaaagataagtttggtcggtgtttgtttttttagggatattatttttgtttattgttttaaatattttgtgtttgtgggttaagtatttgagaggattggggagatttggaaattagttttgtttataacgttatgtgggttatgaagggtgttataattttaatatatagagtaatttttagggaagtttgattttttttgcgtttttttagatagggggttgtttatttttttgtgataggaggtttattattttttttttaatttgatttagtgttagataagtattgttagagagtttttttttagatttttttagtttttttttttttataatttaataataataaagataagaaggagaatagttaatgtttattgagtgtttgttgggtgttaggtattgggttttggttaagttataatgttattatgtattatttttattttgtagtgtaggaaaaagaagattagagggtgtgaaagatatgttgaagatcgtatagttagtatatggtagggttaagatttaaattcggggttgtttgaggttagggtttgatagtttaattattatatggttttaagttttgtaattattattaattggatggagtttggtttttagagtaatatagaatatgataaggtaagatagatgagaatttatatgtagtatatattgggtattgttaagtatttggtttgggttagtttaatatatcgtttatgtagtagttttttttgagtaacgaaattatttttttatttgagatatttatttttttatttttttaaaaaagttatatatatatatattttttaatatataaaaatcggttttatttttgtgtatttataatgaataattagaatttgaatttttataaatagtataatttatagtagtatttaaaaaagaaatatttagatataaatttattaaaata

SEQ ID NO: 2053 - DNA, 2466 bp, Artificial Sequence
  chemically treated genomic DNA (Homo sapiens)
tattttggtggatttatatttgaatgttttttttttgggtgttattgtaaattgtattatttatgaaaatttagattttaattgtttattataaatatatagaagtgaaatcgatttttatatgttgaaaaatatatatatatataatttttttaaaaagataagaaaatagatattttagatggggaaataatttcgttatttaaaaaaggttattgtatgaacgatgtgttaggttgatttaggttaggtgtttagtagtgtttaatatgtgttatatgtgagtttttatttgttttgttttgttatattttgtattgttttaaaagttaggttttatttaattaatggtagttataggatttagaattatgtgatagttaagttgttaagttttggttttaggtagtttcgggtttggattttggttttattatatattagttgtgcgatttttagtatgttttttatattttttggtttttttttttttatattgtaaaatggagataatatatgataatattgtaatttgattagagtttagtgtttggtatttagtaagtatttagtaagtattagttatttttttttttgtttttgttgttgttaagttataaggaggaagaggttagggaagtttaaggaagaattttttaataatgtttatttaatattgggttaggttgaaagggaagtggtgagttttttattatagaagaatggataattttttatttagaaaggcgtagggggagttaggtttttttgagagttgttttatgtgttgagattataatattttttatagtttatatggcgttataagtagaattagtttttaggtttttttagtttttttagatatttgatttatagatataaagtgtttgaagtagtaggtagaaatagtatttttgaaaaaataaatatcgattagatttatttttttattagcggtagtttatgattgtatattaaatttaattgtttttttttaggaggttggtgtagggattcgttatttttaatttagtgttatttattttagttttttttaggagcgtagatagattagtcgtttttttagtgtatattaattaattaattttatgtttgtgattttatggcgtttaagtgttggagtatttttgtttatttttttttttgtaaagtattttacgttgtataaagattatgaatttttattgtaaacgtcgtttgttttgggttggagaatagtttatcggttgtttgttgttttgttggtattgttttttatagttaaagtaatatatttattaatttatttttaatgatattttgatatttcgattagtttattagatgttttttttgtaagatttgttttatatagtcgggttagggtgttaggttatttttgatgtataatgtatgagatagtgtatcgtttagtattttgtgatagatagatgttatttgttattttaagattgtatgtttttaatagttttggtttttagagtgatttatattaatgtttttagagttgtttttttttatgtttttagttttttgtgtttgggagaagttggttagtgtaaggagaggggtttggggttataaatatatatgtaatagtgttaataggagggaaagtaagggtaaattaattttttgttatagttagagtttagagaagtttttattttaatttaggtggaagaagggtttagggtaaatttaatattttgaattttattattattttgttattatttagaaattaggattatgaagatattttgataataataatggatattaaagaagaaaggaaaattatttttaatatttttaatttaatatatgagttattcgtatatagatatatttttttatcgttgtaattataatgtagatatatttttattttttagtttttttaatttaatgtaatttagttagtatttttttatgtcgttatatggtttttatttttaatggttttttattattttaatggttgtataatattttatttaggggatgtattataatttattgaattagttttttattgttagatatttacgaggttttaatcgattatttgttattaaagaaaggtagttaagttgggtgaggaggagagtatgtttttagtaggttgaagagttaggtttaaattttatttgttttttttatttgttttacgagtttaggattaatttttttgggttttgaattttttatttataaaataaaagaaataattattattttgttagtgttgtgaaaatcggagttatgtttaaaatattaagtatatggtagtatttgttaaatgttaaattgttatatttatttaattatgttagtagtaggggtaattttgtttatttaaaaagaaaattattttgtaatgtttagagatatttttattgatatgtttgggagtagggggaattattggtatttaga

SEQ ID NO: 2054 - DNA, 2496 bp, Artificial Sequence
  chemically treated genomic DNA (Homo sapiens)
taattattatggaattttagaattattggaggagtaggattttttaaaatttatttttgtgatcgttattggatgttaaaatttttcgtatatttttatttagtggttatttagtttttgatagtttttaggtttgaaattttattttgaaatattaagaagggaagttgtgtttattatttagatatttatttttattttatttttttgaagaaattttttttgtttgtttttttagttattttttaatattttgtttgattttgtttttttaatagatgtgttaggtgttgatttaggtatggaggttttgattgtgatgttatgtagtttatttattgttatttagattgagttggcgagtttatttatttaatttgttaaaattagatttggtggaaagtgaggattttaatatttttatatttgttgataattttaaatttttatcgaagagtgggaagttgttgtttggaattatattaagattaataatgataatagagataatgataattgtaaatatagtaatttttttatttataatggtagtttcgattgtataaagaatttagtattaggaagggatatattttaagttattttggaattgttttttaatttgtgggataaagatagattaaatattattttgtattttttaaattttgaataaataggtaaatagtttttttgttaagtaggagaaaatattgggaggagacgagtttaggttttttaatatgtttttattttattggttagtaggtttatggtttagagagaggttgaagttggagatagggattttagaattatttgtagagttttttggttgaggttttgggaattaatgaaattgtagtattagagagtatcggaggagaagggaagtggggagttgttttagagaataagttagaatagaaatagttaagatagttaaagtaggagtattcggagattaacgtgaagggaaagaagtgagagatatgtggaagaggtggtaatttttgttaaaggggattaagaataaggagttttaagaattttttgtagggttgttggttggagacgttgtttttatgtaaattttatttgtcgttgttaatttagattttgttttattacgattatttttgagaaatagatttaagatatgaaaaaaaattttttttttgtaaaattggttcgtgaaatagattataggtattaatattttttatgagtgataatttagggttaatatttatattttgtaatgttcgttttttttttttcgggatagaaaagaatgttgttaatattaatgaataaatattaataaaattaaatataattttgttttatttggaattaatttttaaaaaaatttttaatatttgtatataatatatatatatttttatgtataatagggaaattagattttgtttgagagatgtgtatagtatttaatgttaatttatttggttttattttttttttagattgttttagaagggtagcgtttttagaattgagattttgaattagttttttttgatttttaggtatagaatgtttagtttaagttaagatatattaaatatttatttatttttagatttttaaaaatttagttttttgtttttttttgtagttgattttttttggtagaaatttagttttaaattgggagaaatgagtggattattagaattaaagttgacgttagtggtattgtgggttggtgtatgacgtgggaattttgataaatagaaatgaatgtttataaatgttagattttaggtttgtaaggaaagattttgttgtattttataaatggatttgttttttaatatgttttttgttttaggataagtaatgttggttagaattttgggggtgaatttaggggttcgtattatttggggttgcgttgttatttttgtttttagtatcgtagaggttaaattgtatttagatgagattttagggaaagagaaaagaattttgggtacgggggttattatttaaagaatttggtgtagtgcgtgggagatattgtatgtatttttaatttagatatattattaatttatattattttttttgtgtttattaaattaggattttttagttttattattattgatattttgggttagaaaattttttttttgtggaattgtttagtgtattgtaggatgtttagaagtatttttggtttttatttagaagatgttagtagtattgtttcggttgtgataagtagaaatgggtttagatacggttaaatgttttttggtgagagggtagtaaaatggtttttggttaagaattattgtagtgaattatttaagggattatgagtgaagttttgaataatttatatttgagttaagtggtgttagagagatatttgtaggattttagttttgttagtttgatattttttttataagtttatcgattggagattttaagtatgttgtagtttttatttaatagatt

SEQ ID NO: 2055 - DNA, 2496 bp, Artificial Sequence
  chemically treated genomic DNA (Homo sapiens)
gatttgttaggtaggggttgtagtatgtttggggtttttagtcggtgggtttataggagagatgttagattaataaagttgaggttttgtaagtatttttttggtattatttagtttaggtgtggattatttaaaattttatttatggttttttgaataatttattgtagtagtttttaattaggggttattttgttatttttttattagaggatatttgatcgtatttggatttatttttgtttgttataatcgggatagtattattggtattttttgggtagaggttagggatgtttttaaatattttatagtgtattgagtagttttataagaaaagaattttttggtttaaaatgttaatggtggtgaggttgagaaattttggtttagtaggtataagagggatggtgtgaattaatgatatgtttgagttagaggtgtatgtagtattttttacgtattatattaggttttttgaataatgattttcgtgtttaagatttttttttttttttttggggttttatttgggtatagtttggtttttgcgatgttgaggataggagtgataacgtagttttaagtggtacgagtttttaggtttatttttagagttttgattaatattatttgttttgaaataggagatatattaaaaagtaagtttatttgtgaagtatagtaagatttttttttgtagatttgagatttaatatttataaatatttatttttgtttgttagggtttttacgttatatattaatttatagtattattgacgttagttttgattttggtgatttatttattttttttagtttgaggttgaatttttgttagaggaggttagttgtaggaggagatagaaagttggatttttgaaaatttgggagtggataaatatttgatatgttttggtttgagttggatattttgtatttgagagttagaggaaattaatttagaattttaattttagggacgttatttttttaaagtagtttggagaaaaggtggaattaaataaattggtattaaatattgtgtatattttttaggtaaaatttgatttttttattgtatatagaggtgtatgtatattatatatagatgttaagaatttttttaaaggttgattttagatggaataagattatatttgattttattaatgtttatttattgatattggtaatatttttttttgtttcgagagaaagagaacgaatattataaagtgtaaatattggttttaaattgttatttataaaggatattaatgtttgtagtttgttttacgaattaattttatagaaagagggtttttttttatgttttgagtttgttttttagaaatggtcgtggtgggataggatttggattgatagcggtaaatgagatttgtatggaggtagcgtttttaattaatagttttgtagaaagtttttagaattttttgtttttaattttttttggtaggagttgttattttttttatatgttttttatttttttttttttacgttggttttcggatatttttgttttggttgttttgattgtttttattttagtttgttttttaggatagttttttattttttttttttttcggtattttttggtattgtaattttattaatttttaaggttttaattaagagattttatagataattttgaaatttttgtttttagttttaatttttttttgaattatagatttgttggttaatgagatggaaatatattgagaagtttaaattcgtttttttttaatatttttttttatttaataaaggggttatttatttatttatttaaggtttaaaaaatgtaaagtggtgtttgatttatttttattttatagattaggaaatagttttaagatagtttaaaatgtgtttttttttggtattggattttttgtgtaatcgggattgttattgtgagtgggagagttgttatatttgtagttgttattatttttattgttattattaattttaatgtgattttaagtaataattttttatttttcgatgagagtttaaggttgttagtaaatgtggaaatattgaggtttttattttttattaaatttggttttaatagattagataaatgagttcgttagtttagtttaaatggtaataagtaagttatatgatattatagttagaatttttatgtttgggttagtatttaatatatttattaagaaggtaaagttagataaggtattagagagtgattgagagggtagatagggaaggtttttttagggaggtgaaataggagtgggtgtttgagtggtgaatatagtttttttttttaatattttagagtagagttttaagtttggaggttattagaggttgggtgattattagatgaagatgtgcggaggattttggtatttaatagcgattatagagatgggttttgggggattttgtttttttagtgattttgagattttatgatgatta

SEQ ID NO: 2056 - DNA, 2474 bp, Artificial Sequence
  chemically treated genomic DNA (Homo sapiens)
tttggaattggatgttattaatataaagagaaaaatgtaaaatggtaagtagtaagtatattttagagtgataatgaaataagggtttttatttttgtagtattggttagtttgtttttatttttattttttttaattttttttttatagggatttttttaaattttaaatttgattaagtttgttttatttggatttattttaggttttttgttgttttgagaatagaatttaatttttaatttggtttttaggttttttttggattagatttttttatttgtttggttttttttttgttttgtatttaatagttttgtataattttttaatttttttagtttggttaagttaatttatattttagggtttttgtataggttaaatttttagttaagaatgttttttgtttttttagatttttattttgttatttattaatttaatttatttgtttgtttagaaaggtttttatttattttttttagttttttgtaaataggattaatttggttttttatagagtataagtttttattttattgtattgtaatttttaaatatatttatatgtttgtgggttattttatttttttttgaattttttgataataaggattggaatttaattatgtttttttagtttcgagtatggtgtcgggtataaagtaggtatatagtgagtgttttttggtttattgattgattgattgattaaatttattttttttaaattttttaatgtgagaatatattttttttaaagtttttagttattataaatgatagataagatgtttttttgaatttttaaacgtttattttaaagtttttagttttgtttattagtttatgttattaatcggatgagttttagtaaggtttttgttaaagtatttttttttttgttgatttattttaaaatgtaatttagtggttttaagttagaagaagaagaggttacgtttttagtttttttttaagtatttattattagttagttgagaagatgtgattgttatttttttaattcgataagatgattttttttaattataatataagtttagtgagttatataattatggtgaattttttattagtttaatattttatgtaattttttagagaatatgattttatttgaaaatatatgtaatagtttggaatttatttttttttagtgtttaatttttagatttttataaatattagatggttttttaggtagtgatatacgttggaattatcgaataagtatcgtttatgattttgttttgggtagtgttaaaaggtattgagaatttatttattttattacggcgttgttaatagggttttaggtagtttgttgggtttggaggtgtgttaaattgtagtgttatgaatgttttaaacgagagatagagaaagagaaagagaaggaatatgtgaatgtgtgtttgtagttgagggaaataataagagtaaagggaattaaatttttttaataaaggaaaatagtttttaaataaagaaaaagaagtttaatggttagttattgttgtataataaaatttttttaaaattgagtagtttaaaatagtatatatttattattttatattttttgtgggttaggaatttaggtagagtttagttgggttttttttgttagtattttataaggttgtaattaagatgtaggttagggtgtggttttatttgaaggtattattggggaataatatgtttttaagtttatttttagggttgttggtaggatttagttttttaggggttgttggatagagatattagttttgaattattgattagaggtattttttagttttttgttttgtgagtgtcgttatagagtgttttataatatattagtttgttttattagtaagtaaatgagagggtaagagaaagtattagtaaagagagaatgttagtaagatgaaagttatagttaagtatggtggtttatatttgtaattttagtattttgggagattaaggtaagtggattatttgaggttaggagtttaagattagtttggttaatatggtggaattacgtttttattaaaaatataaaaaaagaaaaaaaaatttgggtatagtggcggtgtttgtaattttagttatttaggaggttgaggtaagagaattatttgaatttaggaggtggaggttgtagtgagttaagattgtattattgtattttagtttgggtaatagagtaagattttattttaaaaaaaaaaaaaaaagttataattttttgtaatttaattttggaagggcgttttattgtttttgttataatttttttttttttttttttttttttttttttgtttaagttggagtgtagtggtatgattatagtttattgtaattttatatttttgggtataagtaatttttttattttagttttttgagaagttgggattataggtacgtattagtatattcggtta

SEQ ID NO: 2057 - DNA, 2474 bp, Artificial Sequence
  chemically treated genomic DNA (Homo sapiens)
tagtcgggtgtgttggtgcgtgtttgtagttttagttttttaggaggttaaggtaggaggattgtttgtgtttaggaatatgaggttatagtgagttatgattatgttattgtattttagtttgggtaaaaaaaaaaaaaaaaaaaaaaaaaaaaaaattatggtaaaagtaatgagacgtttttttaagattaggttgtaaaaggttgtggtttttttttttttttttgagatgaagttttgttttgttgtttaggttggagtgtagtggtgtaattttggtttattgtaatttttattttttgggtttaagtgatttttttgttttagttttttgaatagttgggattataggtatcgttattatgtttagatttttttttttttttttatatttttaatagagacgtggttttattatgttggttaggttggttttaaatttttaattttaggtgatttatttgttttggttttttaaagtgttgggattatagatgtgagttattatgtttggttatggtttttattttgttagtattttttttttgttggtgtttttttttatttttttatttatttgttgatgaagtaagttggtgtgttgtgagatattttatagcgatatttataaggtaagggattgaaggatgtttttggttaatagtttagagttaatatttttgtttaataatttttgagaaattgagttttgttaataattttgagagtgagtttagaagtatattattttttagtgatgtttttagatgggattatattttggtttatattttgattatagttttgtgagatgttgatagagaggatttagttgagttttgtttggatttttgatttatagaaaatgtgagataataaatgtatattgttttaaattgtttagttttagggaaattttgttatgtagtagtagttaattattagatttttttttttttgtttgaaaattatttttttttattaaaagagtttaattttttttatttttgttgttttttttagttatagatatatatttatatattttttttttttttttttttttgtttttcgtttgaggtatttatggtattgtaatttgatatatttttaggtttagtaaattgtttgagattttgttagtaacgtcgtaatgagatgggtaaatttttagtattttttgatattgtttaaggtaaagttataagcgatgtttgttcgataattttaacgtgtgttattgtttggaaggttatttggtatttataggaatttgaaagttaggtattggggaaaaatgagttttagattgttgtatgtatttttagatagaattatattttttgaaaaattgtataggatgttgagttgataggggatttattatgattgtatggtttattgggtttgtattatggttgagaaaaattattttgtcgggttgggaggatgatagttatatttttttagttggttggtgatagatgtttaaggagaggttgaagacgtggttttttttttttttgatttgaagttattgagttgtattttaaagtaaattaataaaaagagggatgttttgataggaattttgttgaggtttattcggttggtggtatgagttggtagataaaattaaaagttttgagataagcgtttggaaatttaaagagatattttgtttgttatttataatggttaaaaattttgaagaaaatgtatttttatattgaagggtttgggggaggtgagtttagttaattaattaattaatagattaggaaatatttattgtatgtttattttgtgttcggtattatgttcgggattggaaaaatatagttagattttagtttttgttattaaagggtttagggaagagtgaggtggtttataaatatgtaaatatatttaaaaattgtaatatagtgaagtgaaggtttgtgttttgtgggagattaaattgattttatttgtagggaattagggaggataaataaaggtttttttgagtaggtaaataaattgggttggtaggtggtaggataaagatttaggggagtagaagatatttttggttgaaggtttggtttgtgtaaaggttttgaggtatgaattagtttggttaggttggaggaattgaaaagttgtgtaaggttgttgggtgtaaggtaggaaagaggttagatagatgggggagtttggtttagaaagagtttgagggttagattaaagattagattttgtttttagagtaatagggagtttgggatgggtttaaatagggtaagtttggttagatttggggtttggaaggatttttatagaggagaggttggaagaggtgagaatgagggtaggttgattaatgttgtaaagatgaggatttttgttttattattattttgaagtatatttattgtttgttattttgtatttttttttttgtattaatagtatttaattttaaa

SEQ ID NO: 2058 - DNA, 2460 bp, Artificial Sequence
  chemically treated genomic DNA (Homo sapiens)
ttttgggggatttatgttttatagaaagtatttagtataatgtttggtatattgtaagttttaagtaaatagaagttgttattattattaattattttttgagatggagtttcggtttgttttttaggttggagtgtagtggtgtaatttcggtttattgtaatttttattttttgggtttaagtaatttttttgttttagttttttaagtagttggaattataggtgtttattattatattcggttaattttcgtatttttagtagagatggggttttattatgttggttaggttgtttttgaatttttgattttaggtgattcgtttgtttcggttttttaaagtgttaggattataggcgtgaattatcgtgtttagttaggagttgttattattaatagttattattgttatagttatttggtaaattaagtatgattgttattattttgtagatgataaaattaaggtaataagatgggagtgatttgtttaggtttatttaattgggaattatgcgattagaagtattttttttttattatgtatttttgtttttttaattgggtatgtaagtttatttatttatttattcggtaaatatatatgtttattgtgtgtttggtttgtgtgtgttgtaggtatagattgggttttgtttttatggaaggtatagttttttagggaagagcgatttttattgaatatttatatagatttatttaaaaattataatacgtgttttgtggtatgaagggaaaagtagggtgttgtgagacgtgatttggtttggggtgatttagatggggaagtttttggcgagtttggttaattttttgttgttttggatatttagttattatttttttagattagtttagggttggatgatttttgagagtgtggttgggtgttttttttggtattttcgttttttagtgttggttttttaagttttttttagattttttttttatttagtttttttgaagattgtttttttataattgttttttttatcgaaggatttagatataaattgtattttaaatttaatattagttattaatattttatgattataaaacgttaaagataatgttagtggaaggagcgtttgtatgggtagaatggatgatttagaagttcggggagaggggagtcggtatattaagtggttcgggagtttttgaggtaatttagtatgataggcggtggtttttggttgagtgtaatatttttcgaggtgtttattaagcgtcgtcgttgtgtataaatattttttttttgatttttgttattttatgtttattatgattaggagtaggtggggttattatgattttttgagttttttttttgtttttgaggaagttaaatggacgttttggtaggagggtatggggttgggtgggtagattcgatggttatgtatttggggttttggttggtttttgggaagtcggaggttttgggttaagtttgtttttgttaggatttgttttgtgattttggggttatttttgtttttttttgagtttttgtttttttatttgtaaaatggggataataagtttgtttttattttatggagatggtgaaaaggaagagtgggttagttatttgtggtagttttttttttttgagatagagttttgtttgttgtttaggttggagcgtaggggtatgattttggtttattgtaatttttgtttttgggtttaagcgattttcgtgttttagtttttttagtagttgggagtatatgtatacgttattatgtttagttaatttttgtatttttagtagatatggggtttcgttatgttggttaggttggtttcgaatttttgaatttaagtgatttgatttttttggttttttaaagtattgggattataggcgtgagttattgtgtttggtttgtgagagtttttgattttgtgttagtattagggaaataggattggaggggtagttgaggagagtcgggttttggagttaggtaggttggggttgggaatttggataaatgatttcgttttgttgagttaggttttttatttttatagtgaagatggtagtagaatggatattttttaggggtgaagattttatgagtttattataagaaagggttcggaatagagttaagatttatagatattattaattgagtatttattaagtattaattattaggttaagttttttttatgagttatgttgtttgatttttttattagttttttgaagtaaaattatttttttttttattaattaatattttgggtgaggagtgggtaggggttggggattatagtttagagaaggggggtttcgagtttagtggttagttttttttttttagagatatatttttttttttatagttagttattggggttgatggatgggatgggggtggggtttagatagtagagagtgtttagaaaag

SEQ ID NO: 2059 - DNA, 2460 bp, Artificial Sequence
  chemically treated genomic DNA (Homo sapiens)
tttttttgggtattttttgttgtttgagttttatttttattttatttattaattttagtaattgattgtggggaaggagatgtatttttgaaaggagaagattagttattgggttcgagattttttttttttgagttgtgatttttagtttttgtttattttttatttaggatattaattaatgggaaaaggaatggttttgttttagagagttggtgggaggattaaatagtatagtttatgggaagaatttagtttagtggttggtgtttagtaagtgtttagttgatggtatttgtaggttttgattttgtttcgggtttttttttgtgatgagtttatgaaatttttatttttaaggggtgtttattttattgttatttttattgtggggatgaggaatttgatttagtaaggcgaagttatttgtttaggtttttaattttagtttgtttgattttagagttcggttttttttagttgtttttttagttttgtttttttggtgttggtataaaattaagagtttttataggttaggtatagtggtttacgtttgtaattttagtattttgggaggttaaaggggttagattatttgagtttaagagttcgagattagtttggttaatatggcgaaattttatgtttattaaaaatataaaaattaattgggtatggtggcgtgtgtatatatttttagttgttggggaggttaaggtacgagaatcgtttgaatttaaaggtagaggttgtaatgagttaagattatgtttttgcgttttagtttgggtaataggtaagattttgttttaaaaaaaaaaagttgttataaataattgatttattttttttttttattatttttatgagatgggaataaatttattatttttattttatagatgaggaaatagaggtttagggaagaatagggatggttttaagattatagagtaagttttggtaggggtaggtttgatttaagattttcggttttttaggagttagttagagttttaggtgtatggttatcgggtttgtttatttagttttatgtttttttgttaaagcgtttatttggtttttttaaaaatagaagggaaatttagagggttatggtggttttatttgtttttggttataataaatatgaggtgataagaattagaggggaaatatttatatatagcggcggcgtttggtgagtatttcggagaatgttgtatttagttaggagttatcgtttgttatattggattattttaaagattttcgagttatttagtatgtcggttttttttttttcgaatttttgagttatttattttgtttatgtagacgttttttttattgatattatttttaacgttttgtaattatgaaatattaatgattgatattgaatttaaagtataatttgtgtttgaatttttcggtggaaagggtagttgtaaagggatagtttttaaagagattgggtggggggggggtttaggggagatttggaaaattaatattgggaggcgggagtgttaaggggggtatttagttatatttttaagagttatttagttttaagttgatttggaggggtaatagttagatgtttaggatagtaaagggttaattagattcgttagaagtttttttatttgggttattttaggttaagttacgttttatagtattttgtttttttttttatgttatagagtacgtgttatgatttttagatgggtttgtgtgagtatttagtgaagatcgtttttttttgggaaattgtattttttatgagggtagggtttagtttatatttgtagtatatataggttaggtatatagtaggtatgtgtgtttatcgaatggatgaatgaatgggtttgtatgtttagttggaaaaataggaatgtatgatggagaagaaatgtttttagtcgtatggtttttagttgggtgggtttggataggttatttttattttgttattttggttttgttatttataaaatggtgataattatatttagtttattagatagttgtgataatggtaattattaataatagtagtttttggttgggtacggtggtttacgtttgtaattttagtattttgggaggtcgaggtaggcggattatttgaggttaggagtttaagagtagtttggttaatatggtgaaattttatttttattaaaagtacgaaaattagtcgggtgtggtggtgggtatttgtaattttaattatttgggaggttgaggtaggagaattgtttgaatttaggaggtggaggttgtagtgggtcgagattgtattattgtattttagtttgggagatagatcgagattttattttaaaaaataattaataataatagtagtttttatttatttaaagtttataatatgttaggtattgtgttgagtgttttttataaaatataaattttttaagg

SEQ ID NO: 2060 - DNA, 2410 bp, Artificial Sequence
  chemically treated genomic DNA (Homo sapiens)
tttttatggtataaagttatttaaaaaaaaaaaaagaatagaggggagttagagggaggggataaggggtggagggtggagttgttagagttttatggggtataggagataaatggatatgtattggttggaaaggatagaagttgtgatttttttagttatttaattggggaaattttagaataggaggtttttgagtttttattagttgataagtgataaaagttgagagtaataatgataagtgttaatattgattaagtgttaggtatatgttaggtaattatatagagtatgttataggtatgaatttatttgtttttttaagaagttttttgaagtggtattgggagataattttttatgggtttttttaaggtttgtatgtttttagtttaaaagatattgagatttttgttttagattattattttaaggatatttgtgtagtaaatatatttggaggatagagataatatttttttttggagtagaaagaagaggatagagttgttttttaattagtataataatgtttttatttgaggtaaaggttagataggtttggtaatagtttttttataagattgtaggttttttaagttttgggattttttattgagatatagatttgttgttgtgtgtgtagaatttatttgggttgtttttattgtttttatggaatttgggagataattagaattgacgtaaatatgaagtttgtgttgtttgttatattgtgattaataaagttttttgtttttgatttgggatttcgtgttttttgtcgttatgtatggtattgtggtaggttaatttattagtttgtgagtagtgtaaaatttcggatttttcgtagttttttcgttatatttatattatttttgttttatagatgaggattttgaggtttagagaattgaagttttttgtttaagattatatagttaataagtaataaagttaggattgttatttagatcgattgggaaaggaaggagagatgagtaggggattggagaagagaatcgttggaaatgataggagttgaaggttttaaaggtatatagaaggttatgttttttagttttttaaatttatatatttttagatgttgtttgtttttatattcggttgttggggttgagtagttaatttgggacgatcgtgatatatttaacggtgagttatgtttttttttagtaattagtagtggtaggttcgggaggatgtagggagtatttttggaaattcgtgtttgagggtcgttatgataacgttatttgagtcgtttgttagtagttgggatgttagtgtttgaattaaggtataaaatagttttataggttgagtgcggtcgaggataggagtaggttttttgtacggtatttttaatgggtttgttagggattgatgggagggatgtgaggatttggtgataagggagatttatgggtttattgtttaggttatagtattttatggaagtttggggtttttggttggtgggaatgagtatatttggcgtgatgggtattttggtgagtattatttttttttgttttggttttttttggtttgtttgttttatagttgtttttttagaggttttgtttaatttgaggtttttatttaagtgttataatttttgaagattgatagtaatttgggaaggtaattaagattattttttaggataattttgaagattttagaatttagggcgaattagttatatttatatattaatattaaatacgaatattttatgaaagtagtttggaatttatttatttatttataaatttatttattattttgtttttttagttgtttattttaattagaatttgggttttataggttttatgtagaagtggatttggttatttcgtttttatttttttttatttttttttttttattttattttagtttattagttttattgttgttttttaaatatatagttgtttttttgttttagagtttttgtatttgtttttttatttgtttggaaagttttttttttagaagggaagttttttttttaggtttttgtttatatgttatttttttagagatatattattaagattattttaggagaaagtatttaatttagttttagtgataaggttaaatatatatatatatatatattatgtataatatgatatatatttgtgatttagttttttttattcgtacgaagtaaagagagataagttgaaaattggtggtttgtaagttgaatttaatttatagatttgttttgtttggtttatatagtgttttaagaattgagtaagttgttaatagttataaagttgagagattttgttttagaatgtaaatttttaatttatttcgaaaaattaaggttgggtgtggtggtttatgtttgtaa

SEQ ID NO: 2061 - DNA, 2410 bp, Artificial Sequence
  chemically treated genomic DNA (Homo sapiens)
ttataggtatgagttattatatttaattttagtttttcgagataaattgaaaatttgtattttaaaataaaattttttaattttataattgttagtaatttgtttagtttttgaaatattatgtaaattaaataaaataggtttgtgagttagatttaatttataggttattaatttttagtttgtttttttttgtttcgtacggatgggggaaattaagttatagatatatgttatattatatataatatatatatatatatatatttggttttattattgaggttgaattaggtgtttttttttagggtggttttggtagtgtgtttttgagaaggtgatatatgagtagaaatttaaagggagagttttttttttgggggaagagttttttaggtagatggaggagtaagtgtaaaggttttgaggtagaaaagtaattgtatgtttgaggaatagtagtaagattagtgagttagagtagaataagagagggggagtgaaaggggatgaggacgggataattaaatttatttttatatagggtttgtaggatttaggttttaattaaaatgaataattgagaggataaggtgatgaatggatttatgaatgaatgaatggattttaagttgtttttatgggatattcgtatttggtgttagtgtgtgggtgtggttgattcgttttaggttttgaagtttttagaattattttggaagatgattttggttatttttttaagttgttgttagtttttagaggttgtgatatttggatagaagttttaaattgggtagggtttttgggagagtaattatgagatagataaattaagaagaattaaggtaggaagagatggtgtttattaaaatatttattacgttaagtgtgtttatttttattagttagggattttaggtttttatagagtattgtgatttggatagtgagtttatgaattttttttgttattaagtttttatattttttttattaatttttggtaaatttattggggatgtcgtgtagggggtttgtttttgttttcggtcgtatttagtttgtgagattattttgtgttttggtttaggtattggtattttagttgttggtaagcgatttagatggcgttgttatggcgatttttaggtacggatttttagagatgttttttgtattttttcgagtttgttattgttgattgttgggggagagtatgatttatcgttaaatatattacggtcgttttaaattggttgtttagttttagtagtcggatgtagggataggtagtatttgggggtgtgtgggtttgggaagttgagaggtatgattttttgtgtatttttggggtttttagtttttgttatttttagcggtttttttttttaattttttatttatttttttttttttttttaatcggtttgggtaatagttttagttttgttatttgttagttgtgtgattttgaataagaagttttaattttttgggttttaaagtttttatttgtaaaataggggtgatgtgagtatgacggaagaattacgaagggttcgagattttgtattgtttataagttaatgagttagtttgttataatgttatatatgacggtagaagatacgagattttaggttagagataaaggattttattagttatagtatagtaagtagtataagttttatatttgcgttagttttaattgttttttaagttttatgagagtaatgaaaataatttaaatggattttgtatatatagtagtagatttgtgttttaatggaggattttagagtttaggaaatttgtaattttataaaggggttattgttaaatttgtttagtttttgttttagatagagatattattgtattggttgggaaataattttatttttttttttttgttttagagagagatattgtttttgttttttaagtgtgtttgttatatagatgtttttgagatgatagtttagaataaaggttttagtgttttttgagttgaagatatgtagattttggagagatttatggagaattattttttaatattattttaaagggttttttggaggagtagatgggtttatatttgtaatatgttttgtatagttgtttggtatgtgtttggtatttaattagtgttagtatttgttattattatttttagtttttattatttgttagttagtaggaatttagaggttttttgttttgggatttttttagttaggtgattaagaaaattatagtttttattttttttagttagtatatatttatttattttttatgttttatgaagttttaataattttattttttattttttgttttttttttttgatttttttttgttttttttttttttttaaatagttttatattataaaaa

SEQ ID NO: 2062 - DNA, 2489 bp, Artificial Sequence
  chemically treated genomic DNA (Homo sapiens)
aaatggttattaaattgtttaatttaaatggtcggtttatggatacgttttgtttggtttatgtttgtttaatttttaaaaaaaaattattatttgtattttttgttaataataaaaataattgggatagtgtgttttaatttaaattttttattttttttcggtaattagaaggtttgatagtattgtgtttatttttttgtatggtagttatttataggagttgggtagtggttgttttttttgttaggatataagtgttttattttattttagtgtttttttggttatattatttttgtatagggttgtttggttttagtttagttgatgggatataggcgtgagtagtgaggttatgtagggattataagtaggatatttttttttttttttggaaggaagtattttggttattatagtaatatgttgttgtttgtaatatattttttatttgaaaaggagaggagatgataagtatatttttttttttagtttaggtaatattagtttttggtattttttaaaatttaagagcgagaagggggagtgtgatttgttttttttaatttgggttttaaatgtagatgttttaaatatttttatttgtttaattaatttagagatgaggcgttgggaggggttgatttagattttattttatataaaaagattagaatatttttgattagtgatggaggaaggtgtgggagtttgagatagtgttttgtttttgggtaaatgtatatattttttgatgttttttttttttttacgttttttaaagtagaagtatagattttttttttttattattttttatagttaaattttttttagttaggattttagattttttttaatatttaggagtttttagggtagtaggtttgtttttaggttatttatagaatttgaaggaaataagggaatgaaataagagaattagttagaaataaggtagggtatcgtgcggtatttttttttgaaattaagaggttgagagttggaatagtagtagaaattagaagaaattttattgagaaaagaggtatagagaggagtgttaattagtatttaggtttttttttgggagtgttaatttataaatattaataatcgtaattatttagtattagttataatgttttgtaaattaaggttatttttcgtggagtaaatagttgcgttaatggtagtaaaaggtaacggcgttgttggttgtatgttagttgatgtttgttaggatgatagtataaattaggaaggatacgtttaatttgtgaagataggtagtggtatgggggtaggtggagtgacggggtagagtgtggtcgtagatatatattttacgtaaggtttttgggtcgatttgatttaatagggatttgttttagataggtgatgtttggggtagatgaagtttttagggttattaggtgtaggtaggaggggagagaaggggtcgggtgggtagggagagggtgttttagagggaggtggtattaagattttagatatttgggttaagagtagagggttacgttttgagttgttgtttgtggtattttattgtagattttggcgtttttgttaagcgatatagatatttttttttttttttatttttttttttttttttttatttttttttttttttttttttttttttttgttagggttgatttttttattaggtttaatagatatagtttggggtttatattatttttagggttttttttttaatgttttaattttttttataattagaagaaaaaaagaatttttagtaggaagaaaatgttgtaatattgtatgtgatattaatatatttatttttatattaatgtagttataatatagtatgtttgttttttttttatggagagaggtttaagtgttcgggggttataaaatttattatatggttttattttttgttttttatttttttttttattaattacggggttttaagtaattagtattgttttatggagtttcggttttattttttgtaaatgggttaataatggtgatgtttttttaagtaggatgaagtaaaataatattagaaaaagttttggttataaagtggtgtttgttttttttttaggaggttttgggattttgggagttaggcgggtgatgtatttgaaaattttagtggatggagtttttggtaatgttttttatgggttttttaagttaaatgtatcgttagatttttttttcgggtttgatttattatttttttgggttttttggtttttttaaagagtaaatgttttttttgattttttgagaaaatttataaggtatttgagtatattagatggattaaataatgtttttaaattttaacggaaagaaagtagttattatgacgggttttagtaaggggagggagttgggggtttttttgtttttttattgttgggattggatatattggggtttgtaatatttagtgtagatgaaaatgt

SEQ ID NO: 2063 - DNA, 2489 bp, Artificial Sequence
  chemically treated genomic DNA (Homo sapiens)
atatttttatttgtattgggtattgtaaattttagtgtgtttagttttagtagtaaaggaataaggaggtttttaattttttttttttgttggagttcgttataatggttgtttttttttcgttggaatttaaaggtattatttgatttatttagtatatttaagtgttttgtgagtttttttagagggttaagaaaagtatttgttttttagagaaattagggagtttaggaagatgatgggttagattcgagagaagggtttgacggtgtatttagtttggggagtttatagggagtattattagggattttatttattgagatttttaaatatattattcgtttaatttttaggattttagagttttttgaaaaggaggtaaatattattttgtggttaaagttttttttaatattattttattttattttgtttgggaaggtattattattattagtttatttgtaaaggatgaaatcgagattttataaggtaatgttaattgtttagggtttcgtggttagtgggaggaggggtggggagtagaaagtagggttatgtgatgaattttgtggttttcgggtatttaggtttttttttatgaaaaaaaaataaatatgttatattatggttatattggtataaagatgaatatattaatattatatatagtattataatattttttttttgttgaaagtttttttttttttttaattataaaagaaattaaaatattggagaaggggttttagaggtagtgtgaattttaggttgtgtttattgggtttaatggagaagttagttttggtaggaggagaggagaggaagagaaggaagatggagaggagggaaaggaggtagaggaagaagagaatgtttgtgtcgtttagtaaaggcgttaaggtttgtagtgaaatgttataggtagtagtttaaagcgtggttttttgtttttaatttaagtgtttgaagttttggtgttatttttttttgagatattttttttttatttattcggttttttttttttttttttatttatatttagtgattttgggagttttatttgttttagatattatttgtttaaagtaggtttttgttagattagatcggtttaagggttttgcgtgggatgtgtgtttgcggttatattttgtttcgttattttatttgtttttatgttattgtttgtttttatagattggacgtgttttttttgatttatattgttattttggtaggtattaattggtatgtagttagtaacgtcgttattttttgttgttattaacgtagttatttattttacggaaaatgattttaatttataaggtattataattaatattggatgattacggttattaatatttatggattgatatttttaggaggggatttgggtgttaattggtatttttttttgtgtttttttttttaatgagattttttttgatttttgttgttgttttagtttttagttttttagttttaaaggaaaatatcgtacggtgttttgttttatttttggttgatttttttattttatttttttattttttttaggttttgtaggtagtttagaaataggtttgttgttttaggggtttttgggtattgggaaaggtttggggttttggttgaggggaatttggttgtgaggagtagtaaggagagggagtttatgtttttattttagaggacgtggagagaagagaggtattagggaatgtgtatatttgtttagaaataaagtattgttttagatttttatatttttttttattattaattaaaaatgttttggtttttttatataagatggaatttaaattaattttttttaacgttttatttttgggttggttgaataaatgggggtgtttggggtatttgtatttggggtttagattggagaagatagattatatttttttttttcgtttttaggttttggggggtgttaggagttgatgttgtttgggttgagaagagagatgtatttgttatttttttttttttttaggtggaagatgtgttataaatagtagtatgttgttatggtaattaaggtgtttttttttaagagagagggagagtgttttgtttgtggtttttgtatggttttattatttacgtttgtgttttattagttgggttggggttaggtagttttgtataagagtgatatagttaggagggtattgggatgaaatggggtatttgtattttgataaaaggagtagttattgtttaatttttgtaaatagttgttatgtagaaaaatgggtataatgttgttaaattttttgattatcgaagagaagtgggaaatttggattaaggtatattgttttaattatttttattgttggtaaagaatgtaaataataatttttttttaagaattaaataaatatggattaaataaaacgtgtttatgaatcggttatttgggttgggtagtttggtagttattt

SEQ ID NO: 2064 - DNA, 2494 bp, Artificial Sequence
  chemically treated genomic DNA (Homo sapiens)
gtagtttgttttttagttaaatgggtcggagttggatatgggaaaggtgtaattaatattttgttgtgggggttaggtgtgaaggggtttattcggttatattttttttcgggttcgttttttttttagttagataggatgttgttagatttttcgtttggttttgaatttttttttgagaatttttttaaaatttaggttgatgttttttttttgtgagttttattttttttattttttagatgggtatgagaatagtttttggggtttttatataggttaaatgtaggaatgtatatgggaagtatttggtaaagtgtcggtatttgttaaatttttataaaaatggttttttggtatttgttttgtttttttgttgtgtgattttgggtaagtaatttaatttttttgagttttaggggaaaattatgatagtatatgttttagagagtggttgtaaaggtggttaattattttatagtaatttattatattcgaacggtttttaggtcggtttttttatttttattgaattttagtatatagattaggaaacggtatttttggggtagaaaatataattacgttttttgaaaatttattaaatgtgtaaaaaattttttggatatggagaaaaggtagaattttttagaatttgaatggtggtagttattgtgtttggagttgttttttggagagtgatagttgagggagaagattttatagggtttaagttggttaggttttgttattttttggtttggcgtttgatttttgagcggtgagggttagtgaggtgtttgggaggattggtaattcgcgggttttattggtattttattcgattaaggttatttattttttttttttcgtgtattaattgttttgattttaatatgtaaaggtttaattgtttggttttttgggtgtttgtttagtttatagggttttattttgggatagttgaattttttagggtgttgtagttttgtttgttttttttattttttatttggatattattttaatgtaaaggtatggttgagatatagaaatttttttgaaatgtattattgcggtttttattgatttttattgtgtgttttaatggtgggtttagtgggtgggggttgggaggggtggagtaggtgtatggggtagcggtgtttagtatttgttttagttatagttgttggtttattgtatggtaggtttttttaattcggggatatcgtatgtatagtgtttttttcggcgttttttgttttcgtcggtttggtgtcgattttatatttgttaggagtattatgaaggcgtttggggggcgagggatttaaggagtgggggtttgtgttttttgcgtgtgtatatagttttcgtttttagtttattatgttttagaatgtttttttttttttttgtttgggtttaggttttattatattttgggtatttattgtataggagggtagtgtttaggattttattaatagttttgggaagggaagggaggtgttgttttaattttggttttataaatggattttagttttttttttagatttttagagttagtttttagtttataagggtgaatttattttttttatttatatgaagatttagaatgtaattaataaattttttaggcgtggcgtgtggaggttgttgagtaatggtagagtggagtagtgtttaggtattttttttttaattttttatgttttttattttttggagtggcgagtttttatttttgttttatgagattgagtttagtttttaggcgttttataagtttttattgaatgtatgggttttattggagttattttttggatttttttttattttggtagtttagtgtggtattttaggtatttaggaggtgatggaatgaatttatttttagtttttaaattttatttagcgttgggattttataggcgggttttgattttgcgggtatattagattgggcgtgaggggattggagaattgtatgttttttaaaaagattatttagtattatggaatagtgtttagtatttagtaggagtttagtagattaaaaaaaaaattatagatagggttttgttttatcgtttaggtttgttttaaatttttggttttaagtaattttgttttattcggttttttagagtgatgggattataagcgtgagttattatatttagttttaatagatttttgtttaatgggttattgttatgattttttatttggaaaatgttgtattttttagaaaaaaataaattaatattattggtgtttttggaattatatagttttttggttggagtagggattgttatgaggtatgagtgagggggtagatttttttgaggtttttttaatttttaaaatagatttatttattttttaagggtttgttgaggatttattgggtatttagttttatgtgtaagattttttttaatatagttttggttaggtagatggtgtgttaggg

SEQ ID NO: 2065 - DNA, 2494 bp, Artificial Sequence
  chemically treated genomic DNA (Homo sapiens)
ttttgatatattatttgtttggttaaggttgtgttgggaaaagttttgtatatggagttgggtgtttagtaaatttttaataagtttttagagaataaataagtttgttttaaaaattaaagaggttttagaggagtttgtttttttatttatgttttataataatttttgttttaattaaaaagttatatagttttaaaaatattaataatgttgatttgtttttttttgggggatgtagtattttttaaataaaaggttataatagtaatttattaaataaaaatttattgaggttgggtgtggtggtttacgtttgtaattttattattttgggaggtcgagtgaggtaggattgtttgaagttaggagtttgagataagtttaggcgataaagtaagattttgtttataattttttttttaatttattgagtttttattaagtgttagatattattttataatattgaatagtttttttaaaaaatatgtaattttttaatttttttacgtttagtttgatatgttcgtaaggttagggttcgtttgtgaaattttagcgttggatggaatttaagagttgagagtgaatttattttattattttttgggtgtttagggtgttatattgagttattagggtaggagagagtttagaggatggttttaatgggatttatgtatttaatagggatttatggagcgtttgagagttggatttagttttatggggtagaaatggaaattcgttattttaaagggtgggggatatagaggattgggggaggggtgtttgagtattattttattttgttattatttagtagtttttatacgttacgtttgaagggtttgttgattgtattttaagtttttatgtgaatgagaagggtaagtttatttttgtgaattaagggttgattttggagatttggaaaaggggttggagtttatttgtaagattagagttaggatagtattttttttttttttttagggttgttggtgaagttttgagtattatttttttgtatagtaagtgtttaaagtgtgatgagatttgaatttaaataaaaggggaaggagatattttaggatatgatgggttgggggcgggggttgtgtgtatacgtaggaggtatagatttttattttttggatttttcgttttttagacgtttttatggtatttttggtaagtgtgaaatcggtattaggtcggcggggataaagggcgtcgaggggggtattgtatatgcgatattttcggattaaaggggtttgttatgtagtgggttagtagttgtgattggaataggtgttgggtatcgttgttttatgtatttgttttattttttttagtttttatttattgggtttattattaaggtatataatgggagttaatgaggatcgtaatgatatattttaaggggatttttgtgttttagttatgtttttatattaaaataatgtttagatgggaggtgagagaggtaggtaggattgtagtattttgaggggtttaattgttttaaaatagagttttgtgagttgggtaggtatttaggaggttaggtagttggatttttatatgttaaaattagagtaattggtgtacgaaggaagagaaatgggtagttttagtcgaataagatgttaataaagttcgcgaattgttagtttttttagatattttattaatttttatcgtttagaggttaggcgttaggttaggaaatggtagaatttggttagtttgaattttgtggaatttttttttttaattgttattttttaaagagtagttttaggtatagtggttgttattatttaagttttaaaaagttttattttttttttatgtttagaaagttttttatatatttagtaaatttttaaaagacgtgattgtgttttttgttttaaagatgtcgttttttggtttgtgtgttaggatttagtgggggtggggaagtcgatttgagaatcgttcgggtataataaattattataaagtgattagttatttttatagttattttttaaaatatatgttattatagtttttttttaaggtttagagaggttaagttgtttgtttaaagttatatagtaaggaagtagagtaaatgttaaggaattatttttgtgagagtttagtaggtatcggtattttgttaggtgttttttatatgtatttttgtatttagtttgtatagaaattttaaaagttgtttttatgtttatttgaaagatagagaaaatgaggtttatagaagagaaatattagtttaagttttgagaaagtttttaaagaaggatttagagttaggcggggggtttgataatattttgtttggttagggagggggcggattcgggagagggtgtggtcgggtgggtttttttatatttggtttttatagtaaggtgttggttgtattttttttatatttagtttcgatttatttggttgagaaataggttgt

SEQ ID NO: 2066 - DNA, 2472 bp, Artificial Sequence
  chemically treated genomic DNA (Homo sapiens)
attaaaggtatgagttataatatttagtttatgatggattttgagttaatttatgtttgatgtgcgtgaagggttaatgtttttttgttttttaaatttttttcgtatggttatttaattgttggtgtattatttgtttaaaagagtttttttttttgtgaaattatttcggcggttttgtcgggtattaattagtcgtttgtgtgtggttttgttttttgttattttgttttgacgttttttttttgtcgatattattttgttttgatttttgtgcgttttaagtgaattttgaaatttggtagcgttagttattcgattttattttttttaaaattgttttggtttttttaggttatttgtatttttttatgaattttagaatttatttgttatgtaaaaaaaaaaaatttgttagaattttgattgggattgttaaaattatttttaaaaattattgaagttgattttgaaatgtagtatgtaagggtttgggtgtgtaatttgtacgtgagttttagtgtataaaagaaagtgagagttagtaagtcgggttagaggggataaaggagagagtggtggcgtatgtgtttaggttttcgtcggtttttgagagtttttttttttttagagtgattatagggtgggtaggaggttttttaggatttttggagggtgtgtttttttattaataatgataaagggtgtgatgtagattttttaattttattatatgtgaaaagagtgtttattgttgaaaggattaaataagataagacgttgagtagttgagttgtaaatgtttgtggattgaagtttaaagttagtttatatagatttatttatttgtttattttttgtcgtggttttttgtgttttagttattattatcgttttatggcgtatggttgacgtgttgttttgtaaagggttaggcgttattttttagtatgtattattttttattggtttcgtttttggggtttatgatatatattatttggttatttttattttggagtattataggttaaattagttagtaattcgtggaattaatttacgagtggtgtttatttttggataatggtttagtggaggggttggtttgtagtttatatttattatggttttgttgaatggtgttcgttagattttgtataatcgaatttagtttagttttatgaaggttttgtataagttagtttttttttttcgttatttgatggaataatagatttataggagaatttatttgtaattttaagtttcgagttaaagacgttttaagggatgaacgtgggtgatttgtggaatattgcgatgtatttatgagatagattgtacgtttatcgcggcgtttaaagaaattagatcgggttgtattagaggcggtgttgtaattcggttgttttttgggaaagaatgtaagtttttagtgtgcgaagtatgaggggttgtagaggaaattgttttggtggttttggttttgggagtaagtatttgtttttcgtttatttaagtatattagcgagttttataaatatttaagtggtttacgagatgttttatttttaggtttcgttttatttttttcgttgttatatagaggttattagaaattacggttttttgggtttgatagttaggtagataggattaggttaggttgtagttgttaatttttgcgttggtaatttttagattttttgtataatgttatcgtttagttatttttttttgggttgtttgtttttatggggtttttgtaattaaaaaaaataataatttatttttattttttttttttaatatgttttattaataattgtgtaaatttgtttattttttaggattttattatgatgtaaagtagataaaataattaatttgttttttttttttttggtatatgggtgttttgtagtttttattttttttaattttcgttttacgtttacgagtatgaagttgaattaatttatgttttgttgaagtcggattgtgagattgtgtaggtagacgtggttttttttttgagtttgtaaagtagtagaatttatgataatgggtttcgtagtaatagggattgattgcgttatgttgtttttgtttatttttatagcgtttaggagtttgtatgttattattgggattattttatagaaaatagaggtttttaggggtaacgtaatttgttttaggataggtagttataaggtagagaaaggagggttggatttgtatttgtgaaattatagttttggggtatggtttttgagatttatagttggggttgaagatttttaggggggttttgttgggtttattgttttttagagtggtttagttcggttgtagggtgttgtttttagtttggtgtattgcggtcggaggaggtggaggatggaaagtaagatttaaagatagggagtgtaaggggatagtgatatttgaggatttcgaggagga

SEQ ID NO: 2067 - DNA, 2472 bp, Artificial Sequence
  chemically treated genomic DNA (Homo sapiens)
tttttttcggagtttttaagtattattgtttttttgtattttttgtttttgaattttattttttattttttatttttttcggtcgtagtgtattaagttggaagtagtattttgtagtcgggttggattattttggagagtagtgagtttagtagagtttttttagggatttttagttttagttatgagttttagaagttatgttttagggttgtggttttataggtgtaggtttaatttttttttttttgttttgtggttgtttgttttggggtaggttacgttgtttttgggagtttttgttttttgtaaaatggttttagtaatggtatgtaaatttttgagcgttgtaaggatggatagagatagtatggcgtagttagtttttgttattacggaatttattgttatgaattttgttgttttgtaggtttagaagaaaagttacgtttgtttatataattttataattcggttttagtaaagtatgagttaatttaattttatattcgtgaacgtgaagcgggggttggaaggaatgaaggttgtaggatatttatgtattaagaaaaagaaagataaattggttgttttatttattttatattatgatggagttttaaaaagtaaataaatttatatagttattaataagatatattaaaagaaaggagtgagaataagttgttgttttttttaattgtaggggttttatgaaggtaggtagtttagggaggaatgattggacggtgatattgtgtagggggtttggaagttgttagcgtaggggttagtagttgtagtttggtttggttttgtttgtttggttgttaaatttagaagatcgtggtttttggtggtttttgtgtgatagcggaggaggtggggcgaggtttggaagtgaagtatttcgtgagttatttaagtgtttatgaagttcgttaatgtgtttaaatgaacgagaagtaggtatttgtttttaggattagagttattaaagtaattttttttgtagttttttatatttcgtatattggaagtttgtatttttttttagaggatagtcggattatagtatcgtttttaatgtaattcgatttggtttttttgagcgtcgcggtgaacgtgtaatttattttataaatgtatcgtagtgttttataaattatttacgtttattttttgagacgtttttaattcggggtttagagttgtaaatgaatttttttatggatttattattttattaaatagcggagagaggggattagtttgtgtagagtttttatagagttgggttaaattcgattatgtaaagtttaacgagtattatttagtaaaattatggtgggtgtgagttgtaggttagtttttttattgggttattatttaggggtaaatattattcgtgggttagttttacgagttattggttgatttgatttgtgatattttaaggtggaagtaattaaataatatgtattatgagttttaagaacgaagttagtggagagtggtatatgttagagggtaacgtttggttttttgtaggatagtacgttagttatgcgttatgggacgatggtggtggttgggatataggaggttacggtaggaaatgggtaggtgggtgggtttatgtaagttggttttagattttaatttataagtatttgtagtttaattatttagcgttttattttatttaatttttttagtaataaatattttttttatatgtagtaaggttaaggagtttatattatattttttattattattaataaagggatatattttttagggattttagggaattttttatttattttgtggttattttagggaaaggaaagtttttagggatcgacgggagtttgggtatatgcgttattatttttttttttattttttttagttcggtttgttggtttttatttttttttgtgtattagaatttacgtataagttgtatatttaaatttttgtatgttgtattttagagttaattttagtgatttttgagagtgattttgataattttagttaaaattttagtaggttttttttttttatatgataagtggattttaaaatttataggaaaatgtaaatgatttagaagagttaaagtaattttggaaggagtaaagtcgaatggttgacgttattagattttaagatttatttgaaacgtataggaattaagatagggtggtgtcgatagaaggaaggcgttagagtagggtgataggaggtagggttatatatagacggttgattgatattcgataaaatcgtcgaggtaattttatagggaaaggaatttttttgaataaatggtgtattaataattggataattatacggaaaaaatttaaaaaatagaagaatattgattttttacgtatattaaatataaattaatttagaatttattataggttgggtgttgtggtttatgtttttaat

SEQ ID NO: 2068 - DNA, 2474 bp, Artificial Sequence
  chemically treated genomic DNA (Homo sapiens)
ggatttgattagtttttgttaaattgagtatataagcgaggatgtatttaaaggagtgttagtgtattttttataaattttaaacgtagggtaagttggtttatgttattgttgaaaagtagtgtgtgttcgaggaagggtcgtattatatcgggtgtggatggaattatgtttttttgacgtgtagatttttcgaatattttatttgtagaatttgtttttaaataaatattattattattaggttagtgaaatatttttatatcgtttatgtttattatttgttgtgtaaatatttgtggttttaaaagaataatagatcgtgagaattttagtaaaatgattgtagaattaattatttttttaagtagaagtgatatttttaataggtttatttagacggttttagttttcgttttggggttttatattaaattttatttaggttgtttgtagtgaggggtagaaggttgcgttatagagatttaaaggtaaaacgtggggtgtttgtttgtatttagtggagttttatttacgattagtgatttttagagataggtaagggtgttaggaggttttcgggatgtattgaagtagttttttttaggaaataagcggtaaagaagaattttaattttttttatgttgataaaaaaatatatacgtgtgggaatgtatgttttgggtttgagtattgattttttttttgtagtttttcggttttggtattgttggttttaggggttgaattattttatggtgggggttgttttgtgtattgaaggttgtttaatagtgtttttggtcgttattttttagatgatttttaggtgtattttttttttttttttttatttttaggtatgtgaattataatgtttttagacgttgttagtgtgttttggagattaaagtaatttttgattgagaatcgttgtttaggaagatatattttttatttgtttgttgttttttaatgtaatttatagttgagagatattttgttttatttaggtgtgaagtatttcgttttatttggaaggttgggtatatttaaatattatttttttgtacgtttatttgtcgtagagtggttaatgttttttaattggtgtagtaaatattttagagttttttttgttatgtcggagttatttagaaattagttttgaaatgtggttgttattttagggattattatatattatttgttgtttggtgttaaattttgagtcgttgttatttaatattgattaataaatggtaggttgttagtatcggtagtgaagatattttaaggagttattgtttttttaaattaaaatatttaaatatttaaatttagggttggtttttatggttcgttttaattattttttttgttttggtatatttttttttttttgattatatagttgttacgttagtagtatttggagtcggaatacgatagttttttttttattagttgttattattttcgtaaggaaagttggaagttgttggagtagatgttaattttgagagaagattgttggttaagttattaaaatgagcgtattcgaaggttgcgatttatatgatttatacgcgggtagggtttgtaggatcgggttttgtttggttttgtatgtgtgtgtgtgtgtggatttgtgtatgtgtgtttttttgtgtggtgtgtttgtgtatttgtttgtttttgtgtgtgtgattgtgtgtatttttttatgtgtttatatttttgtgtgtttgtgtatgtgtttgtgtgtgtgtatgtttgtatttttgtgtgtgtgtttttgtggatatttgtgtgtgtgtttgtgtgtgtatttgtgtgtgtgattgtgcgtatttgtatatgtgtttatatttgtgtgtgtttgtatttatgtgtgtgtatttttgtggatatttttggttgtttgtgtgtgtgtttgtgtgtgtatttgtttgtgtgattttgtgtgtgattgtgtgtatttttatatgtgtttttgtatgtttgtgtgtgtatgtttgtatttatgtgtgtgtgtttttgtggatttttttatgtgggtgtttgtgtatttgtatatggttgtgtttttttttgtgtattttgtgtgtgtttatgtgtatttatgtgtgtgtgtgtatgtgtatgtatgtgtgggtttttttgtgtatgtatttttgtgtatttgtacgtgtgtttttttgtgtgtgtttgtgtatatttttgtgtttttgtatgtgtgtgtttatgtgtgtttgtgtgtgtatttgtgtgtatttgtatatatgtgtatgtgtgtgtgggtttttttgtgtgtgtatttgtgtgtatttgtatgagtgtttttttgtgtgtgtttgtgtatatttgtgtgtttttgcgtgtgtttttgtgtattcgtatgtatgtgtatttttgtgtgtttttgtgtatatttgtgtttgtgtgtatatttgtgtgtatatgtatgtgt

SEQ ID NO: 2069 - DNA, 2474 bp, Artificial Sequence
  chemically treated genomic DNA (Homo sapiens)
atatatatatatatatatagatatatatatagatatagatgtatataaagatatataaagatatatatatatacggatatataaaaatatacgtagaaatatataaatatatatagatatatatagagaaatatttatgtagatatatataaatatatatataaagaaatttatatatatatatatatatatatagatatatataaatatatatatagatatatatagatatatatatgtagaaatataaaaatatatatagatatatatagagaaatatacgtgtagatatataaaaatatatatataaagaaatttatatatatatatatatatatatatatatatagatatatatgaatatatataaaatatataaagagagatatagttatatatagatatatagatatttatatagagagatttataaagatatatatatatagatatagatatatatatatagatatatagagatatatatagagatatatataattatatatagaattatatagatagatatatatatagatatatatatagataattagagatatttataaagatatatatatatagatatagatatatatagatatagatatatatatagatacgtataattatatatatagatatatatatagatatatatatagatatttataaagatatatatatagagatatagatatatatatatatagatatatatatagatatatagagatatagatatatagagagatatatataattatatatatagagatagatagatatatagatatattatatagagagatatatatatatagatttatatatatatatatatatagagttaagtaagattcggttttgtaggttttgttcgcgtataaattatatgagtcgtagttttcggatgcgtttattttaataatttagttagtagtttttttttaaaattaatatttgttttagtagtttttagttttttttgcgaaaataatggtagttaatagggaaagggttgtcgtgtttcgattttaggtattgttggcgtgatagttgtgtgattaggagaagaaaggtatgttaagataaaaggaataattaaaacgagttatgagaattagttttggatttaaatgtttaaatgttttaatttaaaagaataatggttttttgaagtgtttttattgtcggtattgataatttgttatttattaattagtgttaaataatagcggtttagggtttaatattaaatagtagatgatgtgtgatgatttttaaaatagtagttatattttagggttgatttttaaatgatttcggtataataaggaagattttggaatatttattgtattaattaaagagtattaattattttgcgataaataagcgtgtaggggagtggtatttaaatatgtttagttttttaggtaaagcgaggtgttttatatttaggtggggtagggtgttttttaattatagattatattaaaaaataataaataaatgaaaagtgtgtttttttaggtagcggtttttaattaggggttgttttggtttttaagatatattggtaacgtttaaagatattgtgatttatatatttgggggtggaggaaggaagaaggggtgtatttaggggttatttaaagggtggcggttagggatattgttaaataatttttaatgtataaggtagtttttattatggggtgatttagtttttgaggttaatagtgttaaggtcgggggattgtagaaaaaggattagtgtttaaatttaagatatgtatttttatacgtgtgtatttttttattagtataaagagggttaaaatttttttttgtcgtttgttttttaaaaggagttgttttagtgtatttcgggagttttttgatatttttgtttgtttttggaagttattgatcgtggatgaggttttattgggtgtaggtaagtattttacgttttgtttttgagtttttgtaacgtagttttttgttttttattgtaggtagtttaagtggagtttaatgtagaattttaaagcgaaggttggaatcgtttgagtgggtttgttagaaatgttatttttatttaaaagggtggttagttttgtaattattttattggagtttttacgatttgttatttttttaaagttataaatatttgtatagtagatgatgagtataagcgatatggggatgttttattgatttgataataatgatgtttgtttaaaaataggttttgtaagtggagtattcggagggtttgtacgttagggaggtatggttttatttatattcggtgtgatgcggttttttttcggatatatattgttttttaatagtggtatgagttagtttgttttgcgtttgggatttataaaaagtgtattaatatttttttaaatatattttcgtttatgtgtttaatttagtaaagattgattaaattt

SEQ ID NO: 2070 - DNA, 2481 bp, Artificial Sequence
  chemically treated genomic DNA (Homo sapiens)
tattttgattatgttttgtttttagtagagataatagttttagagaggttaggatttttatttaaggttatatagtttaaagtatagaattgggttttgaattttaaaagttagattaaagagtttattttgtagttattttgttgtgtgtagtcgagaatttcgtgggggttagttgtgtttgagaaagtatgtgaggaaattgaagtttttttaaaatcgtgggggtggttttatcgtttttgtttttattgtttttgagttagttgtaaagaaaggaatttttttgtagagtatcgttttgaaggaaaatttatttggggaaaaaaaaaataattgttttcgttgggagtaatttttaaacgggagtttacgcgtgggtttttcgtttgttgttttaagtaaattagttatttttattgtagaatggttgtaaaggaaatggagaaaaggtagagcgtagttttgggagttgttttttagtttgggggtcgggtagggggaaataggtgttatttgggtttagacggggcgatgtttgggaggagaggttggaggaatcgggtttttttattacggggttttgtttgtggttatcgtcgtttatagaggttttataggtgtatgtagcgttttttttcgtttttttggttgttgttttttgcgggatagtcgtaggttggttttcgttggaggggttttttcgaattttgtttattttgggtttggttttttttaatatggtagttggggaggtagaggaggcggcgtgtttattttgttattgtcggggtttgatttattaataggtttggatagcgttttttttttttttacgtttttattgttaattgtttgtttgtagagcggttagttttgttttagtagcgcggcgagtcgtagtttcgtcgttgacggtgtgttcgcgatgtgttgtggggtttcgtcgtggcggttgtggacgggttgaggtttttttttggatgtttttagagtggtagggagtagtttgggtattttttacgttcggtataattcgttcgggttggtagttagagaagttaggtagagaagtgcggttagagaggttgtttaatttaattttttcgggttgggttatttgaaagtttaaaattttttaatattaagagacgggcggtatttaaatttaagtttggtttttaaatgaaattttttcgtttaattgtttaattttatttggaaatatgaaatggtaatttgattatatgttaaggtagttttggtcgggggattagagtcgaaatttttgtttttttgagtttattttttagcgaatggaatttatttaaattaggaattagttttgttatcgcgggcgagtcgtaggtttggtggtttggagggtggggtattttgaggttgcgggattttagttattttgtatggttaggataagggggcgtttagagttttgcgttttttaagggaggttggaaggaaacgtttaattgtgtgttttttagagttttagtaaattattcgatgtttataaattgttagtgaaagttatttgtaagaaaagttttatttttagtggttttgtagtttagaaaatttaaaattgaaaaatatacgttatttaggaaggataggagaaacgagaataggttttatcgttgtagagcgtgaggtcggttttcgttgcgtttgtttttaggaggcggtgtcgagacggcggaggtaatggaagtagaaacgagtgaaatttttttgttgtgtttagtaagtattttttgttaaggaagttgttaaatttataaatgtttttgttaagagagaggcgtttgttttttatacgagtttgttgttggtaaggaggtacgatagaaaacgtgttaagttgggattcggagtaggtggtggaaatagtagtttgtaggatgtcggttttgtttgtatggcggtttgagagtcgttcgaattgttgtgttgaggacggggttggagattcgtttttaggtgaggggttggtttttgtaggttttgttttgtttttgaggtattattagacgggtgttattagttatatggtgtaggtgaggagatagaggatcgaggcgggtagaagtgataggagaggtaaagagttgttttttgtatagttattgtttatgttgtttgattattttttttcgtcgtttagtttttgtatttggtttcggttttatttattgttggttattagttatttggaggttagttatattcggggggtagttttgttgtttggatttttgagttatatcgaaagtatttagttttttttttttttgaagtttttaggttttgttttttttttattatatgggtttttttttgagtattttttttgttttttttgtggatttgtttagttttcgtttggtgggtgtgttaggtttttgttgttttagtgtggggattttttaggggagggagtggtcgtagttttagaagtgt

SEQ ID NO: 2071 - DNA, 2481 bp, Artificial Sequence
  chemically treated genomic DNA (Homo sapiens)
gtatttttgaggttacggttatttttttttttggaggatttttatattgaggtagtagaaatttgatatatttattaggcgagagttgggtaggtttatagaggagataggagggatgtttagaggggaatttatatggtaaggagagggtaggatttggaggttttaggaggaagggggattgagtgttttcggtgtggtttagaggtttagatagtagagttgtttttcgggtgtggttgatttttaggtgattggtggttagtagtgggtgaggtcgaggttagatgtagaggttggacggcggagaggggtggttagatagtatggatagtggttgtgtaggggatagttttttgttttttttgttatttttattcgtttcggttttttgtttttttatttgtattatgtggttggtgatattcgtttggtgatgttttagagataaaatagaatttgtagaggttagttttttatttgagggcgaatttttagtttcgtttttagtatagtagttcgggcggtttttaggtcgttatgtaggtaggatcgatattttgtaaattgttgtttttattatttgtttcgggttttagtttgatacgttttttgtcgtgtttttttattaataataagttcgtgtggagagtaggcgttttttttttggtaagaatatttgtgagtttggtaatttttttgataagagatatttgttaaatataataaaaaagttttattcgtttttgtttttattattttcgtcgtttcggtatcgttttttggaagtagacgtagcgggggtcggttttacgttttgtagcgatggagtttgttttcgttttttttgttttttttgggtggcgtgtgttttttagttttgagttttttaagttgtagagttattggaaatggagttttttttataaatgatttttattgatagtttataaatatcgagtgatttgttagggttttgggaagtatatagttgaacgtttttttttaattttttttggggaacgtagagttttgggcgtttttttattttggttatgtagagtaattggaatttcgtagttttaagatgttttattttttaggttattaggtttgcggttcgttcgcggtagtagaattgatttttaatttggatggattttattcgttggaggatgaatttagaggggtagagatttcggttttaatttttcgattaaagttattttaatatgtaattaagttattattttatatttttaaataaagttgaatagttgaacgaaaagattttatttgggagttagatttaaatttaaatatcgttcgttttttggtattagggagttttagatttttaaataatttagttcggggaaattgggttggatagtttttttggtcgtatttttttgtttggtttttttaattgttagttcgggcggattgtgtcgagcgtggagagtatttaggttgttttttgttattttgagagtatttagaggaagattttagttcgtttatagtcgttacgacgggattttatagtatatcgcggatatatcgttaacgacggagttgcgattcgtcgcgttgttgagatagggttggtcgttttataggtaggtaattagtagtgggggcgtgggaaggaggggagcgttgtttagatttgttggtaaattaggtttcggtagtgataaggtagatacgtcgttttttttgtttttttagttgttatgttggagagagttagatttaggataaatagaattcggagaagtttttttagcgagagttagtttgcgattatttcgtaaaaggtagtagttaggaggacggggaggaacgttgtatgtatttgtgaagtttttgtggacggcggtggttatagatagggtttcgtggtgggaaggttcggtttttttagtttttttttttaggtatcgtttcgtttaggtttaggtggtatttgtttttttttgttcggtttttaggttgggaggtagtttttagggttgcgttttgttttttttttattttttttgtagttattttgtagtgaaaatggttgatttgtttgaagtagtaagcgaaaaatttacgcgtggattttcgtttggaaattgtttttaacggagatagttgttttttttttttttaagtaagtttttttttaaagcgatgttttgtagagaaatttttttttttataattaatttagagatagtgaaaatagggacgatggggttatttttacgattttgggggagttttagtttttttatatatttttttaggtataattgatttttacgaggttttcggttatatatagtagggtggttgtagggtgggttttttagtttgatttttggggtttaaagtttagttttgtattttgagttgtgtgattttgagtgagaattttgatttttttgagattgttgtttttgttgggaatagagtatgattagggtg

SEQ ID NO: 2072 - DNA, 2425 bp, Artificial Sequence
  chemically treated genomic DNA (Homo sapiens)
gttattaagaagaagaagaggggtttagaggtatgtagaatttagttgaaaaagaataatttatttatgtttgaagttttaaattagttttaattatttttgttaagagttgaggaagggatttaggagaaaggggattaaatttattttttttttttttacgaattttagtataatttgttttaagttaatttttattgaatgttgtgggttgattgttattttaagttatttgttttttttaaatattttaagaagtgttttgatttattttatagatgaagaaattgagatttaaagaggttaagtaattttttaagtggcgaatataggtggtagagaagattgaagatttaaattttggttgttagtttttaaaatttgaatttattattgatttttatggtattggtttggattagattatttttaatattttttttaattttgagattttaggattttttgatgttaggatattataaatttattataatttttttaaatttgttaaattaattttagatttttatgattatagatatgatatttttagaattaatatttaaattaaggtaggattattatatagaaaatataattgagtagaatttatttttgttatgttgttttttttagaattgattttaaaatatagcgttatgtttgttagagttagttatttgtaatgtgttagaatttcgattttaggtaagtgttaggagttaaaatgtaggtttttttaaatttttaagtagttgcggtgttaagttgatttcgatgagttgagtttttattgagtagtttaaatgattagattgtaattaggggttttatttttttatttacgaagtattagggtagttaaggggaaagattgacgtagaaggaatgaggtttttatgggttgggtttaaaagatttagagcgagtgtttagttgaaatatttgttaaaattttaaggaatatttatataaaaataagaagttgttcggtatagaagttagggtaggggatgtttttcgaaggttatattttatggtaggtatatagtagtacgtttaaatatggtttttgttaaggttagagaggtattatttatatagaagaagttattatcgtgattttatttatttcgcgtttttatcgcgtaattgaatgttgagtgtggacggtattttttttagtatttggttgcgttatcgtgtttagttggtaagttttgggggagaagagaggtttagaaggaagattatttgagtttattagaataatgtgtgtttttaataaggtaggggcgtttaaatttagtaggtttaatagattaagttatgttatgaaggttttgtggattatttattttcgttaattagttattatttaaaagatgagaaaacgttagtttataggttaaatgggaggtatttagaagagatattaatgaagagatgtttggttttgtattaattattgtaggtaaattaatattaaatgttaggaagtaaagtagaggtatttttttattataaatttttgggataagtttagagattattagtagtttagggtttgtgtacgttgagaattgaggggataatagaattgtgtaatattttggtgttttatcgttttcgttattaaattttatagtttatagtatcgttttggtatattgggtttgtgtaatatttatggatttgatttggaattataaagcggatttagtttttgttatatttatttattttagtgattttgggtatatattgtgtttttgaaggaggtatagtggttataaatggaaatagtatttgtttgtttttggggattttggttatagatttttgaggtttttttgggagttagtttaagataatgggtaagagtatggattttgaaggtagagttttttgtttggaattttagttttgttattttttaattgtgtggttttaataagttatttagtttgtttgtgatttaggttttttatttataaaatgggtataatagtttttattttatagggttgttatggtgattcgtgggttaatattaaaggagattttttaattttagtattattgatatttggggtcggataattttttgttttgggggttgttttgagtattatgggatgtttagtaatttttttattttttacgaattgttgtgataattaaaattgtttttagatattgttatatgttttaaatattttttaggggggtaaaattgtttttagttgagaattattgtattagattatgtcgtagatataaatagttaaatattagtaattttacgtggtttaatttaataattataaagtatttaatagttaaaattttttgaattttgtagatatatttatgtgttttatttgggataaacgaatttaatgtttttattagacgttta

SEQ ID NO: 2073 - DNA, 2425 bp, Artificial Sequence
  chemically treated genomic DNA (Homo sapiens)
tgagcgtttggtgaaagtattgggttcgtttattttagatgaagtatataaatgtatttataaagtttaaagagttttaattgttaaatattttataattgttagattgaattacgtgaaattgttgatatttggttatttgtatttacgatataatttaatatagtggtttttaattggaggtaattttgtttttttaggaaatatttgggatatgtggtaatgtttggagataattttggttgttataatagttcgtagagggtagggaggttgttaaatattttataatatttaggatagtttttagaataaagaattattcggttttaaatgttaatggtattgaggttgagaaattttttttaatattagtttacgaattattatgataattttatgaggtaggaattattatgtttattttatagatgaggagtttgagttataggtaggttaagtagtttgttaaggttatatagttgggaaatggtagggttaggattttaagtagaggattttgtttttagagtttatatttttatttattattttagattggtttttaggaaagttttagaagtttatgattaaggtttttagaagtaggtaaatgttatttttatttatggttattgtgttttttttagaggtatagtgtgtgtttagagttattggggtgaatgaatgtaatagaagttgagttcgttttgtgattttaggttaagtttatgagtattatataagtttagtgtgttaaggcgatattgtgaattgtgagatttggtaacgggggcggtggggtattaaggtgttgtataattttgttatttttttagtttttagcgtatataagttttggattgttggtggtttttgggtttgttttaagggtttataataggaaaatgtttttattttattttttggtatttggtattaatttatttatagtaattaatataaagttagatatttttttattggtgttttttttaaatgttttttatttggtttgtgagttggcgtttttttattttttaagtggtgattggttggcgggggtaggtggtttataagatttttatagtataatttggtttgttggatttattgagtttgggcgtttttgttttgttaaaagtatatattgttttgatggatttagatggttttttttttgaatttttttttttttttaaggtttgttaattgagtacggtaacgtagttaagtgttggaagaagtgtcgtttatatttagtatttaattacgcggtgggggcgcggggtgggtagagttacgatgatgattttttttatgtgaatggtgtttttttagttttaataggaattatgtttaagcgtgttgttgtatgtttgttatggagtgtggttttcgaagaatattttttattttgatttttgtgtcgagtaattttttatttttgtgtgggtgttttttgaggttttggtaaatgttttaattaagtattcgttttaggttttttggatttagtttatgggaattttattttttttgcgttagtttttttttttgattgttttagtgtttcgtgggtgagagaatgaagtttttggttatagtttggttatttgaattgtttagtaagaatttaatttatcgaaattagtttggtatcgtagttatttggaagtttgaaggaatttgtattttagtttttagtatttgtttagagtcgaaattttgatatattataaatgattggttttgataaatatagcgttgtgttttagggttaattttgaaaagaataatatggtaaaggtagattttatttagttgtgttttttgtgtaataattttattttgatttaaatattgattttaaaagtattatgtttgtaattatagagatttagaattggtttgataaatttaggagagttataataggtttataatgttttgatattagagaattttagaattttagagttggaaaagatgttaaaggtaatttaatttaaattaatgttatggagattagtggtaaatttaggttttggaggttgatagttagagtttgaatttttaattttttttgttatttgtgttcgttatttggaaagttatttaatttttttgggttttagtttttttatttgtaaaatgggttaaagtattttttagggtgtttgagagaagtaaatgatttagaatagtagttagtttataatatttaataaaagttagtttagaataagttatattgaaattcgtaaggagaggaggaatgagtttggtttttttttttttaagttttttttttagtttttaataagagtagttaaagttggtttagaattttagatataagtgggttgtttttttttagttgggttttgtatgtttttgggtttttttttttttttttggtagt

SEQ ID NO: 2074 - DNA, 2492 bp, Artificial Sequence
  chemically treated genomic DNA (Homo sapiens)
aattaatttttaagtgtatttttaaatgtatttttttagttgttaggtagatgagtattttttttttgtgaatttatttttaattttttttttttagttatttattgtacggtattattaatattttttagtatttttgttttggagtttaaagtgatatagttggtaagaagttgcgtaggggttggagtttatatttgttgggtattagagtttttgttttgagttatttgttcgtgttgggatcggtaggttatttttatagtagattatttttatttatttttagtgttttagtacgtagttttttgggaatttagattatgatattttttttgggaagtggtatggagaattttggttaggtgttttaagttaagtttatgttaatgatattagggtatagagaagttttttgtggtttatggggaggtgggaatatttgtaatacggtttttttaattttatttcgttaggattggagagtacgaaggagttcgtttttttgtaaaaatgggtagttagagggttttgggggttaaatggatatttttttgtttgtagttttttgtagtttttttatgtagataggtatggttaagttttgtggagttgataggtgtattttgattttagagtattgtgtgggtttttaggggttgtaggttattgttgtttttttttttttttttattataaaaggtaggtttttcgagaagtattgggcgtatgttttcgagtgaggggttttggtttatagggtagcggttggggtagagttgttggattggtgagtttattgggagtttttagttttgggttaggtttatatagagtttggggtgggggttaatgttattgttgaatgtgtttttttttagtgatttttaaagggagatgaaagttaaaaataattttggtgggggaaatagttggtggatagcgggttagtgatgggggtgggtaggaggatgtggtattgtcggggggaggaagtagattaaatgtttttttttttttaagtcgtaagggacggatagtattatttgtggtttttgtggttggtattttttttgtagtgtttttttgttaggagtttttttagataataagttgtagaagagagtaggagatggagtaggtattgtgtgtatcggattgaaatttttaagtgttttttgtatttgttttagtgttagttatagtttaggtttttaacgtttttcggttttttatgttggaagtttttttagtagatggttttatggttagagttggttttttgtgagttttgttgttgttttaattgtagtgtttattatttgagttttttttcgcgagttatttttattcgttaaagtgaatttaggtcgattttgtttttgttgtgtttggtttgttatttattttttgttatgagtgattttaaatatgttttatgatcgaagagttttgagtagagagaatttagtagttttttaggagttatatttgtttttattttaattatttttttgtgatattgtgggtttgttttttatttgttatttttgatttaggttttaagatatatgtgatttattttattttagtttgataattagagataattcggtgtaattatatgttttttgatagtaattggggtatgagagtataggtggttagggagtgtgggtggtgttaggtttttatagggtatatattgtggtttacgtcggttttttttttagatgatatgttatttttattgttttgtgatatttggaaatagtattataagatagtttttttaaggttttaaagtttttttttgttaaggatggtgattagtttattttagttttttgagaataaagtaaaaggaaatgattattattaaaatagaatataagaatgatgtaaaaaaaaaagggttttttgtagtaaaattataaaagggttgtaaagttttagaattttttttattgatgttttgtaaaatataggtattgggtttatgttttttagcgaggggttttggtttatagggtagtggttttttaggcggagtgtttataggtggtttagatgttttattggttttgtttttttttagtttgcgtttcggatagattgggtagtgtgcgggaattattttgcgttttattgttttttgtttatattgtttttgtatttatttgaattgttttagattattttggtcggttgttttttttagggtttttgcgaatattttttttttaggaaattaagttagaagatgtttttttttttttggaattttttttgtatttgattcgtatattttttaggttttggtcgttgtttttgttggatggattgtagttttttagggaaggtttttattttagttttttttgtgttaattgagtatttgttatatttaagtatcgggttcggtattggggattttttgagtgaaataaaggttttttgtttttatagagtttacgttttttattagaaag

SEQ ID NO: 2075 - DNA, 2492 bp, Artificial Sequence
  chemically treated genomic DNA (Homo sapiens)
ttttttagtagagaacgtaagttttgtgagggtaaggaatttttgttttatttaaggaatttttagtatcgagttcggtgtttgaatgtagtaggtgtttaattaatatagggaggattggaatgaaaattttttttgaggggttgtagtttatttaataaggatagcggttagggtttaagaagtgtacgggttaagtgtagagggagttttaaggagaaggagatattttttagtttggttttttaaaggaggaatattcgtagggattttgaagaaggtagtcggttaagatgatttggggtagtttaggtggatgtaggagtagtgtgaataagaggtagtaaaacgtagggtggttttcgtatattgtttagtttgttcggagcgtaggttgaggaagggtagggttaatgagatatttgggttatttgtgaatatttcgtttggggagttattgttttgtgagttaaggtttttcgttgggaggtatgagtttagtgtttgtgttttgtagagtattaataaaagaaattttagaattttgtagtttttttataattttgttgtaagaagtttttttttttttatattatttttatattttattttaatagtagttatttttttttgttttgtttttagaggattaagataagttaattattatttttggtaaaaggagattttgaagttttaaaaaggttgttttgtgatattatttttaagtattataagatagtaaaagtggtatattatttgggagaggggtcgacgtggattatagtgtgtgttttgtgaaagtttggtattatttatattttttgattatttgtgtttttatgttttagttgttgttaggaagtatgtgattatatcgaattatttttagttgttaggttgggataaaatagattatatatattttaggatttaggttagggatggtaagtgaaaagtaggtttatagtgttatagaggggtaattaaagtaaggatagatgtggtttttgaagggttgttgaattttttttgtttagaatttttcgattatagggtatatttgagattatttataataaagaatagatagtaagttagatatagtaaaaataaagtcggtttaaatttattttagcgagtgaaggtggttcgcgagagggggtttagatgataggtattgtagttagggtagtaatagagtttataggaggttagttttggttatgaggttatttgttaaggagatttttagtataagaggtcggagggcgttgaaggtttgggttgtggttggtattggggtaggtgtaagagatatttaggagttttaattcgatgtatatagtgtttgttttattttttgtttttttttgtagtttattatttgagagaatttttaataggaagatattgtaggggaaatgttaattataaaggttatagatagtgttgttcgttttttgcggtttgagggaaaaggagtatttggtttgtttttttttttcgatagtgttatatttttttgtttatttttattattggttcgttatttattagttattttttttattaaaattatttttaatttttatttttttttgaaggttattaggagaaagtatatttaatagtggtattaatttttattttaagttttgtatgggtttgatttaaggttgggggtttttaatggatttattaatttagtagttttgttttagtcgttgttttgtgagttaaggttttttattcggaggtatgcgtttagtgtttttcgggaaatttgttttttgtgatgggaggggaggaggaggtagtagtgatttgtagtttttgggagtttatatagtgttttgaggttagaatatatttattaattttatagagtttggttatgtttgtttatatggggagattgtagaaggttgtaggtagaagggtgtttatttggtttttagaattttttaattgtttatttttgtagggagacgggttttttcgtgttttttagttttaacggaatggagttaaagaagtcgtgttgtagatgtttttatttttttataaattatagaaaatttttttgtgttttggtattattggtatgggtttggtttagggtatttggttaggattttttatattattttttaaaaaaggtgttatagtttgagtttttagagagttgcgtgttagaatattgggaatggatgggaatggtttgttgtgggagtagtttgtcggttttagtacgggtaggtggtttaggatagaggttttggtgtttagtagatgtaaattttagtttttacgtagttttttattagttgtgttattttaggttttaggatagaaatgttaaagggtattggtggtatcgtgtagtgggtagttggggagaaggggttgggggtaagtttatagaggaaaaatgtttatttgtttagtagttagagaaatgtatttaaaaatatatttaaggattagtt

SEQ ID NO: 2076 - DNA, 2489 bp, Artificial Sequence
  chemically treated genomic DNA (Homo sapiens)
tttatggttagggatagtgatattagtgtgtttattaagtatttgatttatttgtttaggtaaaattttagaagagatattgggatttgtgtggagagtttttttattgtagttattttgttaagtttattgtaaagtgacgaattttgtggatatttatagagaaaaaatagttttaaatgttatagattaatgttgtacgttgtagagatatagtttttgggttttgtgagttgtatttgggtattacgtagagtttagttgttatttgtttttttgaaggttagttaagaagttggttttagtttgggtatggtattattgttttatattttagttatttgggatattttgggtttaagtatttttttttattgttggattaagtattttttattttttgttttgggaaattagattttagtaggttattaattattttagaaagtttagtagagttggttttggtttgggggtgttttttgagttgggtggaagaagagattttatataattttttaattttttttttaaggttgaattttttataagtaaaattttaaaattttttttaaagaagaaaaatatttagataatttttaaaatttttttttagttttaagattgtgtaattttgtgatattagtattgaaagtttttgtatttttttaattatatatttttttatgttagggaaaggtgtatgtaagtgagagaataaaaaattttataatcgtggggattttttttttcggttttggagtttttttttttttgtttttgtacggggtagttttttttttttgttttttttttttttttttgtttattaaattttttgcgttttagaattaaaaataaaaaataaaaatttaaaattatgattttaggggtgaaagaatattgagaaattatagaaagtaaaaatgaaaagttaatatagaaaaagtttgatttgaattagaagtagtatttaaaattataggtttagaaaaagtttgaatagaatttagggttgaggttagttttgagtttgtaggttttgtttttttataaaggtgagtagatgggtttggagagggttgtttatgttatggaagggtttttatgttatcgaggttaaaattaaagtaggagtaaattagttttgttagtgtgtatagtcggtattaaagaggtaataacggtagagaatattttttgaaagatatatatgaaattagtaacggcgatggtttttggaagaattaggttagaagtagatttaatttgtattgtgtatattttttggtattttttttaattgaacgtatgtgaatgtattatttatttaaaaataaatgtgtaaaaatacgtgttacgataaagtaaaatgaggagatagtataaaaaagataaggataattttaaattttttttaataaaacgttgtttaaaaatttaagaggaaaaaagggtaggttttagttagtggagagaataattgaaaaataagagttacgtgtttttatggttttggttaattttattttttttttatttttattcgtttatatttgttttggagtatttatagtaagtttggttttatgtttagaatatcgtttggttttttttttttttttttgtttatatttttttagttattcgttgtttttttttttgttttttttttagtttttagtttgtttattaaattttaggtggtattttttattttttgttatgagggagtttatttgtttatgtaatttttttatcggagataaaatgtattttttaaagttggtttgtaatgatattttttatgtttgttttgtttatttatgattttgatattttttttatcgagagggtagaatttgtgttttttttttttgaatttaggtgggttatagttttggtagaagtgatattttgtgattttaaggttaggttataaaaagggaatgtagtttttgttagtaattttgggatatatatttggagttcgagttgttgtgtaagttatttgtttgttttgagtttattatattataaggaagtttaagttagtttataggagagacgaggtgaagagaatgagatgttagtttttattgttttagttttttagtgttttagttttagttattatttgattgtaattttatgaaagattgagttagaattacgagtttagttttttttgatgttgatatatagattttatgaaagagaataaattaatttttgttttaagttattatgatttgggatgatttgttatgtagtattggataattgtaatatttgtttttaaatagtagaattttaaacgtttaggttttatttttaatttattttatgtttttgtttttattgattttttgttattgagtttgattaagtttttgagttattaattttagatatttgtttaaataaatttattgtgattgtttatattatttatttttttaaaataatttttgttatagttggttttt

SEQ ID NO: 2077 - DNA, 2489 bp, Artificial Sequence
  chemically treated genomic DNA (Homo sapiens)
gaaggttaattataatagggattgttttggaggaatggatagtgtagatagttatagtgaatttgtttaaataaatatttggaattggtgatttaagggtttggttaagtttagtggtaaaaaattagtgagaataggaatatgaagtaagttagagatggggtttagacgtttgggattttattgtttagaagtaggtgttgtagttatttagtgttgtataataaattattttaaattatagtggtttaaagtaaaaattagtttatttttttttatgaagtttgtatgttaatattaggaagggttgggttcgtggttttggtttagttttttatggggttgtagttagatagtggttggggttgggatattagagagttggagtagtggagattggtattttattttttttatttcgttttttttgtgggttagtttgggtttttttatagtgtggtgggtttagagtaggtagatggtttatatagtagttcgggttttaagtgtgtgttttaggattgttggtagaagttgtattttttttttgtgatttagttttaaggttatagagtgttatttttattagagttgtagtttatttagatttagagagaggaaatataggttttgttttttcgatggaaggagtgttaaagttatgggtaagtagagtaggtatgggagatgttattgtaagttaattttgggaaatatattttgttttcggtggggaaattgtatgaataaatgaatttttttatagtagagaatggagagtattatttgagatttgatgggtaaattgagaattgggagagaagtaagagaggaggtagcgagtgattgaggagatgtgggtagggagagaggaggaaagttaggcgatgttttgggtatgaagttaggtttgttgtgggtgttttaaggtagatgtgaacgagtgaggatgggaaagaagtggggttggttaggattatgggaatacgtggtttttgttttttagttgttttttttattagttggagtttatttttttttttttttagatttttaaatagcgttttattaggagaaatttaaaattatttttgttttttttatattgtttttttattttgttttgtcgtggtacgtgtttttatatatttatttttgaataggtaatgtatttatatgcgtttaattaaaaaggatattaaagaatgtatatagtgtaaattaagtttgtttttgatttaatttttttagagattatcgtcgttattggttttatgtgtgttttttagaaaatattttttatcgttgttgtttttttgatgtcgattgtatatattagtagggttgatttgtttttgttttggttttagtttcgatggtatagaggtttttttatagtatgaatagttttttttagatttatttatttatttttgtgagagggtagagtttgtagatttagggttgattttagttttggattttgtttaagttttttttgaatttgtaattttaagtgttgtttttaatttaagttagattttttttatgttggttttttatttttgttttttatggttttttagtgtttttttatttttaagattatgattttgaatttttattttttatttttggttttaaggcgtagagagtttagtagataagaaggaagggagaagatagaaggaaaaagttgtttcgtatagagatagagggaagggggttttaaagtcgaaagaagaggtttttacgattgtgaaattttttgtttttttatttatatgtatttttttttggtataggggaatatatagttagggaaatgtaggggtttttaatattggtattatagaattatatagttttggagttgaaaggggattttaaggattgtttgggtgttttttttttttaaaaaaaattttaaaattttgtttatagggaatttagttttagagaaaaagttaaaagattatataaggtttttttttttatttaatttaaaaaatatttttaaattaaaattaattttgttggattttttgggatggttgatgatttattgagatttgattttttagagtaggaggtgggaagtgtttgatttagtaatgggagggaatgtttgaatttaggatattttaaatggttggaatgtaggatagtggtattatgtttaggttgggattaattttttagttggtttttaaagggatagatggtagttgaattttgcgtaatgtttaaatatagtttatagaatttaaagattgtgtttttgtagcgtgtagtattggtttatagtatttgaagttattttttttttgtaagtgtttataaaattcgttattttataatgagtttggtaggatagttgtagtgaagaaattttttatataggttttagtgttttttttggaattttgtttgagtaagtaaattaaatatttggtaaatatattgatgttattgtttttagttatggg

SEQ ID NO: 2078 - DNA, 2417 bp, Artificial Sequence
  chemically treated genomic DNA (Homo sapiens)
gttgtttaggttggagtgtaatggtacgatttcggtttattgtaattttcgttcgtatcgaggtttaagcgatttttttgttttagtttttttagtagttgggattatagttattcgttattatgtttagttaatttttttgtgtatttttagtagagagggggttttattatgttggttaggttggttttaaatttttgattttaggtgatttatttgttttagttttttaaaatgttgggattataggcgtgagttatcgcggttaattaggaatgaatatttttaaggtttttgatatatattgttaaatattttttaagattgtgttggtttattttttttttttagaattttgggtgtgggagtttagaggttgttggttcgtttttagtaggtaaagatgttatttattttttaggaaggaagtgtagtagtttttgagcgttataggtttcgtttttgtgggtgttggagtgcgtttggtgttgtttttttttaggtttagatattatttgtcggtggtggacgtttgtaattattgtggttattagttggttttagggagacgatgtagttgtgcgtttttattttattaaagtggaacgtatttttaaggttttggaagtgatagagtgcgtaattttttttggttatttatttgtttttttttaggggaattttgtttgagttagtaggagtaaattggattgggtgggcgtgttggggtgaagggttaggattgtatgataggtgggcggttagaaaagtcgggggtgagggtattatggagaatttaagttgggttagtaggttttttgtgtaagtgttttgttttgtataatacgatagttgttttagtagttgttagtattgtgttcgggtttttttttttgtagtttttatggcgttataggttgaaaagaagagacgagagtagtgtggtttttagtatttttagaagttttgtggtggaggtaggtattggtggtttataattagtgtagagaggttattgttgtttttaaaatttatgtgtattggagtattttgtttttgtgtgttagtattttatttattttttttttagttatttttatttttattattaattttggtaattttgttttgtaattaaaatagtttttagtatatggtataatcggagagtttttgatatttttttttggagatttatgtttgcgttttgggggtattcggtattagtgatgggtagttttgtttgttgatttttcggttgtttttaattggatttgagtattttaagagaaattgtaaaatgttttaagatagaaaggttttacgaggttttatttttagagttaaggttgtagtattttttattaagtagatttttaatcggcgtataggaaggagttgagaagagtgagtatatataggtttgaagttttttgttttttgaagtagatgtgatattttaattttattgaagtagttttatttgtaagtattttgattaggtaagtatttagttcggtatagtattttatttgtatgtgtgttttttttagtcgatgtgtttgaggatattgagatttagtaggtaagttgtttaaagttatttcgttttagagtagtagagtttttatggatagttaagatatttttgtaggtattgttgtttgttggatttatttatttttgggtttttttgttttttagggattaggatgttatgagaatttttttttatttttagtttttttttttatttttagttttttttatagaaagaagttaattaagtatttttagagagtttaatattatatttttgggggggtggttttttaaagaacgggtataatattttattgtggttattttataggtaaggaaattgaggtatacgttggaatgattattttgggtggttttttagtagtagacgtgatggtgaagtttgtgtttttgatttttagtattgaatgaaggtgttaaagggtggggcgttaattttagtttagggttggtattttagatttggagttggtggtatggtgttatagtggtagtattggagttaatagatgtatatgttatattagtgtggggcgtggtagttattggtttgggtttttttgtttgttacgtaggtgatatatagtgatttgtttttcgattttttgttattgttgtaggagttttttggtgaaggttattttttatgtttgtagagttatgtatgttttattttttgggaaagtagatgggtagtagagttttttttgttattgcgagagggttagtggttatttatggagtagttttaacgttagtggggttatttttgattttgtttttaattacgtgagtgggagttgagttggtttttgggggaggtgttttgtattggtttacgagaatatttttat

SEQ ID NO: 2079 - DNA, 2417 bp, Artificial Sequence
  chemically treated genomic DNA (Homo sapiens)
gtgggagtgttttcgtaaattagtgtagagtattttttttaggggttaatttagtttttatttacgtggttgagggtagggttagaggtggttttattgacgttgaggttgttttataggtggttattggttttttcgtaatggtagaaggaattttgttgtttatttgtttttttagggagtgaggtatgtatggttttgtaggtatggaagatggtttttattagggggtttttgtagtagtgatagggagtcgagaggtaggttattatgtgttatttgcgtgataggtagaggggtttaagttagtgattgttacgttttatattgatatgatatgtgtatttgttgattttaatgttgttattatggtattatgttattagttttagatttgaaatgttagttttgagttagggttagcgttttattttttagtatttttatttaatgttggaagttagagatataggttttattattacgtttgttgttaagaagttatttaagatagttattttaacgtgtgttttagtttttttatttataaagtggttataataaggtgttgtattcgttttttaagggattatttttttagagatgtggtattaaattttttggagatatttagttagtttttttttgtagaggagattgggagtggaaggggaggttagggatgggggagggtttttatagtattttagtttttgaaaagtagagggatttaggggtaagtgaatttagtaggtagtagtgtttgtaggggtgttttggttgtttatggaagttttgttgttttggagcgaggtgattttggataatttatttgttgagttttagtgtttttaggtatatcgattgggggagatatatatataggtggaatgttatatcgggttgggtgtttatttagttagagtgtttataaatggggttattttaatgaaattagggtgttatatttattttagggaataaaggattttaagtttgtgtatatttattttttttagtttttttttgtgcgtcggttaagggtttgtttgataggaaatgttatagttttggttttaaggataggatttcgtggggtttttttgttttggagtattttatagttttttttagaatatttagatttaattagaaatagtcggggagttagtaggtagggttgtttattattagtgtcgaatgtttttaagacgtagatatgaatttttaaagaggaatgttaaaagtttttcggttatgttatgtgttaaaggttattttagttataggataaagttgttagggttgatggtgggggtggaggtggttggaaggaaagtggataaaatgttagtatataggggtaagatgttttagtgtatatgagttttgggggtaatagtggtttttttgtattgattgtgaattattagtgtttgtttttattataaagtttttgaagatgttgggggttatattgttttcgttttttttttttagtttgtggcgttatgaaggttgtagggaggaggattcggatatagtgttgatagttgttgggataattgtcgtgttgtgtagagtaggatatttgtatagaggatttgttggtttaatttgagttttttatggtgtttttattttcgatttttttagtcgtttatttgttatgtagttttgattttttattttaatacgtttatttagtttagtttgtttttgttaatttaaataagatttttttggagagaagtaagtgagtggttaaggagggttacgtattttgttatttttagggttttggggatgcgttttattttggtaaaatgagagcgtatagttgtatcgtttttttggagttagttgatggttatagtgattgtagacgtttattatcgatagatgatgtttggatttagaggagaatagtattaaacgtattttagtatttatagaaacgagatttgtggcgtttagaggttgttatattttttttttaggagatgggtaatatttttgtttgttgggaacgggttagtagtttttgggtttttatatttaggattttgggggaggggaatagattagtataattttggaaagtgtttggtaatatatattaagagttttaaaaatgtttatttttggttggtcgcggtggtttacgtttgtaattttagtattttgggaggttgaggtaggtggattatttgaggttaggagtttgagattagtttggttaatatggtgaaattttttttttattaaaaatatataaaaaaattagttgggtatggtggcgggtgattgtaattttagttattagggaggttgaggtaagagaatcgtttgaatttcggtgcgggcggaggttgtagtgagtcgagatcgtgttattgtattttagtttgggtaat

SEQ ID NO: 2080 - DNA, 2844 bp, Artificial Sequence
  chemically treated genomic DNA (Homo sapiens)
ttgtattagagaaaagttagagtagtggagaattgtagaggaatgtggggtatttatataaatgttttgaatgaatgagtgtatagagtgatagataaaaagaattagagggttgggttttgtggtttatgtttgtaattttagtattttgggaggttgagttgggtggattataaggttaagagattgagattattttggataatatggtgaaattttgtttttattaaatatataaaaattagttaggagtggtggtgtttgtttgtagttttagttatttaggaggttgaggtaggagaattgtttgaatttgggagatggaggttgtagtgagttgagattgtgttattgtattttagtttggtgatagagtaagattttgttttaaaaaaaaaaaaaaaaaaaaaaaaaagagagttagggttttttttgaagtgaagagggtaaagggtaaaggggaagtataggggaattttgtggtgttttttgaagtttttttttgaatataattgtaatgaaaaggttaatgattagaggttttgtgaggttgaggttgggttttgggaggggattgttttgagaggtttgggaggatttgttgtggaatttaagtgattgtgggttttgagggaattggggggtaagatatttatttagtatttgtggaatatttttttgaattattttggggaggggtgaggttggggtagggtggggttttttttggagggggtgtggtttttgagtaattaattttgtttttgttgtgttttgttttttttttgtttatttagtagggttagtttagggtgtgttaagagtttagagagtttgtttttatggtgatgggttttgtgaaggtttttttggggtgaagaggtagggtgttgaataattgttatggtgatagtagtagatgatggtgttttttttgagtgtttttatttagagttaagggatatttgagggtaagtaattgagtgatgaaataaagaaggtggggtttgaggatagaatgttaaggttaggggaatggagttaggtaaatgaggggtggggttgtagatgatttggttgggagagggttatggtttgttgggggagtggtttgagattgtgttttagagaggaattagagagagggtttttaatttaaatataaatgaatgattggatttttgaagaatttggaatggtttgttgattggatagatggatggatggatggatggatggatggattgatggatggaaatttggttattattgatgtttgagttttttatttttttgggttttttatttttggagtttttatttgtttgtgatagttgtatgagaaatatatgttttttttaggagtaaatttttaatttaaataggtagtatagagttagtttagtattttatattggaggtatttagggtggagtttaggttgatgagatggtgtaggatgaggttttttggtttagttgggaattatttttttttagattttttgtttagagtttaattttttttttttttagtgttattttttttgttagtttgtttagttttttagggtgtttggatttttaggttttattttgtgtttagtatagtagggtttagtgttttagtaattgggaaggtttgtatttttgttgattattttttggaattgttggaattttgttatatagggtgaggagtggataggggtttgtttttatttttgggtggggattagttttgaaaataaatatagttgttttgaattttattgtatagggagtaatttgaagtaggttgaggtttttggatgggggggtttagaatttatatgttgagtttatttttttttttttatttaattttaggtatttaagggttttttaggttatttattgttgtttataattatatgtagtaagatgggggaaagtggtagtaggggtagtttagtagagtttttaatggttatgtttagggaggggtgttttttgtttttagggtatgggaggtgagattgggtatttttatttgttttttttttttttttttgagatagagttttattttgttatttaagttggagtttggtggtatgattatagtttattgtagttttaatttattgtgatttttagttaagtgatttttttattttagtttttagagtagtttggaatatgggtgtatgttattatgtttgggtaatttttaaattttttgtattgatggagtttttttatgttgttttgtttagttttgaatttttaggtttaagtgatttttttgttttagttttttaaagtgttgggattatagatgtgagttattatgtttagtttttttttgtatttaaggagttttttttagttgaataaaaatttagtttttaggggattaatttttttgttggatttgggaggatgggatttagaattgtgtagttggttttagagttttatgttttatattttttattgtttgtttttttggaatgggatagaggagagggtattagtattagttatttatttgtttgttaatggtggagtattatggagttgtggttatttgttttttttaattttaaattttaggtattatattatttgattaagttttagatttttatttttagtggagatttagtatatttttttttaaggagttgtagtgttaatgggggtatatatagtttttgttttggggttttaagaagagttttatgtattgggtttggagaagatatagaaatttagttagagattttatttaggatattagaatattgttgtttatgttaagtattttgtttaaaagaatggagttggttgggtgtggtgg

SEQ ID NO: 2081 - DNA, 2844 bp, Artificial Sequence
  chemically treated genomic DNA (Homo sapiens)
ttattgtgtttggttaattttatttttttgagtaagatatttaatgtgggtgataatgttttaatgttttagatggagtttttggttaaatttttgtgttttttttaaatttagtgtatgaagttttttttgaaattttagggtagaggttgtgtgtgtttttattagtgttgtaattttttaagggaagatatattgagtttttattggaagtggagatttgagatttaattaggtgatgtgatgtttgaaatttggagttagaagaggtaggtgattatagttttataatgttttattgttagtaaataggtggatagttgatattggtgtttttttttttattttattttaggggggtaaatgatgggaagtgtggaatatgaagttttggagttagttgtatagttttgaattttatttttttagatttaatagaagagttaattttttgaaaattaaatttttgtttagttaagggaagttttttaaatgtaaagaggagttgggtatggtggtttatatttgtaattttagtattttgggaggttggggtaggaggattatttgagtttagaagtttaagattggatagggtaatatagggagattttattagtataaaaaatttaaaaattatttaggtatggtggtatgtatttgtgttttaagttattttggaggttgaggtaagaggattgtttggttgaggattatggtaggttgaggttgtagtgagttgtgattgtgttattggattttagtttgggtgatagagtgagattttgttttaaaaaaaaaaaaaaaaagtaaataggggtgtttagttttattttttatattttggggataaaggatatttttttttggatatggttattagggattttgttgaattgtttttattgttatttttttttattttattgtatgtaattgtagataatagtggatgatttgaggggtttttagatatttgaaattgggtagggaaagaaaggtaggtttaatatgtgaattttgaatttttttatttaggggttttagtttattttagattattttttatgtaataaggtttagagtagttgtgtttgtttttagaattaatttttatttaggggtggaagtaggtttttgtttattttttattttatatagtaaagttttagtagttttaggggatgattagtagagatgtagatttttttagttgttggggtgttggattttgttatattggatataaggtgaggtttgaaagtttaggtattttgaggagttgggtaaattagtagaaaagatggtgttgggagaaaggaaagttagattttggatgggaaatttggaaagaagtggtttttagttgggttaaaaagttttattttatgttgttttattgatttgggttttattttgagtgtttttagtgtgaggtgttggattggttttgtgttgtttgtttgggttgagggtttgtttttaggagaggtatgtattttttgtatagttgttataagtgagtgagggttttggaggtggagggtttaagagggtggggagtttaggtgttagtgatagttagatttttatttattggtttgtttgtttgtttatttatttatttatttatttaattaataagttattttggattttttaggaatttagttatttatttatatttaggttaaagattttttttttggtttttttttagaatgtaattttgagttgtttttttaataaattgtggtttttttttgattgggttatttatagttttgttttttgtttgtttggttttatttttttaattttggtgttttgtttttaggttttgttttttttgttttgttatttggttgtttatttttaggtattttttaattttaggtaggagtatttagaagggatattgttatttgttgttgttgttatggtgattatttaatgttttgtttttttattttaggaaaatttttgtggaatttgttattatggaaatgaattttttggatttttagtgtgttttgggttggttttgttgggtggataggagaggagtaaaatgtaataaagatgggattaattatttggaggttgtgttttttttgaagaaggttttattttgttttggttttatttttttttgaaataatttgaggaaatattttgtgaatgttgggtgggtgttttgttttttggtttttttaaggtttatggttgtttgaattttatagtaagtttttttggattttttagggtaatttttttttgaagtttagttttagttttgtaaagtttttagttgttggtttttttgttgtgattatatttgagagggagttttagagggtgttgtgaagtttttttgtgttttttttttgttttttgttttttttgttttaagaggagttttggtttttttttttttttttttttttttttttttgagatggagttttgttttgttgttaagttggagtgtagtggtgtgattttggtttattgtaatttttgttttttgggtttaagtgatttttttgttttagttttttgagtagttgggattataggtaggtgttattatttttggttaatttttgtatgtttagtagagatggggttttattatattgtttaggatggttttgattttttaattttgtgatttgtttagtttggttttttaaagtgttgggattataggtgtgagttatggagtttggttttttgattttttttgtttattattttgtgtatttatttatttaagatatttatgtaggtgttttgtgtttttttgtagttttttattattttggtttttttttaatataa

SEQ ID NO: 2082 - DNA, 2457 bp, Artificial Sequence
  chemically treated genomic DNA (Homo sapiens)
tgttattataattttttataaaataggagtttttgttgttgttgtttttgagatagggtttggttggttttgttgtttaggttggagtgtaatggtttgattatagtttattgtaattttgattttttgagtttaagtgattttttttttttagttttttaagtagttgggattataggtgtatttgaaaagttaagtaggttaaagtatttgtgtaaatggtttgagtatatattttaagtgagaattatttgaagattttgagtttgtttgtgaggatttttaaagggatttgggtagttggtggttttgtttttttttttattggagttttttagtttttttgttttttttatgtttaatttttttttggtttttttttaattggttttatgttgttgatttgtttgtagtttttttttattatattttaattatggttgtgtttttgtagttgttattgttgttgtttttgagggtttaagggaattttgggggtaagtgatttttgggagagttgtgatagatgtagaggggttgaagtaagataagggttgtttagtagggtgggttgtgtgtgggaagatttaggatggttggagtgtagaatagagaagagaaagaggagatgggatggagggttgttttgttttgtggatgtgttttaattatagtttttggttttttttagtttttttggatggttgttttggggattgggtgaattttttttgtggaggagttttttattttatttgttgggtttgggtatttagttttttggtttgtaagggtttgtttaaaggatgttgattgattttgtgggtttttttgagtgggatttttattgtgttttttttttagttttttgttggttgtttatgttttttggattttggtatttggtggttggagttttttttgagtgtgggagatttgggtatttttttttgtaagggttgttatgaggatgagagttgtatagtgttttatgtgttgggggataggatttattgtaaggtttttgggtttatttatggtaggtgtaggtttgtgtgtataagggtatttaattttgatatatatttggaggagggaagagggttttggttgggggtttttgagtgggattgttggttgttttttgttaaatttttgattttagtatttttttttgttatgttttttttttagggtttgtgtatttttagtttttgattttgttgttgggtgttgggttggtgtttggattgggagttttgggtttggtttggtggttgtataggtgagtaggagggatttggttttgttaaatggggagtgattagaggtggaaggggtaggattagaatttttgtaaaagaaagagttagatttagagttttggttttggtttggtgaagaatgggagaggttaaaggtgggagtgaggttgttggttggtgagtagagttttattagagtagatgagttggaagtgtagtagagttagagtttgggttggattgttggtggggtagagtttaagttgtttttggtttgagtttttaagttgttgggttgtttttggtgtggtgagttttaggagaattagtgagataagattggtggtttttaaagatttatatgttttttataggtgtttgtttttgtaattgatttgattattttttagatttggtgagattaattttattttatttttttttttttatatgtttattttttattttttaatttttgagtttgagtttttgttgggagtagatatgttggttattttttttttattttttagttttgttttttttatatagttttatttgtgaaaattgagttttagaggttagtaaaggaggaagagtttaagattttaggggatttggattaggaattggtaagggtatggggatgggaaggggatagttagaatttttgaggaaaatggattaaaaaaaaaaaggtttgaattttaaggaagattgtggagattattttgtttttttttttttttttttttagagtttgttttatgtggatttggattatttagtttttagtaggttttgttggttgtttatagtggattttgttgatgtttttattatttatgtagttgtagtttgaagggaagtttttattttaaattttttaagttaggggattttagttttttataattttttttttttttttggttttttatttggaagaggaaggtattatggtatagaaataagtgttagattgggagttgggagatttgggttttaggttgtttttgttattggttttatttttaaatttatttttattttttttataatttttatgttttttttattattagtgttttttttatatttaattaagttttagttttttttttttttttttttgagatggagttttgttttgttgtttaggttggagtgtagtgatattattttttttatt

SEQ ID NO: 2083 - DNA, 2457 bp, Artificial Sequence
  chemically treated genomic DNA (Homo sapiens)
agtgagggagatggtgttattgtattttagtttgggtaatagagtgagattttgttttaaaaaaaaaaaaaaaaggagttagggtttgattgggtatagagaggatattggtggtgagggagatatggaggttataggagagatgggagtaagtttagaagtaagattagtggtagagatagtttggaatttaggttttttaatttttagtttagtatttatttttatattatggtgttttttttttttaggtgaggaattaaggaggggagagggattatggggagttgggattttttagtttgggaggtttggagtaagggtttttttttaaattataattgtatagatggtggaggtattagtagggtttgttgtggatagttggtggggtttgttgagggttagatggtttagatttgtatagagtaggttttggaggaggaaggggaggaagataagatggtttttatagttttttttggggtttaggtttttttttttttggtttattttttttagagattttggttattttttttttatttttatgtttttattggtttttggtttaggttttttggaattttgggtttttttttttttattggtttttggggtttggtttttataagtggagttatgtgggggggatagagttgaaggatggagagaaggtgattaatgtgtttgtttttagtaagggtttagatttaggaattgaggggtggggagtgggtatgtaggagaaagaaaatggggtggaattagttttattaaatttagggagtggttgaattggttgtgggggtaggtgtttgtaagggatatatgagtttttgagaattattagttttgttttattggtttttttgggatttgttatgttaaggatagtttagtaatttgaaggtttagattggaaataatttagattttattttattgatagtttagtttaggttttaattttgttgtatttttagtttatttgttttggtggggttttatttattagttagtggttttgtttttatttttgattttttttattttttgttaagttaggattagagttttaggtttagtttttttttttgtgaaggttttggttttgttttttttatttttggttattttttatttaatgaggttgggttttttttgtttatttgtgtagttattagattaggtttaaagtttttagtttgagtattaatttagtgtttagtagtgggattaggagttggggatatatggattttgggggaaaggtgtggtggggagggatgttgaggttaggggtttgatgagggatagttagtagttttgtttaagaatttttagttaaggttttttttttttttttgggtatgtgttggagttaagtatttttgtgtgtataggtttgtatttattatgggtaggtttgggggttttgtaataggttttgttttttagtatgtgaagtattgtatggtttttgtttttgtggtggtttttgtagaaaaaagtgtttgagttttttgtgtttaagaggagttttagttgttggatattagagtttagggagtgtaggtggttgatgaaaggttggaggggaggtatggtgggggttttgtttgaagaggtttataggattggttggtgttttttggataggtttttgtaggttgggaagttgggtgtttagatttagtggatgggatgagagatttttttgtaggagagatttatttggtttttagggtggttgtttagagaagttaggagaggttggaggttgtggttagggtatgtttatagggtaagatgattttttattttgtttttttttttttttttttgttttgtattttagttattttggatttttttatatataatttattttattaggtggtttttattttgttttagtttttttgtgtttattataatttttttagggattgtttatttttagggtttttttgggtttttgagagtagtagtggtagtagttgtagaaatatagttatggttaggatgtggtgaggagaagttgtgagtgaattagtggtgtggggttggttggggggggattggagggaagttaggtgtggggagaatggaggggttggggggttttgataagagagggggtggggttattagttgtttagatttttttgggaatttttgtaggtaaatttggagtttttaaatggtttttatttaaaatgtgtgtttgggttatttatataaatgttttggtttgtttaattttttaggtgtgtttgtaattttagttatttaggaggttgaggagggaggattgtttgagtttaggaggttgaggttgtagtgaattgtgattaggttattgtattttagtttgggtgatagagttagttagattttgttttaaaaataataataataaaaatttttgttttgtaggggattgtgataatg

SEQ ID NO: 2084 - DNA, 2898 bp, Artificial Sequence
  chemically treated genomic DNA (Homo sapiens)
tatttagtgtttttatttaagtaggagagtatagttttttaggttggttattttatttgttagatgatgatgatgatattgttttttttttagggtttttgggagaattaagtgagattaattatgtttatttaaggttttttagtttttggtttttatgattggttttttttgtgtttgtgtagtttattttattgtttttttttggtggaatttaggaggtaggggataaataagattggttttttagggttagtttagtaggtttgaaagtaagtggtgggaggtttagggttttttgattatatgtggattttaagtttagttttaggtatgtaggtttttatattttgggtagttgggtggggtatgaagggtttggttgggagataggatgtttggttttaggttagtttttgttttttatttgttgtgtgattttgggttgtgtttagtttttagttgttttttatgtgtaaggggagggttttttatggtttttgtttaaagtgtttgggttttatgttttttagtggattttttagggttgggtatagagtttagtttttagattaggattggtttttgttttgttttgttttttttttagatagggttttttttttgttgtttaggtttaagtgtagtggtatgattttggtttattgtagttttgattttttaggtttaagtaatttgtttattttagttttttgagtagttgggattttaagtgtgtgttattatggttagttaatttttgtatttttgttgtagagatgggattttattatgttggttggttttaaatttttgggtttaagtgatttatttattttggttttttaaatttttgggattataggtgtgagttattgagttaggttgttttgttttttaaggttagtgggagtggagaaggaataaagaaatttgtaattggttatgattaattagttgttaatattattgtatttggattagtttagattagggttttgatggaggaaggggatggtgtgggaaatgtttatttaggttatatattttggttttatttgttttttggattttgagtggtattttgataggatagtttgaggtagtatggtgtttttgtagatgttgggtttgttgttgggttttaatttgtttggtttgtagtttgtttagtttttgtgtagggtttattagtttttgaagttgtaggtggatggagtagtgattagaagttagagttatagtgtaattttggggggtgggagtttttagggttagaatagttattatatttgtgttggttagggtttgtatgtagtttgatattgttgatgttagggtgtttgtggttttatttgttatttttaggaaatttgttagggagggagaaaggtgaggtttagttttatggagataggaaattaagtagttattgttggatattgggttttagagtaggttgaggggatagtgggatggggtggatatgggggtttgaggtttatagttaggttggatttgggtgaggttgtagttggtttgtagggagtgtatggtttgtgtgatgtttagtgttagtttaagggtggtttttgttttggggtttttttaggagtattgtggggtggaggagggggtgagggggtttggagggtaggttagatttttttttttaggttatgttatatttttgagggttttgggtagggggtaatatagaggttagggggagtttgtggtattttttggggtagtttttggaatagtttttttgttatgaagggtatgaagggtgagagtagttgtaggttaatgtttaggtaagtgtatagggtttggtgggtatatttagttgttatttggtttattttatttagtataggttttaggtatttttaggggatgagaggtatagggtttatggttggaggtttagttttgagtttttgttgtgtttgtgaggattgggaaggggatgggttggtttaggttttaaggttaattttggtaaaattgagtttagggttttgttgtttatttgtttttattattttttgttttgttgtgtttttttttattaagtagatattatagagtttatagagttagaagttgtattgggtagtggtgatggttgggaagttgtaggtttggaagttttgattgttgagttttatagtttttgttaggtggttgtggatttagtggtttattaggtttttatggtttttgggtttggggagagagggtgtattagttggtgggttaggggagggtgttagaattttatgggggtaggagttatgggtaaatttttatttagagtttgatgagtttaaagtaattatttatgtgttaggatttgggaagaagtgataggttttagtttttaatgtgttgggttttttttttaattgtttgtttttgtgtttatttgtttttttagttatatggaggttgttttggataggggtatagtttgtgtgagtgttgttagttttgttgtttattaggtttttatttgggaggtgggtgagggtataaaattttttttaaggttatgaagggtaaatttggtggtattttagagtttgttgtagaagtggtggtaatttagtatttggtttatatttaggttgatgttatgatttgggttgggggtgagatgtgagtttttattattttttttttagtttatgtttattagaggtttagggtggagaagagggatgggttttatagaaggaggaaggagtggttgggagggatgttttgggggttatattttgggatatgtaggtatataatttaaattggagagtattggtgttatatttaggaatttttgttgggaagttagttttttatagggaagaggtagggggaggagtgttttta

SEQ ID NO: 2085 - DNA, 2898 bp, Artificial Sequence
  chemically treated genomic DNA (Homo sapiens)
tgaggatgtttttttttttgttttttttttgtagaaagttgattttttagtggggatttttgaatgtggtattgatgttttttggtttggattatgtgtttatatgttttagggtatggtttttaaagtgttttttttagttatttttttttttttttgtgaggtttattttttttttttattttgagtttttggtgggtatgggttgggaagagggtgatgaggatttatattttatttttgatttaggttgtgatattaatttggatgtgaattggatattgggttattgttatttttgtaataagttttggaatgttattaagtttgttttttgtggttttgggaagggttttgtgtttttatttattttttaggtaagggtttggtgggtagtaaagttggtagtatttatataggttgtatttttgtttggagtagtttttatgtagttggggggatagatagatatagagatagatagttaaagggaaagtttagtgtattgggggttggggtttgttatttttttttagattttggtatataggtggttgttttggatttattagattttggatgaagatttgtttatgatttttgtttttatggggttttggtatttttttttggtttgttggttgatatattttttttttttaagtttggaggttatgagagtttggtggattgttggatttgtagttgtttgatagaggttgtgaggtttagtaattaaggtttttaggtttatgattttttggttgttattattgtttagtatagtttttggttttatgagttttgtgatgtttatttggtgagaaggagtatagtggggtaggggatggtgggggtaggtgggtagtagagttttgggtttagttttgttagagttggttttgagatttaagttaatttattttttttttagtttttataggtatagtgagggtttaaggttagatttttagttgtgagttttgtattttttgttttttaggagtgtttgaaatttgtattgaatggggtggattaggtggtagttgagtgtgtttgttagattttgtatatttgtttggatgttggtttgtggttgtttttattttttatgttttttgtgatggaggagttgttttagaggttgttttggaggatgttgtaagttttttttagtttttgtgttattttttatttggagtttttagaggtatggtatggtttggagaggggagtttgatttgttttttaggtttttttatttttttttttattttatagtgtttttggaaggattttgaggtagaagttgtttttgagttggtgttaagtattatgtgagttgtgtgttttttgtgggttgattataattttatttggatttggtttgattgtgagttttaggtttttatgtttgttttattttattgtttttttagtttattttgggatttagtgtttggtagtgattgtttggttttttgtttttatggagttaggttttatttttttttttttttggtaggttttttggaagtggtggatgaggttatgggtgttttggtattggtggtgttgggttatgtgtaggttttggttagtgtaggtgtggtggttgttttggttttgggggtttttgttttttagggttgtgttgtggttttggtttttgattgttgttttatttatttgtagttttaggggttggtggattttgtatgggagttgggtaagttgtaagttaagtgagttgaggtttagtggtaggtttagtgtttgtgggaatgttgtgttgttttgggttattttgttaaggtgttgtttgaagtttaggaggtagatgaagttaaggtgtgtggtttgggtgggtattttttatattattttttttttttattaaaattttggtttgggttggtttgagtgtagtggtgttgataattaattgattgtaattagttatagatttttttgttttttttttatttttattagttttaaaaaataaaatagtttggtttagtggtttatatttgtaattttagaaatttgggaggttaaggtgggtggattatttgagtttaggggtttgagattagttaatatggtgaaattttatttttataataaaaatataaaaattagttggttatagtggtatatatttggggttttagttatttggggggttgaggtgggtggattgtttgagtttgggaggttaagattgtagtgagttgagattatgttattgtatttgagtttgggtaatagagagaagattttgtttggaaaaaaaataaaataaaataaaaattaattttggtttggaagttggattttgtatttaattttggggaatttattggggagtatggagtttaggtgttttgagtagggattatagaaggttttttttttatatatggggagtagttgggggttgggtataatttagggttatataataggtgggagatggaggttgatttagaattaggtattttattttttagttagattttttgtattttatttagttgtttaaaatgtggaaatttgtatgtttggggttgggtttggggtttatatgtagttggggagttttgggttttttattatttatttttaagtttattgggttgattttggaaggttagttttgtttgttttttgttttttgggttttgttagagagaagtagtggagtaaattgtatagatatagagaaaattagttatggaggttaagagttagagagttttgagtggatgtggttaattttatttggtttttttaagagttttgggaggggggtaatattattattattatttgataaatgaagtgattggtttgggagattgtgtttttttgtttaggtggggatattgaatg

SEQ ID NO: 2086 - DNA, 3108 bp, Artificial Sequence
  chemically treated genomic DNA (Homo sapiens)
tagatatatatttgttagatattgtttatggtattttttaggaagaatagtatgtgggaaaggttgttaaaattgtttatgtaaaaattatattaatgttgttttttttggtgttgtttatgtagttggtagttatttttttttttatattatggttttttttagattttttatgaaggataagatttttaaaaagaggattaataagtttatgaggtattaattagattgaaatgttaaaattaagtataattggtggaaatttagaggttttaatagtagggtttgtagaaggtttaagggttagattttgatgtttaatattgtttatgggagtaataataataataaaaaaaatatgttgtttagtggtttttagaagtttttggtttatagttttaaggagttgaaagtgttgttgatgtgtaataaattttattgtgttgagattgtttataaaattttttttagaattgtaaagttattatggaaagagttatttagttggttattagagttattaattttagtattagggtgtatagttaagaaaatgagtagaaagtttatgtttatgttttgtgtgtaaataaaattataaaaattgttaaaaaaaattatattaatgtttttaaatttaaaggattttatttttataggtttttggttgttgtggtgatttttattgtgtaaaatattttttatattttttgatattaagtttttttgtagttatgtttgaaaattaatttttaggttatagagttttttttatattaaagttgaagaaagttttaagaaatatatttttatattttttatatgtaaaataataggagtaagttgaggaatttttaagaaattggttgagaagagagagtgtttagttatggaaaagagaaagaaggaagggagggttttttggaggaggtggtatttgaattaggattgatattaggatggaaatgttagttagggagttaagtagggggagtagttttgttttttatgtttttagttttttttgtttttgtttttttttttagtgattttatgtgaaatgtttttgttttttttagttattagtagaagggattgttttttttttagtgtttgtttttttttagtgattatttagtgtttttgagtttattttttttagtaaattttttttttgtgtggtgagaaaataggtttggagaggttttgtgatttgtttaggattatagaatttggtattaggaaaatttttattttaaaatttagttttgggtgggaagatttgggaagaattgttaatattgagagagagagggagaaagaggattagatgagagtggtgtttttgtttatgtttgttttttttttgtagagaattattttttttagggatggtaggaatgttatgtgtttaatgggatatagtgttttttggagagatatatttataattgggaggagtttgtgtgttttgatagtgatgtgggggagttttgggtggtgatggagttggggtggtttgttgtggagtattggaatagttagaaggatattttggaggagaagtgggtagtgttggataggatgtgtagatataattatgagttgggtgggtttatgattttgtagtgttgaggtgagtgagggttttgggttggtggttttagggtagttttgtgggtttgtgtttagggtgtaggagtagttgggttggtttaagggattttagtgttgggtggaaaggggattttgggttggggatttatggggggagtttatttggagtttgttaggggagtgagtgtggggatttggattgggttgagtatggagtgaggaggatgagagtagagagatttttgggattttattaggtttggtagttgattgtatgtggggtgaaaaaaggaagttataggatagtgtataagggtatggtgtggagatggaggtggagatggtatagtaggttatatagagaagaaatttatagggaggtagttgggtttgaggtgtttgaggggtagatgggtggtttgatgggtaggtagatagaagggtttgtagttggggaggagattgagatatatgagattatttagggagaggggatttagggggaagagtaaaggattggattttgggaattggatagttgtgatttggttaagatagaaaagtttgtgaaagagattaaaaaaatttaagtgtagtgtgaggagaggtttgtagagaagagttttggaagttgaggggaggtgattttagtagtatagtggatagtggtgttagtgatttgggaaggttagaaaatagaagatggaaagtgggtttggaaattagggagatttggggagagtaggttggttgtagtggtaggagttggaatgggagggggtgtatgaggttgagtgtggtgtattttttttggggttgagatggattttatttgttttgggttttttatggttgttatagggtagtgttttagtttatttgttttttttttttaggaagtttgggtgtaaagggatggagagaggtgaggtgtgtgtagtaagaggattttttaaggatgggataggaaggttttggagttttggtttttttttgtgaatttgtggggtggggagtttggtgtattaatttgagggatttgagggagtagtattaggatgtgggattgagttttggattttttttttagaaagaggaaaaaaatgaagggaggaggaggaggaagttggggagattatatttttgatttttttgtttttggaaagtgaaaggaagtttatttgttatgagtgagaaggtggatatattgggtggggatgaggtgagtgatatgagtttaggaaagttgttgaggtaattggttgagagaggtgtttaaataaaaataatgtaattggtaaaaattgttattaagattttgtagaggtattaattagtgatatggtagtatttttttttatagtaattaattgttagattgtagatagttttgatgttagtttaaggagtgtgggttttttttttaggtttgtaggtttttaattttatttttttgaagatttttttggagattttttgtgatgtatagat

SEQ ID NO: 2087 - DNA, 3108 bp, Artificial Sequence
  chemically treated genomic DNA (Homo sapiens)
atttgtgtattatagaggatttttagaagagtttttagaggagtgaggttggggatttgtgggtttggaggagaaatttatattttttaggttggtattagggttgtttgtaatttggtagttgattattgtgaaagaaaatgttgttatgttattgattggtgtttttataaagttttagtaatagtttttgttaattgtgttatttttatttgaatattttttttaattaattattttagtaatttttttaagtttatgttatttattttatttttatttagtgtgtttatttttttatttatagtaggtgaatttttttttattttttaggaataagaaaattaaaggtgtgatttttttagtttttttttttttttttttttattttttttttttttttagaaaaaaggtttagggtttaattttatattttgatattatttttttaagttttttaggttggtgtattaggttttttattttataagtttataggaggaagttaaagttttaaggtttttttgttttatttttgagaaatttttttattgtatatattttatttttttttatttttttatatttagattttttgaaggaaaaagatgaatgaattgagatattgttttgtgatagttgtggggaatttaagataagtaaaatttattttagttttgaggaggatgtgttatatttagttttatgtatttttttttattttagtttttgttgttgtggttaatttgttttttttaggtttttttggtttttaaatttattttttattttttgttttttgatttttttaagttattggtattgttgtttattgtgttgttgaggttatttttttttagtttttaagatttttttttgtgggtttttttttatattgtatttgggtttttttggttttttttataggtttttttgttttggttaaattataattgtttagtttttaggatttggttttttgtttttttttttgggttttttttttttggatggttttatgtattttagttttttttttggttgtagatttttttgtttatttgtttattagattatttatttgttttttaagtattttaaatttagttatttttttgtaggttttttttttgtgtggtttgttgtgttatttttatttttatttttatattatatttttgtgtgttgttttgtggttttttttttttattttatatgtagttagttgttaggtttgatgaagttttgggggtttttttgtttttgttttttttattttatgtttagtttagtttaggtttttgtgtttgtttttttgataagttttagatgggttttttttatgaatttttaatttaaagttttttttttgtttggtattaaggttttttaggttaatttggttgtttttgtgttttgggtatgggtttgtggggttgttttgggattgttggtttaaagtttttatttattttggtgttgtagggttatgggtttgtttagtttgtagttgtgtttgtatattttgtttggtattgtttgttttttttttaggatgtttttttggttgttttagtattttgtagtaggttgttttagttttgttattgtttggaatttttttatgttgttgttgaagtgtgtgaattttttttggttgtagatgtatttttttaggaagtgttgtgttttattaaatgtgtagtatttttgttgtttttggaaaaggtaattttttgtggggagggggtggatatgagtggaggtgttatttttatttaatttttttttttttttttttttttaatattaatgattttttttaaatttttttatttagggttggattttaaaataggagtttttttagtattgagttttgtggttttaagtgggttgtagagtttttttaggtttgtttttttattatgtagagagagaatttattgaaaagaatgagtttaggggtattgagtgattattagggaggggtgagtattgaggggaaggtagttttttttgttggtggttggaggaggtggagatgttttatgtggggttattgggagaaaaaataggggtgggaggagttggggatgtggagggtggagttgttttttttatttaattttttgattgatatttttattttgatgttagttttggtttaaatgttattttttttaggaagttttttttttttttttttttttttttatagttaagtgttttttttttttgattagttttttgagaattttttaatttgtttttgttgttttgtatgtaggagatgtagaaatatattttttaaaattttttttaattttggtataagaaagattttgtagtttgaaagttaatttttaaatatggttgtagaaagatttggtgttaaaagatgtggaaagtattttatataatgaaaattattataataattagggatttgtgggggtagagttttttgggtttagaggtattgatgtaattttttttggtagtttttatggttttatttatatataaaatgtggatatgaattttttatttatttttttagttgtgtattttggtattggggttggtgattttgatggttggttgggtgattttttttatgatgattttgtagttttggaggaaattttgtgagtgattttagtatagtaagatttgttgtatattagtagtatttttagttttttgaggttgtggattagaaatttttggaagttattgggtagtatgttttttttgttgttgttgttgtttttataagtaatgttgggtattaagatttggtttttggattttttatgaattttattgttaagatttttgggtttttgttagttatgtttaattttgatattttagtttgattggtgttttatgaatttgttggttttttttttgaggattttattttttatgaggagtttgagggaggttatgatgtggaggaagagatggttgttagttgtataggtagtattgaggaagatagtattgatgtaatttttatatgaataattttggtagttttttttatatgttgttttttttagggagtgttatgagtagtgtttggtaggtgtgtgttta

SEQ ID NO: 2088 - DNA, 2897 bp, Artificial Sequence
  chemically treated genomic DNA (Homo sapiens)
gattgtttgagtgtgggaggtagaggttgtagtgagttttgattgtattattgagttatagtttgggtgatagaggtaggttttattttaaagagaaaaatattattttttttagtggattttatagtgttaaggatttgtgtaagttttagagatttttggaaatgatgataatatagttggggaaaaatagagagaaatgggaggaagaggtaagtagatatggttaattaaggaaagttgagggtatgatgggtgaatttatgaaattgaggataagattgtagtaagataatgagtttttaggatttgtttattgatttttagttttatgagatgtgaataatgtttatattgttttggtaattttatatagtatatagtttgaatattattaaatttttgatatttgattatttttgatttataaaaatagaattttatataatttatattatattagttaaattttttttgttatgtttagttagagtatgtaggagatgtaggagaaataagtatagaaaggttaaaaagatttataataaatattaatttgggttagttttttagaggatgttttaagttttttaggtattaaagaatattttataagtgttttgtatttgtaaggtgattttaagtattaatgattttagttttagttttagggatttttttttataagaaagaaagagtattaagtataatttttgttagataatttatatatattatagggatataggttttataaatattggagtttagaaagaaaagaaaggagatattagggaggttattgggtttatttttatatatgaggaagaggggttaatattataggttttgtggaggatataatttaggattgtttaggagagattttttgaatttttttgatttttataaaatttttagtaaaaatttttttttgtttgatataagttaatataataaagggaattgttgtatggggaatttattttagtatttttatttttaaattttttaaagattttgagtatatgtgatgtaaaggttttattggtggagatttgagaagaaatggtttgtataaaggttttttatataagttttatggagagggtaagtagttaagttttttttgtggaggaaataatttgtgattttttgataaagatgagtaatttttgaagaaaattttataattttttaagggatatggtttgggtataatgttaatataattttttatatttttttattttatagtagtttagtatttttaatgtgtttttatgttgggtgtttttagtgaaagttagttgggagtttagtattattagtgttattgttaatgttgttaagttggagtttttagggagttttagatatattatgttggagaagaggataggattaggggttagaggagtaggtaagttttatttagggagaattatgatttttttttatttatattttaaattatagggaggaagttattgatttttttgtttttggattgggtaattttgtgttggagaattaattagtatttgagtttaatagtattattagttgttgtttagagatgttgtatgaaggtttttttttgaaataattttattttttaaaggattgttttaatttagtatttgaaaggtttgaattagttgtatgtaaaatattttaattggggagttattgtgagttagttttgtgttggttagtgatgtgtttataagtttgagttttgtaagagtatttattttttatttgataagataattgtttgtagaagtgagtgtgtgagtgtgtttaagagtaaaggagatggagggaatatggttgtaaatttggagttttttaattttgtttttattgtattatattttaatgttatagatttgggaaaattattttatgttttatagttgaaatgaaggtattgtgattttttaggttttttaatattggaaaattttgtgattttttagatgttttaaggagtggtagttttaggtatttgataatatgatagaatgatagttattgattagagagtgtaatatgtatttatttttaggtagtgatgtttttaataagttaaaggaaattgaaagtttgttaataatttaatttgagtaaaaatattttttttaagtgtgttttttgatgttgtttttaggtttagtggtatttttagaatatatataggaatgggttaataggggttatttatgtgtaatggagggtttgaaggtgtttttgtatggtatttattttaataatgtgataaggttaagtgtgtaatttaggtatttgtgggtttgagagattgattaaagatttttaaagttagttgtttatagaataattttttttttttttttttttttttgagatagagttttgttttgttgttttggttggagtgtagtggtatgattttggtttattgtaatttttgtttttttggtttaaataatttttttgttatagttttttgagtaattttgattataggtatgtgtttttatgtttggttaattttttgtatttttagtggagatggggttttattgtgttagttaggatggttttgattttttgattttgtgttttatattagtagtgtaattttaaattgttggggttattggtgtgagttattatgtttggttataattttgttttaaaataatgaatattttatatgaagagtgtttagttttttatttttggtttttattatgatttttttatttgattgaggttatagtattttattattatgttttttttgttttattataagggaggatataagatgattttgttaattaatatatttttgaatgtttaggaaagagaatattagggaaaattatgaattatattagttgatg

SEQ ID NO: 2089 - DNA, 2897 bp, Artificial Sequence
  chemically treated genomic DNA (Homo sapiens)
tattaattgatgtaatttatagttttttttagtgtttttttttttgaatatttaaaaatgtattagttagtaaagttgttttatatttttttttatgataaaataagagaaatataatagtaaagtgttatagttttaattaaatgaggaaattataatgggaattaggaatgagggattgaatattttttatataaaatatttattattttaaaatagaattgtgattaggtatgatggtttatgttagtaattttagtagtttggggttatattgttggtgtagaatatgaagttaggagattgagattattttggttaatatggtgaaattttatttttattaaaaatataaaaaattagttaagtgtggaggtatgtgtttgtagttagagttatttgggaggttgtggtaggagaattgtttgaattgaggaggtggaggttgtagtgagttaagattatgttattgtattttagttagggtaatagagtaaggttttgttttaaaaaagaagaagaaaaaaaagagttgttttgtgaatggttgattttgagagtttttgattgattttttagatttatgaatatttggattgtatatttgattttattatattgttagggtaagtgttgtataaaggtatttttagattttttattgtatataggtggtttttgttagtttatttttgtgtgtgttttggaggtgttgttaaatttgggggtagtattaggagatatgtttgaaaaagatatttttatttagattaaattattaatagatttttaattttttttaatttattaaagatattattatttggaaataggtatatattatattttttagttaatagttgttattttgttatattattagatatttggggttgttgttttttgaggtatttagagaattatagaattttttagtattgaaagatttgaaagattgtagtgtttttattttaattgtgagatatgaagtaatttttttaaatttgtgatattaagatatggtataataaagataagattaaaggattttggatttataattatgttttttttgttttttttatttttaaatatatttatatatttatttttgtaaatagttgttttgttaagtgggaaatgaatgtttttataaggtttaaatttgtgaatatattattgattagtatagagttggtttataatagttttttaattaaagtgttttatatgtaattggtttaaattttttaagtattaaattaaaataattttttaaagaatgaaattattttagaagaggatttttatatagtatttttgagtagtaattgatgatgttgttgaatttagatgttgattggttttttgatatgagattatttaatttaggagtaaggaaattagtaattttttttttataatttggaatgtgggtggaggggggttatagttttttttgagtgagatttgtttgtttttttggtttttggttttgtttttttttttagtatggtgtgtttgaagttttttggaggttttagtttggtagtgttgatagtgatattgatggtgttgagtttttgattggtttttgttggggatatttgatgtaagagtatattgagggtgttgagttattatggggtgggggaatatagggagttgtgttaatattgtgtttaggttatgttttttaagaaattgtgaggttttttttagagattgtttatttttattaagggattgtaaattattttttttataaaaggaatttggttatttgttttttttatgagatttgtgtaaggggtttttgtataggttatttttttttaaatttttattaataaaatttttgtattatatgtatttagggtttttagaggatttggaaataaggatgttaaaataaattttttatatagtaattttttttattatgttgatttatgttagataaaaggaggtttttattgaaaattttgtgggagttaagggaatttaaagggttttttttagatgattttgggttatgttttttataggatttgtggtgttggttttttttttttatatgtgaggatggatttagtggtttttttagtatttttttttttttttttttgaattttaatgtttataaagtttgtatttttgtagtgtatgtaggttgtttgatagaagttatatttagtgtttttttttttttatggggaaaaatttttggaattgaagttgagattattagtatttggaattattttatagatatagagtatttatgaggtattttttggtgtttaaagaatttaaggtattttttgaaaaattggtttaggttagtgtttattatgaatttttttaatttttttatatttgttttttttatattttttatatgttttaattagatatgatagaagagatttaattaatgtagtataaattatatgaaattttatttttgtaagttaaaaataattaaatattagaaatttaataatgtttaaattatatattgtgtggggttattgagataatgtggatattgtttatattttatagggttgaaagttaatgggtaagttttggaaatttattgttttattgtggttttgtttttagttttataggtttatttattatgtttttagttttttttaattagttatgtttgtttattttttttttttatttttttttatttttttttaattatgttgttattatttttagaaatttttaaagtttgtatagatttttagtattatgagatttattgaaagagataatatttttttttttgagatagggtttgtttttgttatttaggttgtagtttagtggtgtgattgaggtttattgtaatttttgttttttatatttaagtaatt

SEQ ID NO: 2090 - DNA, 2884 bp, Artificial Sequence
  chemically treated genomic DNA (Homo sapiens)
ttatagttttttgttttttagtttggtggttagttattttgattttttgaggttttgggtattttagaggtttttgaggtttagagggattttggaagataaaagagaggtatttataaaggggttttagagtgttattgtgggggtttttaggggtggaagaaatggaagtaataatattgttgtttgggtagggttatggggtataggaattgagaatgtggtagagttatatgaataatgagataagggaattttaaggattttgaggttttagagtttgagtggagatttttttaggggataaagatatggaagattttatttggttttttttggttttagggggattttttttttttgggtgattttgggagtaagggatagaaaatgtgattagtggtttttgttattttttttgtatttttttttatattttttttaatttaaattttttgtgatttagtgaagttaattgtttatggataagtattattagtgattttttagtgtaagggttattaaaggagttttgaggttatgtattggggtggaaggttaaggggaattggatttggaagtggggttttatttattgggggtttgtttgagttaggtatgttggggagttttggttttttttgaggattttgtaggaagataaagaggtttagggttattagaggggttatgtttggatatagataaaattttagtagatatttagggttttttttatatttttattttaaattttttgttttttaaattatttagttatttattttttttttatgagggttgatggtattttggggtttgggaagattttatatatagggaaagagaagttataggggttttttagggttttttttatttagttttttggatttaaagtatgagtaataagggtttgaaatttttaattttttgtatttttttagggttttatttattgtggaagtttaagggaagttatgaaaattggggaatggagtaggggtattgtttatttgggttttaggggtgttttgttgtttaggaggttttggttttttttggggtttttagaaataggtgattaggtataggttagaaggagatggagatagaatatatttagagtatggagttgagttttagtagtgatagttaagaaggtaagagtaggaagtaggtaggggttaaaatggtggttaataggatgttggtagggattttgggggataagaatgggggtgggattttttatttattatttattaagttttttttggggttttggggattatttatgttttggatgttttgaaatataagatgggtgtgagtagtttgaaggtggtttggagggatttgtggtttttagaggtttggttatttttgagggtgtgatggttagatttttaatttattttaaatttaagtaaatatagttggtttaggtttgtagtgtgtgggattgtggatttgtgggtttgtgggttttggttttgttttttttgaagatttattttttatgtttagagtttttagggtattatgttatatggttttttttgtgtatggggagtgaatgttgaggtagggtagtgtggggttagagtagggggagtttatagggaatgggaagtatgttgagagaggagagggagtaggaaggtagttagaaaggtggagagttggagaggttaaggggttattttagggttagaagttagggagttatttatagggggtttaggaatattaggtgggtttttggggttaaggagattttgaggtttttgtatttatggtgaggggaggagatggtatgaatggataaaattgtgtttttttagtgtttatgttttttttttggtttttttagagtttttttttttagtattagtttttggatatttattgattttttaggtagtttttgaggtttaatttttttgttatttttttggaggaggaggatatggtaaagttgttgtgttttttagattttttttgtatttagtttttatatttgttattatatttattttttttttatttttattagggggattaggaaggttttgggtattagtattattttgtaaaatgggggaatttataagaggggttttagagtttttaatataggtagatattgaatttttgtatttagtttatttattatttttattgagtttttgttaagtttttagttttttttttttatttatttttatttttatagaagatttatttttaattataatatatatttattaatgtatttattttatggtttttttttttagggagttttgggagtttattaaaattttggttattttaggaggaggaaggatagttagagtgaggatatgattttgtttaagtttatttttttttattgtattttgagttgggggggtgttgattttggggaagtttggagaattaggttatttttaagaaataattgagtttagtgtgggttgaaggttataggttttagggaggggtttaagtttgttatttttattttaggatttttaggtattttttgggttttattagtatttgtttggttttgggagaataagggaagtgttagaataagtagggttgtagttttttattttgtaggttttgtttttttataatatttatttatttttggggtatttattttttgtttagttttgttaggagggtttgtgaggttttgaggttttttggggttttggtgagaggagagatggggtggggttaggaggtatagggaggggagtgagggagattgagttggtgaatagatatgggggtgtagtggaggaaagtggttatttgaggttttaagtttttagattttttttttaggttagggtttttaggt

SEQ ID NO: 2091 - DNA, 2884 bp, Artificial Sequence
  chemically treated genomic DNA (Homo sapiens)
atttgggagttttggtttgaaaggagagtttggagatttaggattttaggtgattatttttttttattgtatttttatatttgtttattagtttagttttttttatttttttttttatgttttttaattttattttatttttttttttattagggttttagaggattttagggttttataggtttttttggtaaggttgggtgaagggtgagtgttttaggggtggatgggtgttgtggggagatagggtttgtagggtaggggattgtggttttgtttgttttgatattttttttgtttttttagggttgggtaggtgttgatggagtttgagggatgtttggagattttggagtgaaggtaataggtttgggtttttttttgaagtttgtagtttttagtttatgttgggtttagttgttttttggggatgatttagttttttaggtttttttaggattagtatttttttagtttagggtgtagtagggaggggtgggtttggatagggttgtgtttttattttggttattttttttttttttagggtgattgaggttttgatggatttttagggttttttggagagaagggttatagggtgagtatattagtgggtgtgtgttgtaattggggatagattttttatgggagtgaggataggtagggaagggaggttggaggtttggtaggagtttagtgaaagtaatggatgggttaagtgtagaggtttggtgtttgtttgtgttgggggttttgaagttttttttatgagtttttttattttgtagggtgatattggtgtttagggtttttttggtttttttggtgaggatggagagagggtaagtgtagtggtaaatgtaggggttgggtgtaggggaggtttagaaggtatagtagttttattgtgttttttttttttagggagatgatggggagattgggttttgagggttgtttggagagttggtgagtgtttaagggttggtgttgggggagggggttttggggaagttaggagggggatatgagtattaaagggatatagttttatttatttatgttgttttttttttttattgtgaatgtagggattttgaggtttttttggttttaaaggtttatttggtatttttggattttttgtaagtgattttttgatttttgattttgaggtgattttttgatttttttaattttttatttttttagttgtttttttgttttttttttttttttggtatgttttttattttttgtgagttttttttgttttggttttatattgttttgttttagtatttgttttttgtgtatagggagggttatgtggtgtggtgttttgagggttttgggtataggaaataaatttttaagaaaaataaaattaaagtttataagtttatagatttatagttttatatattgtaggtttgggttagttgtgtttgtttgggtttgggatggattggaggtttgattgttatatttttgggaatggttgggtttttgaaaattataggtttttttgggttatttttaggttgtttatatttattttgtgttttagggtgtttgaggtatggatggtttttagggttttaaagggagtttggtgagtgatggataggagattttatttttatttttattttttgaggtttttgttagtattttgttggttgttattttgatttttgtttgttttttgtttttgtttttttggttattgttgttgggatttagttttatgttttaaatgtgttttatttttatttttttttgatttgtgtttggttatttgtttttagggattttagggagagttaggattttttggataatagggtatttttgggatttaggtgagtggtgtttttattttgttttttaatttttatgattttttttgggtttttataatgggtgagattttggaaggatataggaaattaagggttttaggtttttgttgtttatgttttgaatttgggaggttggatagaagagattttgggaggtttttgtgatttttttttttttgtatgtagggtttttttgggttttagggtgttattggtttttatggagagaaggtaagtgattaagtgatttggaggatagggggtttagagtggggatgtagggagaattttaaatgtttgttgggattttgtttgtgtttagatatgatttttttagtgattttgagtttttttgtttttttgtagggtttttaagggaagttagggttttttggtatgtttggtttagatggatttttggtgagtgggattttatttttgaatttagttttttttggttttttattttagtgtatgattttagagtttttttagtgatttttgtattgaaaggttattggtggtgtttgtttatggatagttggttttattaggttataggaaatttgggttggaagaagtgtagggaggggtgtagagagggtgataggggttattggttatattttttattttttatttttagggttatttagggaaggaaggtttttttggaattaaaggaaattaggtgagattttttatgtttttattttttgagggagtttttatttagattttagagttttaaagtttttgggatttttttgttttattatttatatggttttgttatatttttaatttttgtgttttgtaattttatttagatagtaatgttgttatttttattttttttatttttggaggtttttatagtgatattttgaggtttttttataaatgttttttttttattttttagggtttttttggattttagggatttttaggatatttaggattttgaggggttaaggtaattgattattaggttgggagataaagggttgtgg

SEQ ID NO: 2092 - DNA, 2476 bp, Artificial Sequence
  chemically treated genomic DNA (Homo sapiens)
tggagagtagaggaggttgggggtggggagtagatgggggtggggaaggaggggagatgggggtggggaaggggggtgggaggagggttaggaatgggggaaggaagatagggtgggggaggggtgggtatgggggaaggaagatagggtgggggaggggtgggtatggggaaagggagatagggtgggggaggggtgggtatgggggaagggagatagggtgggggaggggtgggtatgtgggaagggagatagggtggggaattgagaagaaagatagtggggggggatggaggaaggaatatagggtggggtggggggttgggatgggggaagggaaataaagagtggtggaggtgtggggattaggaatggagatagagggtgggggaggggtggggtgggggaagggagatagggtgggggaggggtgaggatggtggaaggtagataaggtgggggaggggtggggatgggggaagggagatagaagggggggaggggtggggatgggggaagggagatagaaggtgggttagggtgggaatgggggaagggaaatagggtgggggtggggatgagagaagatagaggttgggggaggggtggggatgtgtaagaaaaataaagggttggggagggggagggaaaagaggtagagagtgggggagggggtggggatgtggaaagaaagttagaaggtggggggtgaggggtggggatgggtgaatatgtgatggttgtggttttttttattagatagtagggtgggggtagggtggaaaaagggggtgtggtgggtgaatggggaggtggggggttgattgggagtgtgggatggggtgttttgggattatggagatgtttaagtttggattttgttttgggtttgtgtttttggtgattttttttttttttagtgggatgtggggtgtaggggttggttttaggttttttgagtttaagttttgttttattttgttttgtaagtttagaaaagatgtttttgtttttggttgggtaatttttggatttatttattgtttgtaattttttgggttgaagagattattttttgggagttaattaatttattttttggagtgtgtgtttttttttgtttttaggagttggttttttaaaattttttgaggtttgtgtatgttttttttgattttttgtgtttttattttttatagaaatttatgtatttatgtttttttttttttttgagtttgtagaggattttgttttgttttttttatatttagggttgttttttttgttgttaatataaatttgttgataggttatgtttgggaagtgggtggggtgttttggagtggtgttgaggtgttgtaggtttggtttttggttgtgggggagttgtattttgaagttttgttggaatttgtgtttggggttagtagggggtattagagttaatagggattgtatgtaaaatttatttttttttaggttttttagggggatggttaggtttttgtagagatggggaggatttttttttggtaaggggagagggatgggttaggagttaagtggaaggattttgtgtttaaggttttttaagggatgggataggtgaggaatttttttgagttttttgaattgttttattagttaggtttgggaagtattttgtttttataaattttgtttttttgaaaggggttgggggggggattttaatattttttgttataggttatgatgggtatggtggttaagagtaataggttgtgtggtgaggttggttttttgtggttttgttttgttattttttgaggtatttttatgttagtgaatagagttgtgggtttttagttgtatagatgaatgtatgaataaaatataggtttatataaaggaagttattgtattgatttagatttgatttgggattgttgtataaaatagggttgataaaaattgttgtgtttttattttggaaatagagatttagtttttttttttttgtttgaggtatttagtaaaggtttgtttttgagtggttgtggatgtttaaggatttatgatttttgattttataaagtttagggtgaaaataaaaaataaaataaggagattattgttttaaagtggttgttgtagttaattattttaagaaagtaaataggttggtattgaaagttatataggtgggtggttttttgggagggttgtttagttttttttttttgagatttgagtagggagtagttagaggagtttgaagggatggtgtttagggtatgggaataggttgtatatatttttatggagtatggtgtttgtttagtttgagaagggaaagaaatgggagtagagggttgatgagaaggtagtagatggatagtgtgggattgaaaaggggatttatttgaagattggttattattatttatttttattatttgattgttgttgttttattgagattgatgtgtggaga

SEQ ID NO: 2093 - DNA, 2476 bp, Artificial Sequence
  chemically treated genomic DNA (Homo sapiens)
tttttatgtattgattttaatggagtaatagtaattagatgatgaaaataaataatggtggttagtttttaaatggattttttttttaattttgtattatttatttgttgtttttttattagttttttgtttttgtttttttttttttttaaattggataagtattgtattttgtgaagatgtgtgtagtttgtttttatgttttgaatattatttttttaagtttttttggttgttttttgtttaggttttagaaaaggagagttgggtaatttttttagggagttgtttgtttgtgtaatttttagtattagtttgtttgtttttttgagataattagttataatggttattttaaaataatggtttttttattttgttttttgtttttattttaaattttataaagttagaaattgtaagtttttgagtatttatagttatttaaggataaatttttgttgaatgttttaagtaaagagggggaggttgagtttttgtttttagggtgaaaatatgatggtttttattagttttgttttatgtgataattttaggttgaatttggattaatgtaatgattttttttgtatggatttatgttttgtttgtgtatttatttgtgtagttgggaatttgtagttttgtttattggtatggggatgttttggggaatggtagggtagagttataaaaagttagttttattatgtggtttgttgtttttagttattatgtttattatagtttgtggtaggagatgttggggttttttttttgattttttttaggaaaatagagtttgtggaggtggagtattttttaggtttgattgataaaataatttaaaagatttaaagagattttttgtttgttttgttttttgaagggttttgaatatggggtttttttgtttggtttttagtttgtttttttttttttattaggaaaggattttttttatttttgtagaagtttgattatttttttagagggtttgggaggaagtgggttttgtatatagtttttgttgattttagtgttttttgttggttttagatgtgagttttggtgaggttttagggtatagtttttttgtagttagaagttgggtttgtagtgttttagtattgttttgggatattttatttgttttttaggtgtgatttgttaataggtttgtattggtgataaaaggagtagttttgaatgtagggaaagtagggtggagttttttgtaggtttgggggaggggaggggtgtgaatgtgtggatttttgtggagagtggaaatatggggagttgaggggagtatgtgtgggttttagaaagttttgggaaattgatttttgggagtagggaggaatgtgtgttttagagagtaagttaattgatttttggggggtggtttttttagtttggggggttatagatagtaggtaaatttagagattatttagttaagggtaggggtattttttttagatttgtggggtggggtggggtgagatttgagtttaggggatttggaattggtttttgtattttgtattttattgaagaaaagggaggttgttagaagtatagatttaggatagagtttagatttggatgtttttgtgattttagaatattttgttttatatttttagttagttttttgtttttttatttgtttattgtattttttttttttattttgtttttattttattgtttggtgggaaaggttgtagttattatgtatttatttatttttattttttattttttattttttgattttttttttatatttttatttttttttttattttttgttttttttttttttttttttttaattttttgttttttttatatatttttattttttttttaatttttgtttttttttatttttatttttattttgtttttttttttttatttttgttttggtttgttttttgtttttttttttttatttttattttttttttttttttgtttttttttttttatttttattttttttttgttttgtttattttttgttatttttattttttttttattttgtttttttttttttattttattttttttttattttttgtttttgtttttaatttttatgtttttattattttttgtttttttttttttattttgattttttattttattttgtgtttttttttttatttttttttattgtttttttttttggttttttattttgtttttttttttgtatgtttattttttttttattttgtttttttttttttatgtttattttttttttattttgtttttttttttttatgtttattttttttttattttgtttttttttttttatgtttattttttttttattttgtttttttttttttatttttaattttttttttgttttttttttttatttttattttttttttttttttatttttatttgttttttatttttagttttttttgtttttta

SEQ ID NO: 2094 - DNA, 2391 bp, Artificial Sequence
  chemically treated genomic DNA (Homo sapiens)
ggatgattttgtttagtgtttttagtttgtttttttaggttatggttttaagtgaaatgatagagtttatagttttggttttggttgaggtttaggttatagtaagggtatgtttttggggtttttgatttgaattttgattttttgggtagggaagaggaggttgttttttttggttgttttggttttggagttttttgtaaaaatattttgggttttttgttattggttgtagaaatggtttgatggggtgtgtggggatagatatttagaaggaatgtatttttgtggttttggtgtttgatggggttgggggagagtgttttttattgatttagtagtatatttatgtgtagtgtgtttgtatttgtgtgggggtagttatattttttggttgttgtttttttgggttgtttttttgggggtatgtgattggatttatgaggtttgtattgagttttatttgaatgatattttttttattttattttttttatggaagtattgttttagggttatttagttttttgttttatggttgaaattgtttattttgtttgtagatgtttattattttgtttatttaatgtattattatgtattgattttttatgagatagagagagagagagattattagatagtttatatttaaagggtaggtttttgtatatttttttagttttttttattaaggggaaggggagagtttaaaaatttaaattgttgtggttttaaggtgttttatttttaaaagggagagagaatttatttaaagttattttagattagggattgttatttttttttgtttaatgtattttttgttttttaaaaaaattttttttagaggaaattaatattagtttttgtgtttattaatttttttggttatttgtatttatttatttatttatttattagatatttgttgttatttgaaagaattggtttagtgggtttgaaagtttgtttgagaataggaaatttgagatttggttttttgtgggtaggagaataaggattatttgggttttttagttttgaatgagaattttatttttattagaatgttttttttaattttagtgtatgatgaggaaatttatttatttttagttaggatttgataaattttaatattaaatgattaaaatatttgttattgaggttttattggtgagatttgttttttgtttttgggtgtagttttttgggggttgttttttggattgtgttttgtatatttgttattgagggtgtgagaagtgtttaagttggtgatatgtgatttgggatgtttttattttttgggttaggagtagtagttgttaaggatagtagtttgtattgtgtggttttagggaagtagggtttggtttttaatatgaattgtaaaaagtagttttttattgatatttttttgttgttgtttttggggggtttttttgttttgtttttaatgtttttgagtgtatatttttttttttgtttgaaattgaatttttaaagtggttttttttagttttggttggaaaattattttttaatagttttaagtaataaatagatgagtagagaatgtggttttaattgggtttattaaagtaagtgtgtttagtttttatttgaataagtgatagttgtagatggtgaaagaaatttatttaatttttgtagtttataggtggtagaaataaaaatgtaattttaaaattttaaatattaaatattaattattgttttttttttttttgagatggaattttgtttttgttatttaggttggagtgtaatggtgtgattttattttattgtaatttttgttttttgggtttaagtgatttttttgttttagttttttaagtagttgggattataggtatgtgttattatatttagttaattttgtatttttggtagagatagggtatttttatgttggttaggttggttttggatttttgattttaggtgatttgtttattttggttttttaaagtgttgggattataggtgtgagttattatgtttgtttagtaatattaattattgttttttaaatttgtgttggttttttagatagggagattattggaataaaataattgatggttttattttgttatatgtaaattaaaagaaatgttttttttgaagttgtaagattttattaatgatagatattttttttggtggattttgagtggtgtgtagtggttttatagttatggaaattaggagtattttattttttattgagaatttttgtttttaatttttttaagttggggtgtggtagttgggtagggttaagtgatttagttttggttgtaggatagttatatatagtgaagagttttagaattagttaaaaatggaagtttgggt

SEQ ID NO: 2095 - DNA, 2391 bp, Artificial Sequence
  chemically treated genomic DNA (Homo sapiens)
atttaaatttttatttttagttggttttagaattttttattgtatatggttgttttatagttagggttgggttatttgattttgtttaattgttatattttaatttagagggattgggggtaggggtttttagtggaaagtgagatatttttagtttttatggttataaaattattatatattatttagagtttattgaaaagggtgtttgttattggtggagttttataattttaaagaggatattttttttgatttatgtgtgataaaataagattattggttattttattttagtgatttttttgtttgagaagttaatatgaatttaaaagataatggttggtattgttgggtaggtatggtggtttatgtttgtaattttagtattttgggaggttgaggtgggtggattatttgaggttgggaatttaagattagtttgattaatatggagatattttgtttttattaaaaatataaaattagttgggtgtggtggtgtatgtttgtaattttagttatttgggaggttgaggtaggagaattatttggatttgggaggtagaggttgtagtgaggtgagattgtgttattgtattttagtttgggtgataagagtaaaattttattttaaaaaaaaaaaaggtaatggttggtatttggtatttaaggttttaaaattgtatttttgtttttattatttgtaagttataaaaattaaatgggttttttttgttatttgtagttattatttgtttaagtgaaaattagatatatttattttaataagtttagttgaagttatattttttatttatttatttattgtttaaggttattgagaggtggttttttagttagggttaaagaaagttattttgggagtttggttttagatgaggaagaaaatatgtatttaaaggtattaaaaataaaataaaaaaattttttagaaataataataaaaaaatattagtgagaagttgttttttgtagtttatattaaaagttagattttgtttttttaaaattatgtaatgtaagttgttgtttttagtagttgttatttttggtttgagaaatgaaggtgttttagattatatgttattagtttaggtgttttttatatttttgataataggtgtgtggggtgtagtttgaggagtagtttttaagggattgtatttgaggatggagaatggattttattagtgaagttttagtggtaaatgttttgattatttgatgttggaatttgttaaattttagttagagataagtaaatttttttattatatgttgaggttaagaaaaatattttgataagagtgagatttttgtttaagattggagaatttaggtggtttttgtttttttatttatagggggttaggttttaagttttttatttttaagtgagtttttagatttattgggttagtttttttagatggtaataaatatttgatgaatgaatgaataaataaatataagtgattagaagagttagtgaatataaagattaatattagttttttttaaaaaaaatttttttaaagaataaggaatatattggataaaaaaggatgataatttttgatttgaaatagttttaaatagatttttttttttttttaaaaatgaaatattttaaaattataatggtttgggtttttaaattttttttttttttttaataaaaaaggttggaaaaatatataaaaatttattttttgggtgtaaattatttgatagtttttttttttttttgttttatggagaattaatatataatagtgtattaggtagataggatagtagatatttgtagatgagatgagtaattttagttatgaggtagaggattgaataattttgaagtggtgtttttgtgggggaaatgggataggaaaggtattatttaaatggagtttagtgtagattttgtaggtttagttatatgtttttagaaaggtagtttaaggaagtagtagttaaggggtgtggttgtttttatatagatgtaggtgtattgtatatgggtgtgttgttgggttagtggagagtatttttttttagttttattggatattaaggttataaaagtatattttttttgggtgtttgtttttatatattttgttgagttatttttgtagttagtggtagggggtttaaaatatttttgtaaaggattttaaagttaggataattaaaggggataatttttttttttttgtttggagggttagagtttaggttgagggttttaagaatatgtttttattatgatttggattttagttaagattagggttgtgaattttgttattttatttgggattatgatttgaggggatagattgaggatattgggtagaattgttt

SEQ ID NO: 2096 - DNA, 2483 bp, Artificial Sequence
  chemically treated genomic DNA (Homo sapiens)
aaaagagaaattttgatagttttttaattatgtgggatatggtattattttattagaaaattgtatgttgaaaatattgtattgttgtgtatagatagagtggtatggatttaattttgtatgtataaattaaatttgtaatgtttaagtagtggattagaattttaatatgtttttattttatttggttttgttaggtaagtaagggattttgtgtgttggaaaaagaattattttggtgtagttgtttaagaggagtttggggaggatgttggtttgtgaggtttgttgtagataaggtggtggtgatgtttgggagttaggttagtgttgtggtggtagtgttggggttttttgtgtggtagggtggtttgggttttggttttttgttggttttttggaagtgggtttgtggttagtgtgggagtagtagtagagatggaggttttagtgttttttttttttttttgtttgtttgagttaggggaggttaggtggtttgggtgtttggagttgggggtttgttgtttgagaatgagaattttttttttttagaatgtggagattgtttgattattaggagtataaagttattattgttgggttggataatgtagggaaaattattattttttattagttttttatgaatgaggttgtatatatattttttataataggaagtaatgtagaagagatagtgattaataatatgtgttttttaatgtgggatattggtggttaagaatttttttgttttttttggaatatttattatattaatatagagttgataatagttgtggatagtatagatatatgatttttgtaattagagaagaattttataaaatgttagtgtatgaggatttaaggaaagttggattgttgagttttgttaataaatgagatgttaaagaatgtttgattgtagtggaaattttttagtttttgaagttattttttattaaagataatagttagtggtatatttaggtatgttgtgttttaattggtaagggattgtgttaaagatttgaatggatgatgttatgattttagattatatgattttttttaattttatagattttgtataaatgaagtgttggattttatttgaaagttgtaaaaattaatggtttagatatatttataataaattgatttaaattttttttataagaagaaaaattaagattatttatttgaaaagaaagatggagagggaggaggaagaagagaaaatggttgggtggtggtggttgtaggttgtgtagtggtagtggtttttttttgtggtggatgatggatagttaggataggaaggtggtggtgtataataatagtattgggtttgtgaagtgtggttatatgtaggttttaattttttagaagatatttttttagttttggttggaagatttattattagattaattattaaagtgggaaatattgaataaggattttatggttggtgatgaggtaggtgaattatgattaatgttggaagttaattattttatggaaaatggtatagtaagaaattaggatgatgtgaaaaatttgtgggattatatgtttggattagagaaatttaatatagatattagaaattgtaaaattttatttatagaattttttatgaatttaattaaaaatatagagaagattgtagaggtaatgtttgaaatttagtagttttttggtgtatatgtagttatttagatggttttgattttgtatgtttaaggtttattgattggtgtagtggtagattttggagatagtgtgagttatatttgtttagtatatgaaggttttttttttttttattttattaggagattggatattgttgagagggatgtaattagatattaggttgtttttattgtgaggatatgtttttaattattttgttgattttgaaatggtttgtatgattaaagaaaaattgttatgtgggatataatattgagtaagagtagaaattggttttagaaattaaagtattagttgaattttatatatttttagatggatatattattaaagttggaggggagagatttgaagtattagaaattttattttagttttatttgattagtgttgaaggagttggtgttgttgaattgtttttgaatataatttaggtagttgatattgatatttgatttgaattttataaatatattgtgttttttggagggtttattatgtattttggtttgttattaaggttggaatgagaatttaaatagttttatttagaatgagttttaaagggtgatgtggaaaaattttttaaatttaagatttgtattgaagatttattttttagaaagtatatgggtggtgtagttttagtagatattatgaaagataaagataatttttggatgatttgataagagtattaagaaaggggtgtttgtgtgttagagaaatttggtgtgattgtttgataaatttta

SEQ ID NO: 2097 - DNA, 2483 bp, Artificial Sequence
  chemically treated genomic DNA (Homo sapiens)
tggagtttattgaatagttatattaagtttttttagtatatggatattttttttttggtatttttgttgggttatttaaaagttgtttttgttttttatggtatttgttagaattgtattatttatgtgttttttgaggggtaggtttttgatgtggattttaaatttaaaaagtttttttatattattttttaaaatttgttttaagtaaagttgtttaagtttttgttttaattttgatgataggttaggatatatagtagattttttagaaagtataatgtgtttgtaggatttagattaggtattaatgttagttgtttgaattgtgtttaaaagtaatttagtaatattaatttttttaatattgattaagtgaggttgaaataaaatttttggtgttttaaattttttttttttaattttgatgatatgtttatttgggaatgtataagatttaattaatattttggtttttaaggttagtttttgtttttgtttaatattatattttatgtaatagtttttttttaattatgtaaattgttttaaaattagtagggtggttgaaggtatatttttgtaatagaagtaatttggtatttagttatattttttttagtaatatttagttttttggtaagatgagggagagaaaagtttttatatattgggtaaatatgatttatattatttttagagtttattgttatattagttaataaattttgagtgtataaagttagaattgtttggatggttatatatatattggaaaattgttaagttttaaatattatttttatagttttttttgtgtttttggttgggtttataggaggttttgtgagtaagattttataatttttggtatttatattaagtttttttggtttaaatgtgtagttttataggttttttatgttattttaattttttattatgttattttttatagggtaattaatttttaatattgattgtaatttatttgttttattattaattataagatttttgtttaatgttttttattttggtggttgatttgataataggttttttaattaaagttgggaagatgttttttggaaagttagagtttgtatataattatattttataagtttggtgttgttgttgtatattattatttttttgttttggttgtttattgtttgttgtgggggagagttgttattgttgtataatttatagttgttgttgtttggttgttttttttttttttttttttttttttatttttttttttaaataagtggttttaatttttttttttatagaaaaagtttaaattagtttattataaatatatttaaattattaatttttgtagtttttaggtaaagtttagtattttatttatataaagtttatgaggttagaagagattatgtaatttaaagttgtgatattgtttatttaagtttttggtataattttttgttagttagagtatagtatgtttggatatgttattaattgttatttttaatagaaggtagttttaaaaattgggagatttttgttatagttaggtattttttaatgttttgtttattaataaaatttagtaatttagttttttttaggtttttatgtgttaatgttttatagagtttttttttagttatagaaattatgtgtttgtattgtttataattattattaattttgtgttagtatagtaagtgttttaggaagaatgaaaagatttttggttattaatattttatattaggaaatgtgtattattaattattattttttttatattattttttattataggagatgtatgtataattttatttatagaaaattggtaaagaatggtagttttttttgtattatttagtttaataatgataattttgtgtttttggtgattgaatagtttttatgttttgggggaagaaaatttttatttttggatagtagatttttggttttagatatttgggttgtttggttttttttggtttaggtggatggggaagagagagaggtgttggagtttttatttttgttgttgtttttgtgttagttgtgggtttgtttttagggaattggtgggaggttgaagtttaggttgttttgttgtgtgaaaggttttgatgttgttgttgtggtattggtttggtttttggatattgttgttattttgtttgtgatgagttttgtgggttagtgttttttttaagttttttttgggtggttgtattaaagtaattttttttttaatatataagattttttgtttatttaataggattaaatgaagtgaaagtatgttaaaattttaatttattgtttaaatattataaatttaatttatgtatataaaattgaatttatgttattttatttatatataataatgtaatatttttaatatatagttttttgataaaataatgttgtgttttatataattaaaaaattattaagatttttttttt

SEQ ID NO: 2098 - DNA, 2431 bp, Artificial Sequence
  chemically treated genomic DNA (Homo sapiens)
tttttatttttttttttgagtttttaaagtttattatattatttttaaatgtatttgtatttttatagtttagtttttatttataagtgagaatatatgatatttggttttttatttttgagttatttagaataatggtttttggttgtttttaggttgttgtaaaggttattattttattttattttatggttgagtagtatattattgtgtatatatattatattttttttatttatttgttggttgatgggtatttagttgatgggtatggttgatgggttttttatttttgtaattgtgaattgtgttattatgaaaatatgtatatgtatttgttttttatgtaatgatttttttttttttgggtagatatttagtagtgtgattgttggattgaatggtagttttattttgagttttttgagaaatttaggagttattttaatatagataattgaattgtagttaattttttatttagttttttatattggttatttattattattgatttgaggttattttttatttatattatttgattattttatttagttatatttttaatagtatatgttgtttttaaagtatattatgtgaatagtttaaaatttttaaagtataattttttgttgaagtatttgtaagttttatataagtttttatatgatttgttttgatttttaaattattattttttttattttatttatatttatttttttttttgtgagatgtaattttatataaattttatagataggaagatgttgggaaattattatatggtttgttatgttgtgttattttaataggttaaattatttgatgaaaagagaaattttgatagttttttaattatgtgggatatggtattattttattagaaaattgtatgttgaaaatattgtattgttgtgtatagatagagtggtatggatttaattttgtatgtataaattaaatttgtaatgtttaagtagtggattagaattttaatatgtttttattttatttggttttgttaggtaagtaagggattttgtgtgttggaaaaagaattattttggtgtagttgtttaagaggagtttggggaggatgttggtttgtgaggtttgttgtagataaggtggtggtgatgtttgggagttaggttagtgttgtggtggtagtgttggggttttttgtgtggtagggtggtttgggttttggttttttgttggttttttggaagtgggtttgtggttagtgtgggagtagtagtagagatggaggttttagtgttttttttttttttttgtttgtttgagttaggggaggttaggtggtttgggtgtttggagttgggggtttgttgtttgagaatgagaattttttttttttagaatgtggagattgtttgattattaggagtataaagttattattgttgggttggataatgtagggaaaattattattttttattagttttttatgaatgaggttgtatatatattttttataataggaagtaatgtagaagagatagtgattaataatatgtgttttttaatgtgggatattggtggttaagaatttttttgttttttttggaatatttattatattaatatagagttgataatagttgtggatagtatagatatatgatttttgtaattagagaagaattttataaaatgttagtgtatgaggatttaaggaaagttggattgttgagttttgttaataaatgagatgttaaagaatgtttgattgtagtggaaattttttagtttttgaagttattttttattaaagataatagttagtggtatatttaggtatgttgtgttttaattggtaagggattgtgttaaagatttgaatggatgatgttatgattttagattatatgattttttttaattttatagattttgtataaatgaagtgttggattttatttgaaagttgtaaaaattaatggtttagatatatttataataaattgatttaaattttttttataagaagaaaaattaagattatttatttgaaaagaaagatggagagggaggaggaagaagagaaaatggttgggtggtggtggttgtaggttgtgtagtggtagtggtttttttttgtggtggatgatggatagttaggataggaaggtggtggtgtataataatagtattgggtttgtgaagtgtggttatatgtaggttttaattttttagaagatatttttttagttttggttggaagatttattattagattaattattaaagtgggaaatattgaataaggattttatggttggtgatgaggtaggtgaattatgattaatgttggaagttaattattttatggaaaatggtatagtaagaaattaggatgatgtgaaaaatttgtgggattatatgtttggattagaga

SEQ ID NO: 2099 - DNA, 2431 bp, Artificial Sequence
  chemically treated genomic DNA (Homo sapiens)
tttttggtttaaatgtgtagttttataggttttttatgttattttaattttttattatgttattttttatagggtaattaatttttaatattgattgtaatttatttgttttattattaattataagatttttgtttaatgttttttattttggtggttgatttgataataggttttttaattaaagttgggaagatgttttttggaaagttagagtttgtatataattatattttataagtttggtgttgttgttgtatattattatttttttgttttggttgtttattgtttgttgtgggggagagttgttattgttgtataatttatagttgttgttgtttggttgttttttttttttttttttttttttttatttttttttttaaataagtggttttaatttttttttttatagaaaaagtttaaattagtttattataaatatatttaaattattaatttttgtagtttttaggtaaagtttagtattttatttatataaagtttatgaggttagaagagattatgtaatttaaagttgtgatattgtttatttaagtttttggtataattttttgttagttagagtatagtatgtttggatatgttattaattgttatttttaatagaaggtagttttaaaaattgggagatttttgttatagttaggtattttttaatgttttgtttattaataaaatttagtaatttagttttttttaggtttttatgtgttaatgttttatagagtttttttttagttatagaaattatgtgtttgtattgtttataattattattaattttgtgttagtatagtaagtgttttaggaagaatgaaaagatttttggttattaatattttatattaggaaatgtgtattattaattattattttttttatattattttttattataggagatgtatgtataattttatttatagaaaattggtaaagaatggtagttttttttgtattatttagtttaataatgataattttgtgtttttggtgattgaatagtttttatgttttgggggaagaaaatttttatttttggatagtagatttttggttttagatatttgggttgtttggttttttttggtttaggtggatggggaagagagagaggtgttggagtttttatttttgttgttgtttttgtgttagttgtgggtttgtttttagggaattggtgggaggttgaagtttaggttgttttgttgtgtgaaaggttttgatgttgttgttgtggtattggtttggtttttggatattgttgttattttgtttgtgatgagttttgtgggttagtgttttttttaagttttttttgggtggttgtattaaagtaattttttttttaatatataagattttttgtttatttaataggattaaatgaagtgaaagtatgttaaaattttaatttattgtttaaatattataaatttaatttatgtatataaaattgaatttatgttattttatttatatataataatgtaatatttttaatatatagttttttgataaaataatgttgtgttttatataattaaaaaattattaagatttttttttttattaaataatttggtttattaaaataatataatataatagattatgtgatagttttttaatatttttttatttataaagtttgtatgagattatattttataagaagaaaagtaaatataagtaaaatagaagagatgatgatttaaaaattaaaatagattatataagggtttgtgtaaaatttataaatgttttaataaagaattatattttgagaattttaaattgtttatatgatatgttttggaaatagtatatattgttagaaatgtgattgaataaaatgattgagtaatataaatgaaaaatggttttaaattggtggtagtaagtaattagtgtggaaaattggatggagaattaattgtaatttaattatttatattaaaatgatttttagattttttaaagaatttaaagtagaattattatttgatttaataattatattattgggtatttatttagaggaaaagaggttattatatggaagatagatgtatatgtatgtttttatagtagtataatttgtaattgtaaaaataggaagtttattaattatatttattaattaaatgtttattagttaatgaatggatgaagaaaatatggtatatatatatagtggtatattatttagttataaaatgggatgaaataatggtttttgtagtaatttggaggtagttagaggttattattttaagtaatttaggagtggaaaattaagtattatatgtttttatttgtaagtggaagttaagttatgaggatgtaaatgtatttaagaatgatataatggattttggggatttggagagaaaggtaggag

SEQ ID NO: 2100 - DNA, 2412 bp, Artificial Sequence
  chemically treated genomic DNA (Homo sapiens)
ggtagaggttaggaggatgatgttagtagttaggaagtttgggtagtggtttaggaggggtatttgttaagaatttatgtgggttttagtgaagttgtggatgttgtggttgaatatagagtttaggtagttattttaggtatgggttatggtggtgttattgatgatgtatttgaggagaatattttagttgatgaggaaggtttatagtttgtttatggatatgtaggtgaataggtaggtagagtttgtgtgtggtatatgtgttttaaattttgtatagtatagggttgttagtagggaggttatagtggttatattgaaggataagagtatagtagggttagttatttttttggttatggtatttgtgagtatgtagagatttgagtttattatgttatttatgtttagaagagttaggtttagtgtggataggtagtgttgtagtgatgtttttatggtggagttttttagtggttttaggtggtttagtttttggtataagtgtgttaggttagtaatggtgggtagtttttgggttatggtaggtggttgagaagagtattgagttagttattggaatttgttagggttagaggggaatgataggatgtgtagttggggtttgattagttttttattttttttggtttgattatttttagttttttttttgtttttgatttggggatttggatatttttattaggggtttgttggagagttggaatggggtaggtgttagaatttgtgggtaggaggttataggaagtttggaggttttgtttgtattttaggtagtaaaggaggtttggtgaggttttatttgtttatttgtttggtggttttgaggggtggggagggagtagttttagggggagtagggtgagaggttgggaatggtttagtggtggggttttagagttaggtgaaattgaggtttttttagagttgagttggatttggaataggagttgtggttttgtgttggggtgggtgtggtttaggtagttatttggttatagatagatagtggtggttatatatatttttgtttttgtatttgtggttaggttggggtatttgtgtgttaggtggaatgtaggggtgttttgggtttgtatatttttttatgtttgatatgttgttgttgttagagtttgttttgttgtgtttttgtttttggatatttgtgtttttgtttgtttttgggtttgagtttgttttagtttttgtttttgtaggatttgttgtaatttatttgttgttgttgtagttgttgtttttgttttgagtattgagtttgtttagtttgttggtgttgagtgtagggtttgtttttattttaggttttttgtgtggttttatttgttgttatatatttagatattttattttgtttattttgtttgattttgtaaggttgttattggagtttattggggtttagggaagttttgtgattgtgatttagttatagatggagaaggttagattgttggttgattgattagtttaggttagtttggggaggttaagggttatgtttgaaagtttgtagtttattttttttttattgtagtggatattttttttgattttttattttagtatatgaattttatttagttgggttttagataggttttatagtattgttatgtgagttttaggtatagtgagttagatgaagatatgggtttggtagagtggtttggggtggtttttgatttttatttttataatggaagagattgtagttttttgagagagttttgtgaattgagggaatgtattttggttgttttgagtttgtagttattatgttttgtaaggaagtaagtagtttttgggattagtttgtagtttttttgtgggggagtagagttttttagattttagtggtagttttttttagtttaggtatttttggtaggttgggagggttttatgggattttaatagtagatttttatttgtgtttattagtgatagttattgtgttttgagtattgtattttagtgttttatgttttaggtaggtagttatgtaataatatatttggttaattttttaattttaatttttttagagattgggttttattatgttgtttgggttggttttgaatttttggttttttaaaaggttgtgattatatttatgaattatggtttttggtttttttagaatgttatattagatatgtgtttaggtttatatgtggtttgtggaatggaattttaggagtatttgtagtttatttagtttattgggttggtgataggatgatggatttttagataagatggtgttaatttggaatattttgttttggttagaatgttaatattttttaatatttggttggtattgttttgaggaattttttagatggtttttatttt

SEQ ID NO: 2101 - DNA, 2412 bp, Artificial Sequence
  chemically treated genomic DNA (Homo sapiens)
gaagtgggagttatttgagaagttttttaagataatattagttaaatattagaaggtattggtattttggttgaggtagaatgttttaaattggtattattttgtttgggagtttattattttgttattagtttaataggttggataggttgtagatgtttttaagattttattttataaattatatgtaagtttgaatatatgtttagtatagtgttttggggaggttaggagttatggtttatgaatgtaattatagttttttgggaggttaagagtttgagattagtttgggtagtatagtgagatttagtttttaaaaaaattaaaattaaaaaattagttaggtgtattgttgtatagttgtttgtttggggtgtggggtattggaatgtagtatttaggatatagtggttgttgttgataaatataagtggggatttgttattggggttttatagggtttttttggtttgttagaggtgtttaggttaggaagggttgttattggggtttgaggagttttatttttttataggagggttgtaggttggttttagaagttgtttgtttttttgtaggatgtggtagttgtaggtttaaaatagttagaatgtatttttttaatttgtagaatttttttaaaaggttgtagttttttttattgtaagagtagaggttagggattgttttaggttattttgttagatttatgtttttatttaatttattgtgtttgaagtttatatgatggtgttgtggggtttgtttggggtttagttgggtggggtttatgtattggggtgagggattaagaagggtgtttgttgtagtagaaagaaggtgggttgtggatttttagatgtggtttttaatttttttgaattgatttaggttagttagttagttggtggtttgattttttttatttgtgattgagttatagttatagggtttttttagattttggtgagttttggtaatgattttgtgaggttgggtagagtgggtagggtgaaatatttgggtgtgtggtagtgggtggggttgtgtggggggtttgggatgggggtgggttttgtgtttggtgttggtgaattgggtgggtttagtgtttagagtggaggtagtggttgtggtagtagtaggtgggttgtagtagattttgtggggatggggattgggatgggtttaggtttaagaataggtgaaggtgtaggtgtttggggatgggggtgtggtggagtaggttttagtagtagtggtgtgttggatatggggaggtgtgtgggtttagggtgtttttgtattttgtttggtgtgtggatattttagtttggttatgggtgtaggggtgggggtgtatgtagttgttattgtttgtttgtggttaggtggttgtttgggttatatttgttttgatgtagagttgtggtttttgttttgggtttggtttgattttggggaagttttggttttatttggttttgggattttattattgagttgtttttagttttttattttgttttttttggagttgttttttttttattttttagggttattgagtgggtgagtaggtggggttttattaggttttttttgttgtttgggatgtagatagggtttttaggttttttgtgattttttgtttataggttttgatatttgttttattttagttttttagtaggtttttggtgagggtgtttaggtttttaggttagggatagagagaggattgggggtggttagattaggagggatggaaggttggttaggttttggttatgtattttgttatttttttttggttttagtaggttttagtagttggtttggtgttttttttggttatttgttatggtttgggggttgtttattattgttagtttggtatgtttatgttagaagttgaattgtttgaagttgttggaggattttattatggagatgttattgtggtgttgtttgtttatgttggatttgatttttttgggtgtgggtggtatggtgggtttgggtttttatgtgtttataggtgttgtggttaaggaggtggttggttttgttgtgtttttgttttttggtgtggttgttgtggtttttttgttggtagttttatgttatgtagaatttggggtatgtgtgttatgtatgggttttgtttatttgtttatttatgtatttatgggtgagttgtgggttttttttattggttggaatgttttttttgaatatattattggtggtgttgttgtggtttgtgtttggagtggttatttggattttatgtttagttatagtatttgtaattttattgagatttatgtgggtttttggtaggtgttttttttgggttattatttggattttttggttgttggtattatttttttggtttttgtt

SEQ ID NO: 2102 - DNA, 2475 bp, Artificial Sequence
  chemically treated genomic DNA (Homo sapiens)
tttttgagatagagttttttattgtttaggttagagtgtagtggtgtgattttagtttattgtaatttttgttttttgggtttaagtaatttttttgttttagttttttaagtagttgggattatagataattattattttatttagttgatttttttttttttttttgagatggagtttttttttgttatttaggttggagtgtagtggtgtgattttggtttattgtaagttttgtttgtagttgggattataggtgtttattattatgtttggttaattttgtttttgtatttttagtagagatggggttttattgtgttagttaggatggttttaattttttgattttgtgatatgtttattttggttttttaaagtgttgggattatagatgtgagttattgtgttaggtttaaagtatttttttatagtttttagtttgttgttgtgtttgttttttttatggtttgtatagtttgggtttgaattttggttttttatggttttgggtaagttggttaattttttgtgttttaatttttttatttgtaaagtggggttggggaaaaattttattttatagggaatattaagtgagtttatgaaagtttttggtgtgtggtatgtgataattattatttaagtataaggtatgtttatatgtattggttgtttattatgatgtattagtatttatttaagttatttttttttagagtttgtttggaatgtagaattggttagtttttttttttaaatagtttttgtaatttttggttatttgtgtgggtagaggtgggagtgtgggtgtgtggttttgttttgggatagggatgatgagagagtatgtgtttgtgtttagagttgtttttttttttgtttaggggttattaaatatgtttatggtttttgttgtttggttaatggttattttgggttgttgttttttggttagatttggagtttataagttaattttagaaatgattggttgatttagttgttgttattatattggtttagaaggagggtggggggaggatgggttggggaggggtagtaaggggaagggatgtgtgttggtgtgtgtggagagggtgtttttttgtttttgtttttttggtttggtggggtttttttgtggttatttggggagatgttttagatagttgtggtttttgtgatttgtgttttttttgtagaaggtattattgggttgggttttagatgggtattttgtgagtggattggtgagttttaattttttggaatgtgttgttgggggttgtggtggtaggtttttggttttttggtttattttaggtttttttggtgttgagagtttttgaggtttgatttttttgtttgttgtttgtgttgtttattttgaaaataagagtgttttggtggaaggatttgagaataaaatgttggggtaaatggatatttgtaagaattattttttttaggttttagttgtttgttaataatttttaaaaatgtgtttagaattatgagttaatttttattgtgaatttttgtttgtagatgttagggtttatatttttttttaattattagtaatttttgttttattggtgtttagttatggttggggaagagttaggtttttttttttgtgttaataatgttgttgagttgaaatgttaattttaatgtttttttttaaattgtaaattaagtatgtatgagtgttgggggaagggtaatggaagtttatggttgaaggttttaattttatgttattttttttgagttttgtttgagggaaggtgttttatttggtattttggatagtaggtatttttttgaatgaagaagatttataggttttagtggttttatagtggggtagaagggggttatgttttgatatggagtttttttttaggagaggagaagattttattagttataggtttttgggttgttgtttttttgtagtttttttatggaggaggttaggagtggggaggtttggaatggggagtttagttggtttttagttggttttaagttgtttagtttggttttaatttgtaagtgtggggatttgggtttttattttgtagggtttggaatatgatgaggttgttatttttattttgtggttgtttaaaaagatgttgttttatttagtgtattagtttatggaggttgagtgttttattagggtttttagattttaataaggataatggtggttttgggtgttgtatttattgttgatttaagttgtatttttttatgtttgggtattatgtttagtgtgtattttgggagtagaaaagagaggggtttatatatttttaggttatggatgagttttagaaaataatagtggagaggagagagagaaaagaaggaagaggaggaggagaaggagaagaagagaaggaggaggaggaaaaaagtaggaggagaaagagaagaaggaggagaagaataata

SEQ ID NO: 2103 - DNA, 2475 bp, Artificial Sequence
  chemically treated genomic DNA (Homo sapiens)
tattatttttttttttttttttttttttttttttttgttttttttttttttttttttttttttttttttttttttttttttttttttttttttttttttttttttttttattattattttttagaatttatttatagtttaagagtatatagattttttttttttttgtttttaaggtatatattggatatggtatttaggtataggagaatataatttaggttagtaatggatatagtatttaaggttattattatttttgttggagtttagaagttttagtgggatatttagtttttatgagttggtgtattgaatgaggtagtatttttttggatagttataaagtgaaagtaatagttttgttgtattttaggttttataggatagaagtttagatttttatatttgtgggttgaggttagattggatagtttggagttgattgggagttgattgggttttttattttgggtttttttatttttggttttttttatggaaaagttgtaggaaggtagtagtttagaggtttgtagttggtgaggttttttttttttttgggagagagttttatgttaaagtatagtttttttttgttttattatggggttattgggatttgtgaattttttttatttagagaaatgtttgttatttggggtgttagataagatatttttttttagatagagtttaaggaaggtggtatgaaattgaaatttttagttatgaatttttattgttttttttttaatatttatatatgtttaatttgtagtttaaaaaagaatattaaaattaatattttgatttaatagtgttgttaatatgaaaggggaagtttggtttttttttgattataattgaatattagtgaagtagaaattattggtagttgaggaaaaatataaattttgatgtttgtgggtaaagatttatagtggagattaatttatgattttaaatatatttttaaaaattattagtgaatagttggggtttgaggagagtgatttttatgaatgtttatttgttttagtattttgtttttaaatttttttattgaaatatttttgtttttaaagtgagtagtatgggtaataggtaaaggaattaggttttggaagtttttaatattagaaaggtttaaaatagattaaaagattggaggtttgttattgtagtttttagtagtgtattttggaaaattaaaatttgttgatttgtttgtaaggtgtttgtttaaaatttagtttaatagtattttttgtaaagaggatatagattataggaattatgattgtttaagatgtttttttgggtggttgtgaagggattttattgagttgggaaagtaggagtgaaggagtattttttttatatatattgatatatattttttttttttattgtttttttttgatttgttttttttttattttttttttgggttaatgtgatagtagtagttgagttgattagttatttttaaaattagtttgtgagttttaggtttggttaggagatggtagtttggggtggttgttgattaggtagtagagattatggatatatttggtggtttttgagtagggaaggggatagttttggatataagtatatgtttttttgttatttttgttttagggtagggttatatatttatatttttgtttttgtttatatagataattagaggttgtaggaattgtttgaggaggagagttggttggttttatattttaggtagattttggaagaaaataatttgaatgaatgttggtgtgttgtggtaaataattagtgtatgtaaatatattttatgtttaggtagtggttattgtatgttatatattgagggtttttatgaatttatttaatgttttttatgaggtagggtttttttttagttttattttataagtggggaaattgagatataaaaagttaattaatttgtttaaggttatggagagttagaatttaaatttaggttgtgtgggttgtagaggaaatagatataatagtaaattaggggttataaaaaagtgttttgggtttggtatggtggtttatgtttgtaattttggtattttgggaagttgaggtgggtatattatgaggttaggagattgagattattttggttaatatagtgaaattttgtttttattaaaaatataaaaataaaattagttgggtgtggtggtgggtgtttgtagttttagttataggtggagtttgtagtaagttgagattgtgttattgtattttagtttgggtgatagagagagattttattttaaaaaaaaaaaaaaaaattagttgggtggggtagtggttgtttgtgattttagttatttgggaggttgaggtaggagaattgtttgaatttaggaggtggaggttgtaatgagttaaggttatgttattgtattttagtttaggtgataagagattttattttaaaaa

SEQ ID NO: 2104 - DNA, 2443 bp, Artificial Sequence
  chemically treated genomic DNA (Homo sapiens)
gtatttgatttgtggtatgtgttaatttattattgttaattgtagggatttagtgatttttttgaatttttgttatttttgttatggtttttgttttgtggaggtttgtggaatgggaagtggggaggggaaggagaagggggtggagttagttggagttttttggttaggtttggagttattttgttttgttatagtttttatgggtttagagtgggttttggggtagagggtttgtaaggataggggtgggtggttttgttgagggtggtgttttgagtaggttttattttttagtttgtttagtttggttttattttagttttgttgttttgttattttgtttttttgtgtttattttttattttttgttggggatattttaaggtttgttaaggttggagtaggggtgggatttagttatttaataaatgtttttttggttatgtagggttgggtattggggtggggggttgatttggattttttaagatattagattgtttaattgtttagtttttattggggtaagtgttttgttgagggtgaagggggttgtgagtgtttattagggagtttggataggttttgttttttatagttgttttattttttggagttgttttggtggtagatggtattgttttagaaaggtgaggttggagttgttttttttattaggggtggttaaggatgtttttagggttttttatgtaggtttttagggttattttgggtgtggttgagggtatgtagattatgttgtgtttttttttattttttatgtttgttgtttgtttgatatgttttttagttgttttgttttgtagaagttgtgtggttttttttgtgagtagagttgggttttatgattttttggagtagtgttagggattttttttaggtataattttaaagggggttttaggatttgttaggtttatggaagtggtttttgtaattttttttttggtggtagtttttggtgtattttggtaggggtagtttttttttattatagggattttgtgtgttaggttttagttgtgttgttgttgaattatggatttaatagtagagaagttttgtaggttgtttgtgttggtttgggaaattggggtttagttggggtttgttatggttttggtgttgttttgttttttgttggtgttatggagtaagtggagagatttatttttttggttttaagaggtattaatggaggaggttgagaggtaggagttgaataattgatggttttttttggtttaggatttgttgaaaatgatatggtgtaaggtagaggggttgagagtgttgattataaaatgttgagaagttattttagggtggttatggttagaaggaggatttttatttaggatggggttataggtatttggggtgggtgttagaggtttttgttttgggttattttagggggttaggatatttagaagttgggtttagaggtttatagggttggtttatttttattttttttttatatgtttgttattattggtgttttagtttagtaattttatggtttgttggttttgtttatagtttttattgttttttgtgtgttgggtgtgggtttttgagttttatttttagtttttttagttttaggagaggagtggaggataggggtttaatgtggggtgtggtgtggagtggggagggttgtggtgtttttttagtttttttttttttaatagttttagttttttttttggagaattttttatttgttgggtatatttggtttttttttattattttgtttttagttgggagatttttatttagtgaaatagtgaaataggaagggttttttggttattttgtgtagggtgtagggtatgtagtgggggagtggtttgtttttttagtgttttattgtttatatttttaggggagtatatagatgggtaggttgtggggttttgattttatggtagtgtttgggggtgaatgtttatagtttttgaaattttagtgggagtgtgttattgggtggttttttagtttagtggtttgtaggtggttggtgagagtgagtttaattagatttttgttttataataaggatagaggaatttttgtattttagggttttttgttttggtgtattaaaaaattggattatatgtgggtttggagaatgagtgtaaggttttattgagtggaagtagtttttagtagatgggggagttagaggggagatggtttttttttggagttaggtaatatttttgggatgtttagtagtttgtttttttttattagtgtgtttttttttttatatagaggtttttgtttttgttttgttagggttttgggtttttataggtataggatggaggtatggtaggttagggtggttttgggaaatgtaatatttgggtaggaaatgtttgtttttatttaggtttgt

SEQ ID NO: 2105 - DNA, 2443 bp, Artificial Sequence
  chemically treated genomic DNA (Homo sapiens)
atgaatttaggtgaggataggtattttttgtttaaatgttgtattttttaagattattttggtttgttatgtttttattttatgtttataaaaatttaagattttagtaaggtagagatagaagtttttgtgtggggagaggaatatattggtggaagaagataagttgttggatattttgagaatgttgtttgattttaggggaaaattattttttttttggtttttttatttgttgagagttatttttatttaataaaattttgtatttattttttaagtttatgtgtgatttaattttttggtatattaaggtaagaaattttgggatatagaaatttttttgtttttgttataaggtaggggtttaattgagtttatttttattagttatttatagattgttagattaaaagattatttggtaatgtatttttattggggttttaagagttgtaaatatttatttttagatattgttatggggttagagttttatagtttgtttgtttgtatgtttttttagaggtgtgagtggtggggtattgaagaagtgagttatttttttgttgtatgttttgtgttttgtgtggggtaattagggaattttttttgttttattgttttattgggtagagattttttggttggagatagaatggtggggagaggttagatgtgtttagtaggtaggggattttttaggggggaggttgaggttgttaggaaaggaggggttgagggggtgttatagttttttttgttttgtattatattttatgttaaatttttgttttttattttttttttggggttaaggaggttgagagtagagtttagaggtttatgtttagtatataggaggtagtgggggttgtggatggggttaatgagttatggggttgttgggttgaagtattggtgatggtaggtgtgtgagagggaagtgggggtgagttagttttgtgggtttttaggtttagtttttgggtattttggttttttggaatgatttagggtaggagtttttgatatttgttttaaatgtttgtgattttgttttgagtgggggttttttttttggttgtgattgttttggagtggttttttagtattttgtggttagtatttttagtttttttgttttgtattgtgttatttttagtagattttgagttagagaaggttattaattatttagtttttgttttttagttttttttgttagtattttttaaagttgggaagataaatttttttgtttgttttgtggtgttgataggaagtagggtggtattaggattgtgataggttttggttgggttttggttttttgagttagtataggtggtttgtaaggtttttttgttattaaatttataatttagtggtaatgtagttggggtttggtatatagggtttttgtgatgaggaggggttgtttttgttggaatgtattagaggttgttattagggagagagttataaggattatttttgtggatttggtaggttttagggttttttttaaaattgtgtttggggagagtttttggtgttgttttggaggattatggagtttgattttatttataggggagattatatagtttttgtggggtaagatagttgaggagtatgttaggtaagtgatgggtatggggggtgggggggagtatagtgtggtttgtatgtttttagttatgtttagggtgattttggaggtttgtatggaagattttggaagtgtttttggttatttttggtggaagagatagttttagttttatttttttaggatagtgttatttgttattaaggtagttttagagagtgggatagttgtgagaggtgggatttgtttaggttttttgatgggtatttatagttttttttatttttagtgaggtatttgttttaatgaaaattgagtagttggataatttgatgttttggagggtttaggttagttttttattttaatgtttagttttgtataattaaggaagtgtttgttgaatggttgagttttatttttgttttaattttggtaggttttggagtgtttttggtaggaagtggagggtgaatatagggggataaagtaatagggtagtagagttggggtggggttaggttgggtagattggggaatgagatttatttagaatattgtttttggtagagttatttatttttatttttgtaaattttttgttttagggtttattttaaatttatgagagttgtggtaggatagggtgattttaggtttggttaggaggttttggttgattttgttttttttttttttttttttttattttttattttataggtttttatagggtaggggttgtgataggggtgatagaagtttggagaggttattgagtttttgtaattagtagtaatgagttgatatatgttataggttaagtgt

SEQ ID NO: 2106 - DNA, 2892 bp, Artificial Sequence
  chemically treated genomic DNA (Homo sapiens)
gtttttttaattttagaggtgtgagtatgttggtttttttggtaagtttttttgggttttttgtaaattttaaatttataagatattttgtggggagatgagtttttgtttttttgttttttattttaaaatttaatatgtgattgggtatggtgatttatgtttgtaattttagtattttgggaggataaggtgggtggattatttgatgttgggagtttaagattagtttgattaatatggagaaattttgtttttattaaaaatataaaatttgttaggtgtggtggtgtatgtttgtagttttagttatttaggaggttgaggtaggagaattgtttgaatttgggaggtggaggttgtagtgggttgagattgtgttattgtattttagtttgggtaataaaagtaaaatattattttaaaaaaatagaaagaaataatatgtatttagaaaagggtatgtattataaatgaatagtttaataaatttttataaattgagtttaattttgtaattaatatttagagtaagaaagttgaatttaattagtttttgaaagtttagtatgtttttattttaggattattatttttttgatttttgaattgtttttgtttttttttttttttttttttttttttgagatggagttttattttgttgtttaggttggagtgtagtggtgagattttggtttattgtaatttttgttttttgggtttaggtgatttttttgttttagttttttgagtagttgggattataggtgtgtattattatgtttggttaatttatttttatttttatttttagtagagatagggttttattatgttggttaggttggttttgaatttttgattttaggtaatttgtttattttatttttttaaagtgttgggattataggtgtgagttattgttattggtttgtttttgttttttatgtaaatggaattatgtagtgagtgtttttttgtggttgattttattattttgatttatgtttgtgagatttatttgttatgtgagttgtggattatttatttttgttttgtttgttgtgtttttaagtttgaatattttatgatatttatttgttttgatgatgttaggttttttaattggaggaattatgaatgtgtggttatatgtttttttgttttttggagtatatgttgtatgtgtttttgttgagtgtaaggttgggtggggtgttggtggtttaaggggtttatggtgaatttataggaatattgttttgagttgtttagtggtgtttttatgtgttttatttagtttttttgtatttttatttgtattattttattttttttttttggaaaataaatttatttgtggttttaaagtttaatttatttttagtaattttggtagttatgaatttttatataagaggtttttgtaggtttagtgttaaagttgttttttttgtagttttggtgattttttgggtttttttttttggttttggtgttttgggtgagtttagtatatgttgggattttggttgtttgttggtttggtttgattgtttttgtttttgagggtagagttgggttttattttgggatatgtttggggttagttattgatttgtagttttttggttgagggtgtggggttggtggtaaggtttgttttagtgttttttagtagttgggtttttgattgtaggtttgggtttttgtttttttgtgtggagttgggtggggataatttttgattttgagttttttttttgagagggggtggggggaggaggggattgggttttatggagtgttgggggataggattgggggtatttggtttgaaggtgttttttttgtgttttttttggggaagtttgggatttaggtttttgtttttagttgtgggtgtgtgttttttgtagttggggtttggggagggagggttttggtagggggtgttggggagggaggattaggagatttgtggttttgtttttgttgtgttttttttttgggtgggataattgaatggtgtggttttggtttagtgttggttgttgaggtttggttggagtgtggagtttgtgttgttgttttaggattgtgtttgtgtttttgtttgttgttgtttattgtttgttgtttgttgtttatggagtgtgttgtgttgttgtgttgggttttgtttttgttgttgttgtttggtggttttgtgttgttggtggttggaggtaggggtgttttgggtttgttgttttagtttagggttttgatttttttggttttgtgttttttgtgagttttggaattatggggatttggagtttgtgtgttgttttgtgtggtgtttttggattgttagtgttgaggttttggtgatgttttttttttttatggttagttttggtttttattttttttttggtttggggatttgttttaaaattggatttttttattttttaaatatattgttttattttagttttagtaaatttagttggttttgggggttgtattttgggttttgggggtttaggggtgttagttgggttgggggatgttggttgggggttattgagtttagggtgttttgtatttgatgttggaagtgtttttggttatttttttttattgttttttgtttttatttttaggtaggagttgttgtatttagtttgtggatgtgaaatttgagtttggagggtgggaagtagttttttttttaggagatattagtggttttgggataggggttggagaggaagaaatgagaaagttagggagtagtttggaggtttttggggtgtagttgggaggatggaggggatgtggatttggttattttttttttgttttttttttgggatagagggtttaaggtagtggttt

SEQ ID NO: 2107 - DNA, 2892 bp, Artificial Sequence
  chemically treated genomic DNA (Homo sapiens)
gaattattgttttgggttttttgttttgggagggaggtagggaggaggtggttaggtttgtattttttttatttttttagttatgttttaaaaatttttaggttgttttttggtttttttatttttttttttttagtttttattttaggattgttagtgttttttggggaaaagattgttttttattttttaggtttaagttttatatttgtaagttgggtataatagtttttatttgggggtggaggtgggaagtggtgaggaaagatagttgagggtgtttttagtgttaagtgtaaggtgttttgggtttggtaatttttagttagtgttttttagtttagttagtgtttttgaatttttagggtttgggatgtggtttttggagttggttggatttgttaggattggggtaggatggtgtgtttgaggggtgggggaatttggttttgaaataagtttttaggttggggaggagatgaggattggagttggttgtgggggaggggggtgttgttgaggttttggtgttgatagtttgggggtgttgtgtagggtaatgtatggattttgagtttttgtggttttgaaatttgtagggagtgtgaggttgagggggttgggattttaagttggggtggtggatttgggatgtttttatttttggttgttagtagtgtaaggttgttgagtagtagtagtggaagtgggatttggtgtgatggtgtggtgtgttttatgggtggtgggtgatgggtggtgggtggtggtggataaaggtgtgggtgtggttttggggtagtggtgtgggttttatgttttggttgagttttggtagttaatgttgggttagggttgtgttgtttaattattttgtttgggaggagggtgtggtggaggtggggttgtgggttttttggttttttttttttggtgttttttgttgggattttttttttttggattttggttgtgaggggtgtgtgtttatggttgggggtgagggtttggattttagatttttttggagggggtatagagggggtgtttttgggttggatgtttttagttttattttttaatattttgtgaaatttgatttttttttttttttatttttttttgaggggagggtttgggattaaaggttatttttgtttgattttgtgtggaggagtggggatttgggtttgtagttggaggtttggttgttggggggtattggggtaggttttattgttaattttgtatttttggttgggaggttgtaggttggtggttaattttaggtgtgttttgggatgggatttgattttgtttttagagatagggatagttgggttaggttaataaataattaaaattttaatgtgtgttgggtttatttgggatattagggttggagggagagatttgggaagttattgaggttgtaggggaggtagttttggtgttgggtttgtgggagttttttgtataggaatttatagttattggggttattgaggatgagttaggttttggaattataagtagatttattttttaaagaagaagaataaaatggtgtaggtgaagatgtggaggaattggatgagatgtataggaatgttattgggtagtttaaagtggtgtttttgtgagtttattatggattttttgagttattgatgttttgtttagttttatatttagtagaaatgtatataatatgtgttttaaaagatagaaagatatgtagttgtatatttataatttttttaattgggaagtttagtgttattaaggtagatgaatattgtggagtatttgggtttaggagtatgataaatggaataggagtgaatgatttgtaatttatataatgggtaaattttatagatgtaagttagagtaatagagttagttataaaggaatatttgttgtatgattttatttatataaaaggtaagaataggttggtggtggtggtttatatttgtaattttagtattttgggaggatgaagtgggtggattgtttgaggttaggagtttgaaattagtttggttaatatggtgaaattttgtttttattaaaaataaaaataaaaataaattagttaggtatggtggtgtatatttgtagttttagttatttgggaggttgaggtaggagaattgtttgaatttgggagatggaggttgtagtgagttgagattttattattgtattttagtttgggtggtggagtgagattttgttttaaaaaaaaaaaaaaaaaaaaaaaaaggtaagaatagtttagaggttaggagagtggtgattttggagtgggagtgtgttgggtttttgggggttggttaggtttagtttttttattttgggtattggttataaggttgggtttagtttgtgagaatttattgagttgtttatttatggtatgtgtttttttttgaatatatgttgtttttttttgtttttttgagatggtgttttgtttttgttgtttaggttggagtgtagtggtgtaattttagtttattgtaatttttattttttgggtttaagtgatttttttgttttagttttttgagtagttgggattataggtatgtattattatgtttggtaaattttgtatttttagtagagatggggtttttttgtgttggttaggttggttttgaatttttgatattaggtgatttatttgttttgtttttttaaagtgttgagattataggtgtgagttattgtgtttggttatatgttaaattttaaaatgaaaaataaaaggataagaatttatttttttatagggtgttttataagtttgaagtttgtagagagtttaggaaagtttattaaggggattagtatgtttatgtttttgaggttaaggaggt

SEQ ID NO: 2108 - DNA, 2588 bp, Artificial Sequence
  chemically treated genomic DNA (Homo sapiens)
tattgattttattaagtttttttttaagtgttagtttttattttttttttttttgtttagaggagaaatttaaaattgaaatttttaatgtggatgggggtatagagtttttggttttttttggtgttttttgatttgggtatattttttttatgattatgtttgagatgttttttttttttttaggttttttttatagtggggttttttggaatgtttttttttaaatttatttatgtaaattttgttttttggaggttttagtttagttttggtattttttaggagtttgttttgtagagattttttggttttttgttttgtattttgtgtaggaagtttgattttttttttagttttttttgagttaggtttagtagtttgaggaagtgagggttgttgtatttgaagtggtgtttgtaggtgagggaggtgattatgttgtttatggttttgtttaagaggttgttggggtgaaaggggtgttttgggggtgggagatgtgggtaaggggttgttttttttgttttttgtttttttagtttttgttttgtgtttttttgtttattatttattggtttggttggtgaaggtggtataaaggtaggtggtttttttggttatttattgttttagtgattttttgtttaggtttaagttgtgtaaggtggatatggagaagtgtttttgtttgtgttatgtgggtttatagtgtgataggattatttttgggggtgggatgggtatgtgggtgttgttatgaaggttttggttttattttttgttatttattttaattttggtgttttataaggttttttgtagtttttagtttggtttagttgggtatagggtttattttttgtttatttatattgtttttttgtttggggtggggtttggttttattttgtttttgtttattttgattatttttttatttaaggaagattttgtttgttttgtttatattgagtttgtagtataggtgtggtttttgttattgttattttgatgtattagttttgtttattgggtttttggtgggtttgggtagtagttttgtttttttttagtttatagatttgtattttttttgtgtaggtggttttttggtttattgtttttagtttatttgttggtttttatttttgttttatgtttaggattttatgttttgttggtgttgtttgggttatggttattgtttatttggggtttatggaaatgtggtttttgttttttattgttgtttgttttgggaatgtggtttgaagtttaggatttggtagatgggtgtaggtgggtggttggttgtgtttttgttgtgggttattattgttttgtgtatggttgttagtttattgagtatgattattggtgtttaggttagttgtaggttgaatatgtttttgaagtggtgttgtaattgtagagggagggttagggttttttgttaagttaggattattttagattataggttttagttttatttgaattttggatgatttttggggttattaggagtgagtaggtggaaggaggagatttagttttttgattttggggtgggggtgggggttatattttttgtgatggaggaatttagtttggatgtgttatttaggtatgattttgtaagagttattaaaattgttgagaggttttagttagtattttatttttagatgatggtttatgttggtgagtagtgaggtttgaggatttatagtgtaaaaggtttgaattgggttattgtattttttttatttttgattttgtgatttaaatggtatttaggattaatttattttttatttttaaggtttttttttttggtgttagtagaagggattttgtattttataatatatgttgtttaatgggtttgtatgtttattgttaagtttagttttatttttaggtttttgttttatttttttttggtttttggaaaatttagttttttatgttatgtataaatgtttttttttaggatgttttttaaatttgttttttttttttagtttggtttttgatttagtttgtggtttaatttattatttatgtttgttggtggtggggtatttttaggatttttgttgttttttaggatttttttttttatttggttgaagtagtatggtgtgttttggaagtttatatgtagtaaggttgtttagtttgggtagtggtaggggatttggtgggtagtgtgtagtttagtgttggtgttggtgtattaggtttattaggagtaggaagatggttattattatggttaggggtattagtgtttttagttttatggttgttttattattaattgggtttttttggatatatttggtatttttattttattaggtatagaggattaggtaggatatttttggtatattgagtgtgtgattttttttttataaagggagttgatgatggtttttgttttttgttgtgagtgaatttgttgtgttgattgtgttgttagtggtagagttaggttagggtaggtatgggttgttttagaggtttttgttgttgttttttgttttaggtttttatttagggtagggtggtagaaa

SEQ ID NO: 2109 - DNA, 2588 bp, Artificial Sequence
  chemically treated genomic DNA (Homo sapiens)
tttttattattttattttgggtaagggtttggagtaggaagtagtggtaaggatttttggagtagtttatatttgttttggtttgattttgttattggtagtatagttaatatagtaggtttatttatagtagagggtgaaggttattattagttttttttataagggaagggttatgtgtttggtgtgttgagagtgttttgtttggttttttgtgtttggtggggtgggggtgttaggtgtgtttagaggagtttagttggtagtgaggtagttatggggttagaagtattggtgtttttggttatgatagtggttatttttttgtttttggtggatttgatgtattggtattaatgttgggttgtatgttatttgttaggttttttgttattgtttgggttgggtaattttgttgtatgtggatttttagaatatattatattgttttgattaggtgagggaggaggttttggagggtggtagaggttttgaggatgttttattattagtaaatatgggtggtgggttaaattataggttggattagaagttaggttgagaaggggaagtaggtttgggggatgttttggggaaggatatttatatatggtatgaaggattggattttttaaaggttaaggaagagtagggtaagggtttggaggtggagttggatttggtagtgggtatgtaagtttattgggtaatatatgttatggagtataaagttttttttgttgatattagaaggaaaggttttgggaatggaagatgagttagttttgagtgttgtttaaattatgaaattgaggatgaagggggtgtagtgatttggtttaaattttttgtattgtgggtttttgggttttattgtttattggtatggattattatttgggaatgggatgttaattggggttttttggtaattttggtgatttttgtaaggttatatttgggtgatgtatttaaattgagtttttttattatagaaggtgtgatttttatttttgttttaggattaggaggttgggttttttttttttatttgtttatttttggtagttttgggggttgtttaaggtttaaataggattaggatttgtagtttggggtgattttggtttgataagaggttttgattttttttttgtagttgtggtgttgttttggggatgtgtttagtttgtagttggtttggatgttggtggttgtgtttaatgggttggtggttgtgtgtgaggtgatggtgatttgtggtgaggatatggttgattgtttgtttgtgtttatttattaggttttgggttttgggttgtgtttttaaggtaagtggtggtgggggatagagattgtgtttttgtgggttttgggtggatagtgattgtagtttaagtagtgttgatagggtgtggggttttggatgtgaaatagagataaaggttagtgagtgggttgaggatagtgggttaggaaattatttgtatgggggaggtgtgagtttgtgggttgggagggggtggggttattgtttagatttgttagaagtttggtgggtgaggttgatgtgttgaagtggtggtggtggggattgtgtttatgttgtgggtttagtgtgggtgggatgggtgggattttttttgagtggaaaggtggttagggtgggtagagatgaggtggggttaaattttgttttaggtaggggagtaatgtgggtgagtaaagagtgggttttgtgtttagttggattgggttagggattgtgggagattttgtggagtgttagggttggagtgggtggtggagggtggggttaaggtttttatggtaatgtttatgtgtttgttttgtttttaggggtgattttgttgtgttatgggtttgtgtggtgtgagtagaggtgtttttttgtgtttattttgtgtaatttgggtttgggtaagaagttgttggagtagtgggtgattgaggaggttgtttgtttttgtgttgtttttgttgattaagttggtgggtgatgggtagaagggtataaagtgggaattgggaaggtgggggatggagaaggtaattttttatttgtattttttatttttaggatgttttttttgttttaatggttttttggataaagttgtgagtaatgtgattgttttttttatttgtgggtgttgttttgagtatgatgatttttgtttttttaggttgttggatttagtttaggagggattgaaggaggagttgggttttttgtgtgaggtgtggagtgagagattgaggagtttttgtagggtgagtttttgagaggtgttggggttggattggggtttttgaagggtaggatttgtatagatgggtttgggaaaggatattttaggagattttattgtaagaagggtttggaggaggaggggatattttagatatggttgtgggagaggtgtgtttgggttagggggtattaggagaggttaaggattttgtatttttgtttatgttggagattttgattttaggttttttttttgggtaaggagagagagggtggaggttggtatttggggagggatttggtgaggttagtg

SEQ ID NO: 2110 - DNA, 2282 bp, Artificial Sequence
  chemically treated genomic DNA (Homo sapiens)
ggttgaggtgggtggattatgaggttaggaggttgaggttattttggttaatatggtgaaattttgtttttattaaaaatataaaaaagtagttgggtgtggtggtgggtgtttgtagtttgagttatttttgaggttgaggtaggagaatggtgtgaatttggtaggtggagtttgtggtgagtttagagattaggttattggaatttagtttgggtgatagagggagattttgttttaaaaaaaaaaaaagaaaaaaaaaaaagattttgattttgttgtttaggttggagtgtagtggtgtgattttggtgtattgtaatttttttttagtttttgggtttaagtgattttttagttttagttgttggagtagttgggattataggtgtgtgttattatgtttgattaaatttgtatttttattagaaagggggttttattatgttggttaggttggtttttaatttttgattttgtgatttgtttgttttgattttttaaagtgttaggattataggtataagttgttatgtttggttttttgttttttttttttttttttttatttgaagattgagttttgtatttgttgtttaggttggagtgtaatggtgtgattttagtttattgtaatttttattttagtaggagagtaggaatttttagtgatttatgggtagatttgttgttattgtgggtatttgttttttttgtgatttttgtgtttgtttttttttttttagtatttattgtatgattttttatgtttgttttttgttattgttagtaagtgttttgtgtgggtatttggttgtgtttattaatttgttaagtttgttttgttatgggtgttgtgatgtgtttatgtgtttgtttttttaggtttaaaaggtgtgttgtttggtaatagaagaaattgttggtttagttgttggttgagttggtggttggatgaggatgtttagagtttagtttttgagagtttaagtaattgatggttttttattgtttttaggagtggttatttgggtattttgtgttttttttttttgtttgggtttaggttgaggatttgttagtagggtttagttgtttggagtttgtttagtttattttttagtttattttgtttgtgggatttttttgttgtttttgtttgtggattgagtggtaggttattttataagtatttggatatttgatatttgtggtgttaagataattttaagaaggttttttgtgattttgtaagttttgtttttttttttgggattttgtttttaatttgattgtataggtattatagtaagttagtgttgtgtgttttgagttttagggtgttttttagtttagttattgtattgagaatatggattttttgtggggtttaggagttgggagttatttttttggggtttataatagttggttgtttttagatttgtgtttagggaagatagtgttgagggtttttaaggagagtggggtagggatgtttgagtaggataaggattttagagtttaagagaattttggtgattagagaagggtttttgaggttattggggatgtattgtttgtattttggtttttgtgggataatggaggtttttttttttttgtgtttgggtttgggtttttgtagatagatttttatgtttagaggttagaaattagatatgattagttattttagattttttggatgagtttgtgtattaattgaaatgttatttttagtttttatagttttatgggaggtttgttggggttaaagtggaggagggggttagttttattttattgttagttgatttttagttttttaaagatagtgagtgaggataggttttaggttgtttttttgggttatatttagtgtgaaaaggtggtagagaaagtattagggtagatatttgtttttaggaatgatttttttagatttgaggtttttaggtttagtatatgtaagttttttttgttgttatataggtgaggggagtttttgatgttgttattttttgtagagttggggtattgggttattgttgaagatttggattgggagaaggaggtggtattttagtgtattaagagtgtattgtaggttgaggataaggttattttagattgtagatttttatggtttttttatattttgtttttatttgtaataggggtttttggtttgtttgttgtttttaaagtatttagtatggatgtatagtaggagagatataagttttaagattgtttgggtttagtggtttttttagtat

SEQ ID NO: 2111 - DNA, 2282 bp, Artificial Sequence
  chemically treated genomic DNA (Homo sapiens)
atgttaggggggttattaggtttaggtagttttgggatttgtgttttttttgttgtgtatttatattgggtgttttagaaatggtaggtagattagaagtttttgttgtaagtgaggataaagtgtgggaaggttgtgagggtttgtagtttgagatggttttgtttttaatttgtagtgtatttttgatgtattggaatgttgttttttttttttagtttaggtttttagtagtgatttggtattttagttttatgggaggtggtagtattaaaggttttttttgtttgtgtggtagtaggggaaatttgtgtgtattgggtttagaggttttggatttggaggagttatttttgagggtgagtgtttgttttggtgttttttttgttatttttttatattgggtgtgatttgaagagatagtttgaggtttgtttttatttattgtttttgaggaattgagggttagttggtagtgggatgaggttggtttttttttttgttttagttttggtaagttttttgtggagttgtaggagttggagatggtattttggttggtgtatgagtttgtttaggaggtttgggatgattggttatatttgatttttgatttttgggtatggaggtttgtttgtagaggtttgggtttgggtataaagggagagaggtttttattgttttgtaggggttgaaatgtagatggtgtatttttggtgattttggggatttttttttgattattaggatttttttggattttagggtttttgttttgtttaggtatttttgttttgttttttttgagggtttttaatattattttttttggatataagtttggggatagttggttgttgtggattttaaaggggtgatttttagtttttgggttttatagagagtttatgtttttagtgtagtggttgagttggaggatgttttggaatttggagtatatagtattggtttgttgtggtatttgtgtaattaaattgaaggtaggattttagaaaggaaggtagggtttgtaggattatggaaaatttttttagagttgttttgatattatggatgttaagtgtttgggtgtttgtaggatggtttgttatttagtttatgggtaggagtaatggggagattttataggtaaagtgaattgggggatgggttgaatgggttttaggtaattgagttttattggtaggtttttggtttgggtttgaataggaaggaggggtatagagtgtttaggtaattgtttttgggagtagtggggaattgttggttgtttgaatttttgagagttgggttttgagtgtttttgtttagttgttaatttggttaatggttaagttagtagttttttttgttgttgggtaatgtgttttttaaatttgagggagtgggtgtgtgagtatattatggtgtttgtgatagagtgagtttaatggattaataagtgtagttaggtatttgtgtgaggtatttgttggtaatggtgggaggtggatgtggggggttatgtaataggtattggaaggagagaggtgggtataaaggttgtgggaggaataggtgtttataatggtggtagatttgtttgtggattattgaagatttttgtttttttgttgaggtggagattgtagtgagttgagattgtattattgtattttagtttgggtaataagtgtaaaatttagtttttaaataaaaaaaagaaaaagaaaaataaaaggttgggtgtggtggtttatgtttataattttagtattttgggaggttggggtggatggattatgagattaggagttggagattagtttggttaatatagtgaaattttttttttagtaaaaatataaatttagttagatatggtggtatgtgtttgtagttttagttattttggtggttgagattggagaattatttgaatttgggggttgggaagggattgtgatgtgttgagattgtgttattgtattttaatttgggtaatagagttagagttttttttttttttttttttttttttttgagatggagtttttttttgttgtttaggttggattttagtggtttgatttttgggtttattgtaagttttgtttattgggtttatgttatttttttgttttagttttgggagtagtttggattataggtgtttgttattatatttggttgtttttttgtatttttagtagagatggggttttattgtgttagttaggatggttttgattttttgattttgtgatttgtttgttttggtt

SEQ ID NO: 2112 - DNA, 2731 bp, Artificial Sequence
  chemically treated genomic DNA (Homo sapiens)
gggttaggtattgttagtttatgttgagttttttggtggtgttgttttgtttatttttttttttgttttgtgtagtaaattgatttaggatagttgtatggagagttttattttgattttgttgttgtttattttggatgttgagattgagaagtttattaggatgaaggatgaggaagtatgtggggtggtgggggtggtggaggtgggtgttagggatgtttttttgtggtgttgtttatttgttgggttgtttttgtttgtagttgaggtgtatgtaggagatgttgtagaggatgaagtagtagatgtaggattagtgatgtttgttgtggatatattgtttgtttttgggatgtttttgtatttttggatattagattggattgtttttgatttggagatgtggggttatagtttttagttgattttaatttatttttagtattatttttttttaggttattgtgtttgtttttgaggggtttggattgtagtttttgtttagttggttttttttgattttgggggattaggagtgaagttgggtgggattttagagatttgttttttttgttttttttttgtttttggatggttatagtatttaaattgtaggttttgttttggtaggtaggtaaagttaggtagaagaggatttttaggattttgggtttgttttttgttttagtgttgtagaatggatttgggagtttttttttgtttgtttttgtgggttatttagtgagtgttgagattttattttttgttgaggtgggttgagtttttttttatttttagatgtttagtgggtagggttgggttgaattaaatgggagttttttagatataaggaggttagaggttgtaaggagtggggttgtgattgtttatattttttttttatagtttggtttgatttggagggtttttggggtattgggtggtgagttattttttggtaatttttggtgttgttttttgtttttgtttgaggttttttttttttagtattgttgtggtgtgttgggattttgagtttaggttttttgatgtttttatttgtatgatttttttttgttatatgatgttttgtttttttttgttgtgaatgttgtgttttgttttggtgataggagaataatgttggtgaatgttgtagtgggtgtttgagtgttttgtgtgtttttgagagtgggtgggagtggaagtttgagtggtttgtggtttttggtgatagtgtgttatttgttgttgtagtgtgtgtttgtgtggtttttgggttatttttggttaggttgtagtattgtggttggtgtgggtgtggtaggggtggggtggttttattgtttggtttttttgtttatgttttttgttgtagagtaagttgggttgttgtttttttgttatgggttttggtgagtttggagtttggttgggtttttggttgttttttaggttgatttgggttgagaggagttttggttgtttggttgtagttgggagagatttgggttagatttagaggggatttttagttggtgtgtggggtggttagggtggagaggttggtgggttattgggatgttgggtattaggggttggatggagttgggttggtagtttgggtatttagagatgttgtttaggtgtttgttgattgtttggtttattgtggtgttttttttgtagggttgtgtggggtgttgagtttattgtttttgttgttggttttgttgagttgtttggttgtaggttgtttggtgttttgtagttgtgtggggatgtttgtggattgtgggtgttgtgggttgatttgggttttgttgttgattgttttttttgttgatataattgagttggtgttgattggtaataatttgatggtgttgttgttggggttgttggatgtgttgtttgtgttgtgtattgtatatttgggtgttaatttttggtgttgtgattgttgttttgtgttgttgtgtgtttggttggttggttgttttgagtgtgtgttttattgtgatttgtgttgtgtggtgtttttagtgttgtgtggttgtttgttgttttatttggttgaggatgagttgtgtgttgtttgtgtttttggtttgttttgttggggggtgttggtggtgtagtttgtgttgttgggttttgggttgttgtatgtgttgttgttggtgttgttgttgtgttgtttgtggaggttgtgggtttgggtttgtgtttgtgttgtagtttggttgttgttgattgatttgttggtggttgagtgagttggaattgatgagttttgaggagagaattggtgtgttttgaggagagaattggtgttgggtaatatgggtttgtaaatttgataggattttgtttgaggggtttttgtgttaatttggattggtttttgttttttttgttgtttaattttttagatttattttatttgtaggtttagattatgtgggatagaatttttgtttattttattttgagggaggtgaatttgtatttttaggtttgggaggattatggggtataatgtggtttagattttgttgtgttttttttttaaattttggtgttgaataaatttttttgatttggttttttttgtatgattgatttggaaattttttttgttaaatttaggaaaaggttttaggaggtggtttaaggggatataaatatatttttatatgtttattttaattttaggggtagatag

SEQ ID NO: 2113 - DNA, 2731 bp, Artificial Sequence
  chemically treated genomic DNA (Homo sapiens)
ttgtttgtttttgaggttagggtgggtatgtgaggatgtgtttgtgtttttttgaattgttttttggggtttttttttgagtttggtgaggggaatttttaggttagttgtgtagagaagattagattagaagggtttatttagtattagagtttggaagggagatgtagtagggtttggattgtattgtgttttatggtttttttaagtttggaagtgtgggtttgttttttttggggtagggtgggtaggagttttgttttatgtggtttgggtttgtaggtggggtgggtttgagagattgggtagtggaggaggtggggattggtttaggttggtgtgagggttttttgggtagggttttgttgagtttgtaggtttgtgttgtttagtgttggttttttttttaggatgtattggttttttttttaggatttgttggttttggtttgtttggttattagtgggttggttagtgatagttgggttgtggtgtgagtgtgggtttgggtttgtagtttttgtaggtggtatagtagtagtattagtagtaatgtgtgtagtagtttaaggtttagtagtgtaagttgtgttgttagtgttttttagtagagtgggttgggagtgtaagtggtgtgtagtttgtttttggttagatagggtagtaggtggttgtgtagtgttgggggtgttatgtaatgtaggttgtggtagggtgtatgtttggggtggttggttagttaggtgtgtagtggtataaggtggtagttgtagtgttaggggttggtgtttaggtgtgtggtgtgtagtgtgggtagtgtgtttagtagttttggtggtagtgttgttaggttgttgttggttagtattagtttggttgtgttgatagggaaggtggttggtagtgaggtttaagttagtttgtggtgtttgtagtttatgagtgtttttgtgtagttatagggtgttgggtaatttgtggttgggtggtttggtggggttagtagtaggagtagtaagtttagtgttttgtgtggttttgtaagggaagtgttgtagtaagttgagtggttggtgggtatttgggtgatatttttgagtatttagattgttggtttggttttatttagtttttgatgtttggtgttttggtagtttgttagtttttttattttgattattttgtatgttggttggaagttttttttaagtttgatttaagttttttttagttgtagttaaatgattagagttttttttaatttgggttggtttagggagtagttgggggtttgattggattttagatttattggagtttatggtgagaagatggtagtttggtttattttgtagtgggaggtgtaggtgggagagttgagtgataaggttgttttgtttttgttatgtttgtattgattatagtgttgtggtttggttagaaatagtttagaggttgtgtggatgtgtgttgtagtggtagatagtatattattgttggaggttgtaggttgtttaggtttttgtttttatttgtttttaggggtatatggagtatttggatatttgttgtgatgtttattaatattgtttttttgttattaggataggatgtggtatttataatggaagaaaatggagtattgtgtggtgggaagggattatgtgggtgggaatattgggaggtttaggtttaggattttggtatattatagtggtgttggggagaagaggttttgagtgagggtaggggatggtattgagagttgttaggaggtggtttattgtttagtgttttgggggttttttaggttgggttgggttgtggagaaggggtgtaagtggttatgattttgttttttgtagtttttggtttttttatgtttggagggtttttatttgatttagtttaattttgtttgttaggtgtttggggataagggaagatttggtttgttttgatagaaaatggggttttagtatttgttgggtgatttgtgggagtaggtaaaggagggtttttaagtttgttttgtagtattggggtagggaatagatttaggattttgggaatttttttttgtttagttttgtttgtttgttagagtagggtttgtggtttgggtgttgtgattgtttgggggtgggggaagggtaagggaggtggatttttgaagttttgtttaattttgtttttgattttttaaggttagagagggttagttgggtgggggttatggtttaggttttttggaaatagatataatgatttgggagggggtggtgttgagaataaattagggttagttgggggttgtggttttgtgtttttgggttgggaatagtttggtttggtgtttaggggtgtgagggtgttttggagatggatggtgtgtttgtggtgagtgttattggttttgtatttgttgttttattttttgtagtattttttgtatgtgttttagttgtgggtggagataatttggtgggtgagtagtattgtggaggagtatttttgatgtttgtttttgttgtttttgttgttttatatatttttttattttttattttgataagttttttagttttggtgtttggggtgggtagtggtaggattgggatggggttttttatgtggttgttttgggttagtttgttgtgtggggtgggggggaggatgggtggggtggtgttattgggaggtttagtgtgggttggtgatgtttggttt

SEQ ID NO: 2114 - DNA, 2284 bp, Artificial Sequence
  chemically treated genomic DNA (Homo sapiens)
aggaatattaaatttattagtttgtttttttttttttttggggtagagttatattttgtgtaatatgtattatatttttatttgttttttgattagtataaaaattaaaatatatatatatatgtatatatttatatatagatatatatatttattaagagagattaaataaagaagaaaattatgtttattggttagtagaaagatttgttattattaaggaatatgttttggtgtatgtggggataaaaagatattttgtggtttaataggttagtaagttttgtattgataaaagtaaatgggtgtttattttggttaatatggtgaaattttgtttttattaaaaatataaaaaaaatttagttgggtatggtggtgggtgtttgtagttttagttatttgggaggttgaggtaggagaatggtatgaatttgggaggtggagtttgtagtgagtagagatggtattattgtattttagtttgggtgatagagtgagattttgttttaaaaaaaaaaaagtaaatgggtgttttttttataaggtaggttgatttttagtatgagatgtgtattgtaaagtaataagaagaatttagatatttggtgttttttttttttttttttttttaatttatgtggtggtgaatgttttgtatggggtatttttttggattaagtttttagggtatattattaggggttggggtagggaattaaaaattgtagtagttagtttttaagagtttttttaatttgtgaaagttgatgtttttattttagttgttttatttgtttttttttttaataatttttttatgtaatttttttttatttttgtttgtgtttgttttgatgtggtttataattatggttttattgattttgtttttgtgttataaaattattttgtgtttgtgatttgttttatggtattttttaagaagtggttttaattttttttgggataggtatattattatgtattatagggtaggttaggttgtaggaggagtttgtagttttggaggtttttggttttttttttattttgttgtttgttttttagtgattagttggaatttaagatagtaatataagatgtgttgttggtgggagtgatggagtgtttgttgagtgggttgtagataagtattgtgattttggaggatgttttattattttgttgtaagaatatgttaatgggtgattgtttgaatgtttttagttaataggatattatttataatattttggttagttggaatggaagatgataagaaattaaatttttaatggttttttttaagggaggattttttttaggggaattaggaattttgggaaattgttttatgtattttggtaatatttatatggagagaattggttttaaatgaatttttgagggttatataaagggtaaaagaaagagaataaaaagtaattgatattaattgggtttttattatgtgttaagtatttagatattttatttatattatgttattttattttggttttgtttttgttgtgataaggtattattaagtttattttagaattgggaaaattgaggtatatagaggtgagttgatttggttaaggttttatttttggtgttggagttatgatttatattttaaagtaatattttttttgtgaaatgaattatggagagagaagttgtttgggagaagtagtttttatatgtaatttgaaaggtggagaagttatagttgtatagaggtagttgtagtaggtgtagagggaaggtgagggttgtgtaggtggtttttattgatgtttgggaattatttattttttggatatttgtagttaatattatttatgaatattttttgtggtttttgagtttttgtattttttggaagtttttttgagttttgttttttttgtttttttaataagtaaggaagtttttgattttatgtattaaatttttttttgtttgaaatattgagaagaatgatagaattttgtttgtaaagtattttgtgtaagtattatatatatgtatggtatatatatatatatatttaatttataaaggtaaatttttaagaatagaattataggttatatatgttggggatataagatattataatgataatagtaatagtatggtttttttttttaatatggaaattatttttggaataatttttataagtttgggaagaaagagattatattattttttattaataattgttttttatatataatgaaattttttttttagataaataggatag

SEQ ID NO: 2115 - DNA, 2284 bp, Artificial Sequence
  chemically treated genomic DNA (Homo sapiens)
ttgttttgtttatttagaaggaggattttattatgtgtaaaaagtagttgttggtaaaaagtagtgtggtttttttttttttaggtttgtagaaattgttttagaaatggtttttatgttggaaaaaaaaattatattgttattgttattattgtaatattttatgtttttaatatgtgtgatttgtaattttatttttgggaatttatttttgtgagttgagtatgtgtgtgtgtgtgttatgtatgtgtgtaatgtttatgtagggtattttgtaagtagggttttgttattttttttagtattttaagtaggaggggatttgatatatagagttagaagtttttttatttgttggaaagatagggagagtaaagtttagaaaagtttttaggaaatgtggaagtttagggattgtaggaaatatttatgggtaatgttggttgtaggtatttaggaaatagatgatttttaggtattaatagaagttatttgtataatttttgttttttttttgtatttgttgtagttatttttatgtgattatggtttttttattttttaaattgtatgtgagggttattttttttagataatttttttttttataatttattttatgagaagaatattgttttagaatgtaaattgtgattttagtattagaaatgagattttggttaagttagtttatttttgtgtgttttagtttttttagttttgaaatgagtttaatagtgttttgttataatagagatagggttaggatgaagtaatgtgatgtaggtaaaatgtttaagtatttggtatgtagtagggatttggttaatgttaattgttttttgtttttttttttttattttttgtgtaatttttagaggtttatttaaagttaattttttttgtatagatattgttagggtatatggagtgattttttagggtttttggtttttttgggaaaagtttttttttaaagaaagttattaaggatttaattttttattattttttattttaattagttagagtgttatgaataatattttattagttggagatatttaaataattatttgttaatatgtttttatggtgaaatgatgaagtgttttttgaaattatggtgtttatttgtggtttatttagtaggtattttattatttttattaatgatatattttgtattgttgttttggattttaattaattattgaggggtgggtagtggggtgagaggagagttagaagtttttaggattgtaagttttttttgtagtttggtttgttttgtggtatatagtaatgtgtttattttagaggggattgaagttattttttgagaaatattatgaaataaattataaatatagagtgattttgtaatatgaaaataaggttaataaaattatgattgtgaattgtattaagataagtatagataaaaatgaagaagagttatgtagaggagttattgaaaaaaaaggtaaatgaaatagttaaaatagaggtattaatttttatgagttagaggagtttttagagattggttattgtagtttttaattttttgttttagtttttagtagtgtgttttagaggtttagtttagagagatgttttatatagagtatttattgttatataggttggggaaaaaaaaaaaaagaaaatattgaatatttaagttttttttgttgttttgtaatgtatattttatgttaagggttaatttattttatgggaaagatatttatttatttttttttttttgagatagagttttgttttgttgtttaggttggagtgtagtggtgttatttttgtttattgtaagttttattttttaggtttatgttatttttttgttttagttttttaagtagttgggattataggtgtttgttattatatttagttaaattttttttgtatttttagtagagatggggttttattgtgttagttaggatggatatttatttatttttattagtgtaaggtttattaatttattgaattatagaatgtttttttgtttttatatatattaaaatatattttttggtagtgatggatttttttattagttagtgagtatagtttttttttttatttagttttttttgatgaatatatatatttgtgtgtgaatatatatatatatatatatattttaatttttatattggttagagagtaaatggaagtgtgatgtatattgtataaaatgtagttttattttaaggaaagaggaaaataagttaatagatttggtgttttt

SEQ ID NO: 2116 - DNA, 2519 bp, Artificial Sequence
  chemically treated genomic DNA (Homo sapiens)
gtagaggaaagggaagatgattataggattagtttattttggaatagatttttgaagggttggatttggggttaaggaataggagagaaaagttttttttatgtattttggtataattatagtgatttttaataattattgtttttttagtaaaattgttgaaatttagaataatattttttaaattagttattaggggaaagggtaattaattttttttttttttaaattgtttaattatatgaattaatatatagaaaattatattgtagtgtatattgttttttagtaggtgtggtggtatggaaggatgtgaatgattttgggagtggtgggtgaggagggaaggggagtgagtgggtgtgaggtgtttgtgtttttttggggtttgggagggaaagggagagggtgtgaggtgtttgtttttttggggtttgggagggaaggtgagtaggtttaaggtgtttgttttttttggggtttgggagggaaggagagagggtgtgaggtgtttgttatttttagggtttgggagggaaggggagtgggtgtgaggtttttgttgttttgtgaggttgtggagtttgttgtgtttttttttttgtttattttttgatttgtaggtttatggtgtttaaggtaatagggtttttagttttggaattaattttttgggttttggaatgtaatttatataaatttggattttgttttttattggtggggagttgtttttgtatgtagatgtggagaagttgtttttatttgtagttttttttgtggatttaggttgttttttttatgttttttttggagtttttagattttttgtggtgtttttggtattgtttttattgttttatttataaagagttttagtttttttttggggggtgatttttttagttagttgttgtatagtatgtggttattttttgtgtttttgttggtggggttatttttgggttatgaagataaaggtgtaaatgttgggttaggtgggtatagtttttgggagggtgagggggatggtagggatatgggggttgtagtttatagtgaaggtgggggagatagggtgagagggtgttgttggaggtggggtgtgagggatggtttgtgatattttgggattgtggggtagaaagtgtagttttaggggaggttggggttagaggtgaagtttgtggggagggtgagatttgggtgtaggtgtttataggtgagggtggggtttaggttttagttgggttttgagttttggtttaggtttttatttgtggttttggttttaatttgaggtggagtttgggattaaagtttagatgaggttttttgtttagggtttgtgttggggattggggtggggatttgtattttgggttagtttgggtgtattttattgggattattggggtgggggatatgggttgggtggttttttgggagaagagggatagggagtgtagttggtggagaggataagaatgaggggtgtagtttatttagagggttataatagagttttaggtgttgagttttatgtgttagatgaggaaagataatggaagagtttaggtttttgttggggtttgagttttagtttgggatttggtttatggtttattttttgatttgagttggggtttggggttaaggtttaggttaggatttgagttttgggttgtagtttgggggtggggttaggttttagagtgagggtttgggtttgtttgtgttgtgtatgtttgtgaatgtattgggatgttattgtgtgtatttatgttatgtgtgtgtatgtattagtgtgtgtatgtgtgagtgtttattgagtgtggtattgatagttaatttttttttttttatttatgttttattgttttattttggttggggtgggttttataagttttttttttgggttagttggaggtttttatgttgtttggggagagaagggaaggagagaataggttaaagatgagggtagtttggttttaattagatttggtgttatggggattaagaagttggaggtttttgttttttgtttttggaggagtttggtttgtttttttgtttatatattgtgtgaaagtatagttgggggtatttgatatgtataggatttgtttttgtttttgtagatgttttagagaataggatagataaggggtttttttagtaagttatttttaatgtgtattgtatgttagtttataagaggggtataggggttttattaggtagtagggaggatgtaaggaagagtgtgtggggatgggggtgttgggtggggttaggtgagtgggtgtttggtttttttttagagtaaaggaaagtgttgaagagtgtgaaattgtgtgatatgttatgttttatgttttgagaatggattgtaggaataagtagatatgggggatttgatgagggttaatgggatgtttatagagataagatttggtttgagttggtgggaaaagtggagatggagttatatggaggaaattgtagagttt

SEQ ID NO: 2117 - DNA, 2519 bp, Artificial Sequence
  chemically treated genomic DNA (Homo sapiens)
agattttgtaattttttttatgtggttttatttttattttttttattagtttaagttaaattttatttttatggatattttattggtttttattaggttttttatgtttgtttgtttttgtaatttatttttaaaatataaagtataatatgttatatagttttatattttttagtatttttttttgttttgaggagaagttaggtatttatttatttggttttatttagtatttttatttttatatatttttttttgtattttttttgttatttgatggggtttttgtgttttttttgtaagttgatatgtagtgtatattggggatggtttattgaagaggttttttgtttgttttgttttttaagatatttgtagaggtaagaatagattttgtgtatattagatgtttttaattgtgtttttatataatgtgtgaataaagaagtaaattaagtttttttagaggtaggagataaggatttttggttttttggtttttgtgatattgggtttggttgaggttaagttgtttttatttttgatttgtttttttttttttttttttttttaggtaatatgagaatttttaattggtttagggaaggaatttgtaaagtttattttaattaggataagatagtggggtataaatgggaggagaggggttggttgttagtgttatatttaatgaatatttatatatgtatatattgatgtgtgtatatatgtgatataagtatatatggtgatattttaatatatttataaatatatataatataaataggtttaaatttttattttgaaatttaattttatttttaaattgtaatttggaatttaagttttagtttgaattttgattttaaattttaatttaagttagaaggtaaattatgggttgaattttgaattggaatttaaattttagtaggaatttgaatttttttattgtttttttttatttggtgtatgggatttagtatttgagattttgttgtggttttttgaatgagttgtgttttttgtttttgttttttttattagttgtgttttttgtttttttttttttaaggagttatttggtttatgttttttgttttggtggttttgatgagatgtatttaggttgatttagggtgtaaatttttattttaatttttaatgtaaattttgaatgagaggttttgtttaaattttaattttaaattttattttaaattggaattggaattatagatggaagtttgaattggaatttaaagtttagttggaatttgaattttgtttttgtttgtgagtatttgtgtttgggttttgttttttttatgagttttatttttgattttgattttttttagaattgtgttttttattttgtagttttagggtattgtaagttgttttttatattttatttttagtaatgtttttttgttttgttttttttatttttattgtgagttgtagtttttatgtttttgttgttttttttatttttttgggagttgtgtttatttgatttggtatttgtgtttttgtttttgtggtttggaagtggttttgttggtggaagtatgagaagtggttatgtgttgtatagtggttggttgaggaagttgttttttgagaagaagttgaggttttttgtgagtggggtagtgggggtggtattaggagtgttatggagggtttggggattttgggaggggtgtgggggaggtggtttgggtttatgggaggagttgtgggtggaggtgatttttttatgtttgtatgtgaaggtgattttttgttagtgagagatagggtttaggtttgtgtgggttgtgttttgagatttagggagttgattttagggttggggattttattattttgagtgttgtgggtttgtaggttggagagtgggtgggaaaggggatatagtaggttttgtagttttgtaaaatggtaggaattttgtatttgtttttttttttttttaggttttgagaatggtgggtattttgtatttttttttttttttttttaggttttaaggaaggtaggtgttttaaatttgtttatttttttttttaagttttgagaaggtaggtattttatatttttttttttttttttttgggttttaggaaaatgtgggtattttgtatttgtttgttttttttttttttttatttgttatttttggggttgtttgtgtttttttatgttattatgtttgttgagggatagtgtgtattgtagtgtagttttttatatattaatttatgtggttaaatgatttagaaaaaaagaagattggttgtttttttttttagtggttaatttgaagagtgttgttttaaattttaataattttattgaggaagtggtaattgttaggagttattatgattatattaaggtatatagaagaggttttttttttttgttttttagttttaggtttagttttttaagaatttattttagaataagttgattttatagttatttttttttttttttgt

SEQ ID NO: 2118 - DNA, 2452 bp, Artificial Sequence
  chemically treated genomic DNA (Homo sapiens)
gaatattttatttaaaagaaggtttttttatagagtatattaggatggatttttagaattattggttggttgtattttatttttaggtttttgattggagatttttttatgtattgtttattgatttttgtggttgaaagttttgttgttttagttagatggtaaattatattttaaggatagatatttgttatatatgtttgtgttttttagagttgtatttagtatagagttggttataaagtggtttttttaaatttttgtggttttagtttaataaatatttgtaattttttatagttgaataaagatgaatgattttaatttgtttaagttaggttggattttttttattttgattatatatttggttttataaagtgttgagtgataggaagaaagaatggtttttattggttgagttgaagggttttgagtatattttttttaatagtataatttggttttttgatataaaaggtagggaaaggaaggggtagtggtttttaatgaatagagatggatggtggttgggtttttgttgttattgttgtgtttattgggtagattagttatattttttggtttaggttaaagattagggtagatgatatatggggtatttataggagagttgtgtttagggttttttgttggttttggaattttttagaatggttttttatatattttttgttttttttttttttttttgttttttttggaattttttagagtgggtttttatatatttttttttttttttttttttttgttttttttttttttttagtgaaaggatttttttggtaagagtgttaggttttagttgtttgtgttttgggaaattataagattttttttttttttttttttagttaggattatatatgtagagttatttggtttttttggtttgtgtagttgttgttggttgggttgggggattatgttaggtagtttagttagaggtgagttgggttataggggtgagttgttaggtttgtttatttttttttttggtgtgatttttttaagtttaatttttagggattttttttaggaatgttgagagtattagttgttttggttatgttaggtatttggttattaggtttttttttattttaggggtaattattgttagagggaaaaatggaaatattaggttatttgtgatttgtatatttattttttgtttagagagataagtaggaggttaggggaatagatgggattgtgggaatagttaagggtagagggtgaagggtggtgattagaaggaaagatggaatgtttatatattttttgttgtttttggttttagttgtggaggaagtggggtttggaggatattgtattagataggttttgtttagaaaattggaaaagaataaatattgattataagagtgtaggagaatgggtttttttattattaaaaataggtatttagttaggtgaagtgatttatgtttgtaattttagtattttgggaggtaaaggtaggaggattgtttgggtttaagagtttgagattagtttgggtagtatggtgaaatttagtttttataaaaaatattaaaaattagttgggtgtggtgatgtgtttgtggttttagttatttgggtggttgaggtgggaggattgtttgggtttgggaggttgaattatgtttatattatggtattttagtttggatgatagaatgagattttgtttttaataataatagtaataataataataaaatatatatttattagttatgattttgttttataggataattggggtaaaaatgtttttgggtgaaattgggtaatttaatttgaaaggtttgggaaatatggtttaattttagttttgtttgttatttataggttaagtggaggttgtggtttataatatattggatattagatattattaatgtttttattttataaatgggaaaattatggttgagaggttatttgattttttaagtttatttagagatgtggggatgggttgagttttagagtttgggttttgttttgttttattttatatagtatgaagttttttggttaattaaggaaggagtgtaaggtgattgaagaaaataaaaataaatagaattgatataaaaaataaataaataaaattgagtgttaaagaaggagaatttgggggttgaggttgtggttgtagagtgggagtggggataattaatgttgggtttttgagtgtttttggaagggtgggttttggtgtttagagtgtttggtgtttattttttttttttttttagggtttttgtttgagagtttttttatttatttttggttgttggggtatttgatattttttaaaatataatttttatatttttaatagtgggttgtggaggagttaggattagagtttttagtttagatttttttttttgaaaggatatggttttag

SEQ ID NO: 2119 - DNA, 2452 bp, Artificial Sequence
  chemically treated genomic DNA (Homo sapiens)
ttaagattgtatttttttagggaaggaaatttgagttagaggttttgattttgatttttttgtagtttattattaagggtgtgaaaattgtgttttggaaaatattaggtgttttagtagttaggagtgggtagaagagtttttagataggggttttgggggaaaggggaaggtgggtattaggtgttttggatattagggtttgtttttttagagatatttaggagtttagtgttgattatttttatttttattttgtagttatagttttagtttttaaattttttttttttggtatttagttttgtttgtttgttttttgtgttagttttgtttgtttttgttttttttagttattttgtattttttttttagttggttagggaattttgtgttgtatggggtggagtagggtaaggtttaggttttggagtttggtttatttttatgtttttgagtgaatttgggagattaggtgattttttagttatggtttttttatttgtagaatgaaggtattagtgatgtttagtgtttagtatgttatgaattgtaatttttatttggtttgtgagtggtgagtgaggttgaaattgggttatgttttttagattttttaaattaggttatttagttttatttaagaatatttttgttttaattattttgtaaagtagagttatagttagtgagtatgtattttattattattattattgttattattagaaatagggttttattttgttatttaggttggaatgttatggtgtgaatatggtttgattttttgggtttaagtaatttttttattttagttatttgaatggttgggattatagatatgttattatatttagttaatttttggtattttttgtagagattgggttttattatgttgtttaggttggttttaaatttttgggtttaagtgatttttttgtttttgttttttaaagtgttgggattataagtgtgagttattttgtttggttgaatatttgtttttgatgatggaagggtttatttttttgtatttttgtaattaatatttgtttttttttaattttttaaataagatttgtttggtgtaatgttttttgagttttgttttttttatggttggagttgggagtggtagggaatgtgtgggtattttgtttttttttttgattgttgttttttattttttgtttttggttgtttttatagttttatttatttttttggttttttgtttgtttttttaaatgaggagtgagtatgtagattataaataatttggtgtttttgtttttttttttggtggtggttgtttttggagtggaaggagatttggtggttagatgtttgatatggttgggatagttggtgtttttagtatttttggggaaggtttttggggattggatttgaggggattatattaagaagaggggtgagtaggtttggtagtttatttttgtgatttagtttatttttggttgggttgtttggtatgattttttggtttggttggtagtagttgtgtaggttaggggagttaaatggttttgtatgtgtaattttagttaaaaagagaaaggggaaagattttgtaattttttaggatatagataattgaaatttgatatttttgttaaggaagtttttttattgagagagagagagagatagagaaggagggagggaggggagtgtgtgagagtttattttggaaggttttgggagagatagagagaaggagggagggtggggagtgtgtgagaggttattttggaaggttttggggttagtaggaagttttgagtatagtttttttgtgagtattttatgtgttatttgttttagtttttggtttgagttaggagatgtggttggtttgtttagtgggtatagtagtggtggtagaggtttggttgttatttgtttttgtttattgggagttgttgtttttttttttttttgttttttgtgttagggagttagattgtgttgttgagaaaaatgtgtttgaagttttttaatttggttagtaagagttattttttttttttgttgtttagtgttttgtaaaattaaatgtatgattagagtggaaggagtttagtttgatttgaatgggttagggttatttatttttgtttagttataaggaattgtaggtgtttgttaggttaaagttatagaaatttggggaggttattttgtgattagttttgtgttgggtgtagttttgggggatataggtatgtatgataagtgtttgtttttgaggtgtagtttgttatttggttggagtaataagatttttagttataaggattagtgaatgatatatgaaggagtttttaattaagaatttgaaggtgggatatagttagttagtggttttgggggtttgttttggtgtgttttgtggagaagtttttttttaggtgaaatgttt

SEQ ID NO: 2120 - DNA, 2410 bp, Artificial Sequence
  chemically treated genomic DNA (Homo sapiens)
taagtagggtatatgtgatttttgttagttaaataaataattttttttaggttttttttgtttttgtagagatagggttttgttgtattgtttagtaggagtgtattaatggggatttatagattattgtagttttgaatttttgggtttaagtgatttttttattttagttttttaagtaattgggattataggtttatattattatatttagttaattaaaataaaatgtttggataggtatagtggtttatatttgtaattttagtattttgggaagttgaggtgggtggattatttgaggttaggagtttgagattagtttggttaatatggtgaaattttgtttttattaaaagtataaaaattagttgggagtggtggtaggagtttgtaattttagttagttgggaggttgaggtatgagaattatttgaatttaggaggtagaggttgtagtgagttgagattgtgttattgtattttagtttggatgatagagtaagattttgttttaaaaaataaataaataaaaaaataaataaatttttgtttagtttgggtgtagtggtttatatgtgtaattttagtattttgggaagttaaggtgggtagattgtttgagtttaggagtttgagattagtttgggtaatatagtaaaattttgtttttataaaatgtataaaaattagttaggtatagtggtgtatatttgtagtatttgtagtggaaggtttaggtaggaggattttttgagtttgggaggtagaggttgtagtgagttgagattgtattattgtattttagtttaggtaatagaataagattttgttttaaaaaaataattttttttttttttttttttgtagagatggggttttgttatgttgtttaggttggttttaaattgttaattttaagtaatttttttattttggttttttaaagtgtagggattataggtgttagttattgtgtttggttttttttagggttggtgaaattttttgttgtttattttggtttgaggaggtttaggggttttggagggggattagtagaggtaggtttttggttgagggagagtgagggtgtgtttaggattttgtgggtgtggttagtatttggtgaatgtatagttgatttgtaggtttagtttttggtgagtatttattgagagtgttttgttgtggttaggtttgtttaggtaggttatggtattatagatgtttgtgtttgtgatggagttaaatttggtttggaatatggtttttttgttattatgggttttgtttatgatgggtagaatagtattaagaatttgggggtggggagtggttagttgtgatttattttttagatttttgttatagttttttattttattgtgaagtttggttttttttaggaaagaatatgtgtgtttggtttttttttttgtttttgttagatttttttttatttttttttttgtatttgttagatttttttttatttttttgtttttttagaagttttgagtattttataatattttattatatggttttttttatttttatttagaaatatatttgaatattttttttttatttttgtttttttttttaattttttgtttttatttttattaaattaggaaatgttattgttaagtatatgagggattttttagtttttaaatttattttatgtgatatgattttttgttttttaggagggagggtttggaggggtgggtggaaattttaagaggttgaagaaaagatagggaaggaaaaaagaatgaaggggaaaggaaatgggtaagagtaggaaggttatgggtggttttagtttgtggtgggggtagtttgggttaaagtatagtaggggttttggagttgagatttattaggaaggttgtgtagtgggattagggttgttgttggagtttggttatgtagtttttttattgggaataagtggttttatttttgaagggagaaagttttatgagttgtttttattttttatttttagatgtaaaggtttttagggaggagttgttttgtaggggaggagagggtatttgggaagagatagagtgtgattgtatttgttgagggtgttgtattgtaatgttaggtgttttagttttgttttattgattagtttttgagttatgggtgagagttgggggtataggagtatgggggtgatttatagaataatagtttgaagggtattaagtgagattagtagttatggttattgtgagggtattatggttggggtaagtatggggtatggggtgtgtatagggagtagttgttatttgtttttttgtagggtttttagggttggttggaggtaggaggtattttggatgaggtaggagatgagtagagtgaggtttgtaaaaggagt

SEQ ID NO: 2121 - DNA, 2410 bp, Artificial Sequence
  chemically treated genomic DNA (Homo sapiens)
gttttttttgtaggttttgttttgtttattttttgttttatttaggatgttttttgtttttagttaattttgggagttttgtagagaagtaggtggtagttgttttttgtgtatattttatgttttatgtttgttttggttatggtgtttttatagtggttatgattgttggttttatttggtgttttttagattgttgttttatgggttgtttttgtgtttttgtatttttagtttttatttgtggtttaagagttggttagtgagatagagttgaggtatttggtgttgtagtatagtatttttagtaaatgtgattatattttgtttttttttagatattttttttttttttgtagggtggtttttttttgggggtttttgtatttgggaatggagaatgggggtagtttatggggttttttttttttagaaatgaagttatttatttttagtaaggaagttgtgtggttaggttttggtggtgattttagttttattgtatggtttttttagtgagttttggttttaggatttttgttgtgttttagtttgagttgtttttattataagttaggattatttgtggtttttttgtttttgtttatttttttttttttttatttttttttttttttttgttttttttttagttttttaaaatttttatttatttttttaaatttttttttttagaaggtagggaattgtgttatatgggatgggtttggggattaagaggttttttatgtatttggtagtagtattttttgatttggtggggatgaaagtagaggattagaagagagggtgggagtaagaagggagtgtttgagtatgtttttagatgggagtaaaggaagttatgtggtggggtgttgtggagtgtttagggtttttggaaaggtagggggatagaggagggtttggtaggtgtaggaaaggggatagaggagggtttggtaggggtaggagagggagttgagtatatgtgtttttttttggaaggaattaggttttatagtggggtggggagttgtggtagggatttgggaggtgggttatagttggttattttttatttttaggtttttgatgttgttttgtttgttatgaataaggtttatggtggtgagaagattgtgttttgggttaggtttagttttattatggatatagatatttgtaatgttatggtttgtttaggtgagtttgattataatgaggtgtttttagtggatgtttgttaggagttggatttgtgaattggttgtgtatttattaggtgttggttatatttgtagagttttgggtatatttttatttttttttagttagagatttgtttttattggtttttttttggggtttttaggtttttttgagttaggatgagtaataggggattttattaattttgaagaaggttaggtatagtggttaatatttgtaatttttgtattttgggagattaggataggaggattgtttgaggttggtagtttgagattagtttgggtagtataataagattttatttttataaaaaaaaaaaaaaaaaaaattatttttttgagatagagttttgttttgttgtttaggttggaatgtagtggtataattttagtttattgtaatttttgttttttaggtttaagagatttttttatttgagttttttattataggtgttataggtgtgtattattatgtttggttaatttttatgtattttgtagagatagggttttattgtattgtttaggttggttttaaatttttgagtttaagtaatttgtttattttggttttttaaagtgttgggattatatatgtgagttattgtgtttaggttaaataaaaatttatttatttttttgtttgtttgttttttgagatagagttttattttgttatttaggttggagtgtagtggtataattttagtttattgtaatttttgttttttgggtttaagtgatttttatgttttagttttttaattagttgggattataggtttttgttattatttttggttaatttttatatttttagtagagatggggttttattatgttggttaggttggttttgaatttttgattttaggtgatttgtttattttagttttttaaaatgttgggattataggtatgagttattgtgtttgtttaaatattttgttttaattagttgggtgtggtggtgtgagtttgtagttttagttatttgggaggttgaggtgggaggattatttgagtttaggagtttaaggttgtaatgatttgtgaatttttattaatgtatttttgttgggtaatatagtaagattttgtttttataaaaataaaagagatttaaagaaaattgtttatttagttgatagagattatatatgttttgtttg

SEQ ID NO: 2122 - DNA, 2424 bp, Artificial Sequence
  chemically treated genomic DNA (Homo sapiens)
taaggatttagtaaattttagttattgtttttattaggttgttaatataaatgtttgatgagtgaatgaatgatttttgtttgggatttggttgtaaataaagttgagttgtattttagggaggggtggagattttgtttttgtttgtgttttgaagttagtagggttttgttttaggatatttttatttatttttttgtttagtaagtggaggtgaggggtgtggtttggggttttttgggaggttatggttattgggttatttggagtttgtgtttatatgaggtttggtagagggaggtttttggttatttatttttgtgtttgggtttattattattggtttttgtgttttttggattttgttttgtatgggttgtattttttttgttggtttttgtttatgttttagttttagttttagttttaatagtggtttttttttgttttttttttgatattttttttgttgtttaggtttgtagtttgagtgttgttgttatggttttgttgtagttttgttgtgtgttggtgttggtgtaatgggtggtggaggtgttgtgggttttgtgtgttgggtagtttttgtagttgttggatgttttttggtatttgttgaagttggggtgtgatgtgtgatgtgagtttgaggagtgttatattttgggtgttgttttttttgatattgattagtgtagtgattgtattttgttttatgattatatgttgtttggggttgagtattttgtggagtatgtaggttgtttgggtgtgggtgtggttatttatgttgtgatttatgatgttagtgattagggtttttattttgttttgtgtgtttggtggatgttttgtgtttttggttattatgttgtgttattgtttgatggtggtttttgttattggttgtgttagaattttttgtttagttttggtaagagttaatttgtttttgttgagttttgtgtttagtttgattttgtttttattaagatttatgaggatattaaggagaatttggaattttggtgtttttaggtggtggatttttgagttattggtaggttttgtggtattgagtttgagttttgagatggtaatgtgggggaagggggtaggaggttgttgggggtgtggtttttatgttttgagtagtgttttggatttgattttttttttatttttttaatttattttgtttttattttttttttttttttttttttttttttttttttttttttttttttttttttttttttttttatttttgttttttttttatagggtttggttttattgtttaggttggagtgtagtggtataattatggtttattgtagttttaattttttgggtttaggtgattttttttgtttagtttgattttgtttttaaaggttattgtatgaggtggggaaggagatttgatttttatttgttttggtgattttgtttgttaagtagaattataatattggtttttttttttttgtgttttgggtagtgattttttttagtttattgggaattttggttgtttaaatagtttttaatttaatattagaggtgtggggggttattgtggaatgttggggggtaggttttagtatgagagaaaaatttagagggatggttttgattagggttatttatgtttttgaggatggtggaatgaaggtagagttgggggttgtataaaggaaagttttttttagggattaaagtttggagaattgagggtggaagggggattaaatagaagtgggtagggtagagttttttgtttgtgggttggatttttttaggtaagaagtttgtgggtaagttttgtataatgtgaggaggagtttttataaagtaggttggttagtggttatgttagtgtgagttttttaaatattttgtgtaagtagatattgttattgtatagaggaggaaatggaatttggtttaaggttttaagaaataatttagttgggatttagatttggtagtttgtgtatttaatagttgtgagtaattaggaattttttagtttttttttttgtgtttttaagagtgtaagaaattgattattgtttttagagagttttttgaagagtatttttatggttatagattgggtttggagttgtttgggtttattatgggttagtattgttttggatggtttgagggtaaggattgtttttgttttttatgtattttgaagattagtttagtatttggtatagagttgatgttttagagaggtttggtgaatatagaaggtttttgttgtatggaattttgtaaagtaatgttggtgttattggaattataggaaatagttgatatttaattatttttgaatttatataggtgttagttttatgtggtttagtttaatgagagtattattttaattttgttgggtttttt

SEQ ID NO: 2123 - DNA, 2424 bp, Artificial Sequence
  chemically treated genomic DNA (Homo sapiens)
ggagaatttaataggattaaggtggtgtttttattaggttgaattatatgaaattgatatttgtgtaggtttaaaaatggttggatattagttgttttttatggttttggtaatattaatattgttttgtaggattttatgtaatagggattttttgtatttattaaatttttttggaatattgattttgtgttaggtattgagttaatttttaggatgtatgaagagtagggatagtttttgtttttaggttatttaaaataatgttggtttatggtgagtttaagtggttttaaatttaatttgtagttatgggaatgttttttagagagttttttaggggtagtggttagttttttgtatttttgaaggtataagagaaagggttggggagtttttggttgtttatggttgttaagtgtgtaggttgttgagtttgaattttggttgggttgttttttgagattttgggttaggttttatttttttttttgtgtaatgatagtatttatttatatgggatgtttgaaagatttatattagtgtgattattgattagtttgttttgtggggatttttttttgtattatatagagtttatttataggttttttgtttgaggaaatttagtttataggtagaaggttttgttttatttatttttgtttaattttttttttatttttagttttttaagttttggtttttggaagagatttttttttatgtagtttttgattttgtttttattttattatttttaggggtatgggtagttttgattaggattatttttttgggttttttttttatattggggtttgttttttaatattttatagtgattttttatatttttagtgttggattgagagttgtttgggtaattagggtttttaatgagttagggagagttattgtttaaagtataggaggggaagggttagtattatggttttgtttaatagataaagttattgaggtaagtggaagttaaatttttttttttattttatgtagtggtttttaaaggtaaggttaggttgagtggggagggttatttgagtttaggaggttgaggttgtagtgagttatgattgtgttattgtattttagtttgggtggtagagttagattttgtgaaaagaaggtaagggtagggaaaagggggaaaggagggaagggaaagggaaggaaaggaaagaaaaaaggaaaggaaatgaaagtaagataaattaaaaaaataaaagaaaggttaagtttagggtattgtttagggtgtagaggttgtgtttttgatgattttttgttttttttttttgtgttattgttttggggtttgggtttggtgttgtggaatttgttagtggtttgggagtttattatttggaagtgttgggattttaggttttttttgatgtttttgtaggttttgatgaaggtggggttgagttgagtgtggaatttggtgggagtaggttggtttttgttggagttgagtgggaggttttggtgtagttagtggtggaggttgttattaagtagtgatatggtgtggtggttgaaggtgtggaatatttattagatgtgtggggtggagtagaggttttggttgttggtgttgtagattatgatgtgggtggttgtgtttatgtttaggtggtttgtgtattttgtgaaatgtttggttttgggtagtatgtggttgtagggtgaggtgtggttgttgtattggttgatgttgaagaaagtggtgtttgggatgtggtgttttttgaatttgtgttgtgtgttgtgttttagttttggtaggtattaggaggtgtttagtagttgtagaggttgtttagtgtgtggggtttgtagtgtttttgttatttattgtgttgatattagtgtgtggtagagttgtggtgaagttatggtggtgatatttgggttgtgggtttgggtgatagggaggatgttagaagggaagtagggagaggttgttgttggggttagggttggggttggagtatgggtgagggttggtgggggaggtgtggtttgtgtagggtagagtttagggaatgtagaaattagtggtggtgaatttgggtataaaggtgggtagttaggggtttttttttgttaggttttatataaatataagttttgagtgatttaatgattatgattttttggagagttttaggttatgttttttatttttatttgttgggtaggagggtgggtggaggtattttagggtaaggttttgttggttttaaggtataaataggggtaaagtttttatttttttttaagatgtagtttggttttatttgtaattaagttttagatggaagttatttatttatttattaagtatttatattggtgatttaataggaatagtagttggaatttattgagtttttg

SEQ ID NO: 2124 - DNA, 2313 bp, Artificial Sequence
  chemically treated genomic DNA (Homo sapiens)
ttatttttatttggagggtagtgtggtattttagggtgttatttttttagagttgtttgaggttagtagagaggaagtgttgtaggagttgtgagtgggtggtttggtttattattgggagtagttgttttgttgatgttggtagggtgtatttgttttaaataaagaatgattagagattatatttgtaatttttatgttatgagtagttgaggtaggaggattatgttaggttaggagtttgagattagtttgggtaatatagttaaagtttatttattttttaaaaaaatttaaaaattagttaggtgtgttggtatatgtttgttattttaattgtttaggaggttgaggtggattatttgagtttaggagtttgaggttgagtgatttattattatgttattgtattttagtttgggtgatagagtgagatttatttttaaaaaaaaattgttttagaaatgaatagttaggtttttaaagtttgttagtttttgagggttggggaaggtgggtgtttggagaatagttattttttggtttagtttggttagagtttgtattatagtgttttaggtttagttaggttgttagttttgggttgggaggagggtgaagggttggttaaggagatttttttttatattgtttttttatttttgtttagtagttgtaggagaattagtttttttgatatttagggggagaaatttagaattaagagtagaaggtagaaatgaaaggatttttttagtgaaaggttagagtggttttttttgtttttgtttaaaaatggtttgtgttgaattatgataaggttaaatgtattaaggtagtagaaatagggggagggtagggggagggtatggggatggtttttgagaaatagaggaataggttaggttgtagggttttgggggtagtatgtgttttaaaggtggtgaggggaggggtgatattattagggtagggtttagtttaggtatgttttggtggataggggagttgttaggattaagttggatggagttaggttgttttgtggtttttggggagggtttttagagggttgttgggtgaagggagttttttttaaaatggttttttgagttttgatgtatatatatgtagtttatttttaagtttagtgttttattagtttattgttttgttttttttagtatatttggtgtgtagttgtgattagtttaattgtggtatttttttattggttttgagttttggtgtgtttttttatgatattttttgggtatggagttgtgttgataggtttttgtgattggttgggtatgtttttggggtttgtttgtggggtagtgtgttttagagtttggttgtatgaagtggtgttgatgggtaaatttggttttgtttttttttttggtggttgagggttggttttgtgttttatttgttagtgatgggattgtgttgttgtggatgtttgtgttgaggtttgtgtgtggatagtgtttagattttttggttgtgtgtttgggtgtgtgttgggtttatggattttgtgtttagttttttgaggagttgttggttgtttgtagtggttgtattatatatgtttttgttagtgatgtggagggtttgattttttttgatttagtagtttatggtgtttgtttttagtggttgttggtgtgaggtgggtttgtgttttgtttagttgaggtttatgtttttttggtgtttggtgttttggtatgagtttattggttgtgtgtggtttttttttggagaaatgtttaaaggttttttgtttaattggtttttttttttttatggtggagttgtgggagttttgggtatattttgggtataggattttttagggatgtggtttgagagggagttttgtggtgggttgggtttgtgttttgtttgatttggggttgtgtgggtgttgattggggtggggttggtttttgggggtagtttagaagggtttttgtttattttttatatagtttaggattgtggtatagtagtttgtttagatttgttgtgtgatttgaattttgtgttttttgttttgtgttttttggggtttgtagtgttgtttggaagtttttttttgtttgttttttagttataggaggtttttttttgggttgtagaatttatagagttagatgttttttgggtttttagtgtttttttgtataagtggggaaattaggttatggggtttaggtagtgtggaaggtgttgtaggagttgtttagggtgtggggttttttagttttagtgaagagtggtattggggtttgttatagg

SEQ ID NO: 2125 - DNA, 2313 bp, Artificial Sequence
  chemically treated genomic DNA (Homo sapiens)
tttgtgataggttttagtgttattttttattgaggttggaggattttatattttgggtaatttttgtaatgttttttatattgtttgggttttatgatttagtttttttatttgtgtaggggggtgttgggggtttagggggtgtttggttttgtggattttgtagtttagagggaggttttttgtaattggagaatgggtaaggaggagtttttagatagtgttgtaggttttaggggatatagggtaggaggtatagggtttaggttatatagtaggtttgagtaagttgttgtgttatagttttgggttgtgtggggagtggatagaggtttttttgagttgtttttgagagttagttttattttggttagtatttatatagttttaggttaggtaggatataaatttagtttattataaagtttttttttaaattatgtttttgaaaagttttgtatttagaatatgtttagaatttttataattttattatgaagaggaaagggttgattaaataaggggtttttgaatatttttttagagaagagttatatatggttagtgagtttatgttaggatgttgggtattggggaaatgtgaattttaattgagtgagatatggatttgttttgtgttgatggttattgagagtaaatattatgagttgttgggttgaggggaattagattttttgtgttgttggtgggagtgtgtgtgatgtggttattgtaaatagttggtggttttttaaagagttgaatgtagagtttatgggtttagtatatgtttgggtgtgtagttagggggtttgagtgttgtttatatatagattttggtatggatgtttatggtaatatgattttattattaatagatggaatgtggaattagtttttaattgttggagggagagataaaattgggtttatttgttaatattgttttgtatagttaaattttgagatatgttgttttgtgggtaaattttgaaaatatgtttagttagttatagagatttgttgatataattttgtgtttaggggatgttgtggaggggtatgttagggtttagggttggtggaaaggtgttatggttagattggttgtggttgtgtattgaatgtgttgggaagaatggaatggtagattaatggaatgttagatttgggggtgagttgtatgtgtgtgtattagagtttaggaaattgttttggaaaggattttttttgtttggtagttttttgggaattttttttaggagttatagggtggtttggttttatttagtttggttttggtagtttttttgtttattggagtatgtttgggttgggttttgttttgatggtgttgtttttttttttattatttttggagtatgtgttgtttttgaggttttgtggtttgatttgtttttttgttttttaggagttgtttttgtgttttttttttgttttttttttgtttttgttgttttagtatatttggttttgttatagtttaatataaattatttttaaataaaaataagagaaattattttgattttttattgagaaaatttttttatttttgttttttgtttttgattttgaatttttttttttaaatgttagaggggttgatttttttgtagttgttgggtaggggtggggaggtagtgtgggaagaagtttttttagttggttttttgttttttttttaatttagggttggtaatttggttgggtttggggtattgtggtgtagattttggttaggttggattaaagaatagttgttttttaggtatttgttttttttggtttttagaggttggtaggttttgggagtttggttgtttatttttaaaataatttttttttagagatgagttttattttgttatttaggttggagtgtagtggtatgatgatgggttatttagttttgagtttttgggtttaagtgatttattttagttttttgagtagttggaatgataggtatgtgttagtatatttggttaatttttaaatttttttgagagatagataggttttagttatgttgtttaggttggttttaaatttttggtttgatgtgatttttttgttttagttgtttatgatgtgaggattataggtgtgatttttgattattttttatttgaaataggtgtattttgttagtattagtaagatagttgtttttaatggtaggttgggttgtttatttatggtttttatagtattttttttttgttggttttaggtggttttggaagaatgatgttttaagatattgtattgttttttaggtgggggtgg

SEQ ID NO: 2126 - DNA, 2410 bp, Artificial Sequence
  chemically treated genomic DNA (Homo sapiens)
aattgtttgggaaattttattatagtttttggggataagatttgtggtttgttttgttttgaggggtaggagaaaagggggtaatggtttgtaggggtagatgggtaggagtagagtagggggtgaaggtatatttagaatggtaaggaaggggggttagttgtgagatagtaggggaaggtttgttgttgggttttaaagatgtttggtagaaaaaattttaggttggaaaagtaagtgagagaagttggagggtggtatgtgggagatagttgggggtttatttttgtattgttagttttagttttttatttttatttggatgatgaggtttgagatatttttattgttatttgggagaggttttgggaagggaagattttatagagttatgaggggattaatttttttggtgaattaagttttttgatatttttagagttgtggtgttttgggattttagttttgaaggagaaaggaaggaaggaaaagaggaaaggtttatgtagataatttttttaggttgttgagttttaatagatagtttttgtttttgttttatttaagaagtttaggtttagaagatattaattaaggaaatttttgttaggaagtttggggtagggagagttgttggtttgattagggtatagttggtaaaagtttttataagatagttatttatagatatgtttaagaattagtatatagtttttaattagagatttttaaaatgaaatatttagggttatatataggaaaagtatgtatatatatatatatatatatatatagatatttatttttgtgtttttttggttatgttgatgagtttttttggtgaagtttggggtttatagagtaatttttgtagataattgtggtttttgtttttggtgtttgtaggaggtaggtatgttgtgtttttttaagatagatggtttagggtattttggtaggatttattaggaaatttatggagaagggaaaagggataagattagtaatagtgaagggagggagaatggtgggagaggattttagatgaatggtgggttgttggaggttgagtatgttagtaggatgttagtttttagagtaaagtttatgttaaatagttaatgtttgttttttttgtttttaggattatttttttgtatggggagtattttttatattaatattattatgtttttggtgtttggtattatttgttttttgggtattattgggaattttatggttatttttgtggttgtgaagaagtttaagttgtattggtgtaataatgtttttgatatttttattattaattttttggtagtagatttttttttttttttgggtatgttttttatgatttattagtttatgggtaatggggtgtggtattttggggagattatgtgtatttttattatggttatggatgttaatagttagtttattagtatttatattttgattgttatggttattgattgttatttggttattgtttattttattttttttatgaagttttggaagttttttgtggttattttggtgatttgttttttgtgggtttttttttttattagtattatttttgtgtggttgtatgttagatttattttttttttaggaggtgtagtgggttgtggtatatgtttgtttaatttagatattgatttttattggtttattttgtattagttttttttggtttttgttttgttttttgtggttattatagttgtatatgtgaggattttgtagtgtatgatgtttttagtggtttttgttttttagtgtagtatttggttgtggataaagagggtgatttgtatagttattgttatttgtttggttttttttgtgtgttgggtattttattatgtgttatagttgatttagttgtttattagttgtttgatttttatttttgtttatttatataatgtggttattagtttgggttatgttaatagttgttttaatttttttgtgtatattgtgttttgtgagatgttttgtaaatgtttggttttgttggtgaagtttgtagtttaggggtagttttgtgttgttagtaatgtttagatggttgatgaggagaggatagaaagtaaaggtatttgatattttttttgttattttgtatatttttaagttagggtattataatatgttattgggagagatgttgagaaaaatttaagattgtttgggaaatgtaggaaggttgggttgtgaggggttgttgtaatgaaataaatatattttatggggtttatatgttgttggggaggtttggagttaggtttggggtttttagatattagaaatttttttgggggagtaggatgagatttttggatagaatagaagttgagtaagagaatatgttggtttggataattggttg

SEQ ID NO: 2127 - DNA, 2410 bp, Artificial Sequence
  chemically treated genomic DNA (Homo sapiens)
taattggttatttaaattaatatgtttttttgtttagtttttgttttatttaaaggttttattttgtttttttaaggggatttttgatatttgaaaattttaaatttgattttaggtttttttagtaatgtgtgagttttatggaatgtatttattttattgtaataattttttataatttggtttttttgtattttttgagtggttttgggttttttttagtattttttttggtggtgtgttgtggtgttttgatttggaggtgtgtagggtggtaggggaagtattaggtgtttttgttttttgttttttttttgttagttgtttgagtgttgttgatagtgtgaagttgtttttgggttgtaggttttattgataggattaagtgtttgtggaatgttttatagagtatgatgtatataaaggggttgaggtagttgttggtatagtttaagttgatggttgtattgtataagtagataaaggtgagggttgggtggttgatggataattgggttagttgtagtatatagtagggtgtttagtatataaagaagattagatagatggtgatggttgtgtgggttattttttttgtttgtagttggatgttgtgttgggaggtgggggttattgaggatgttatgtgttgtaggatttttatgtatgtggttgtgatgattataaaaggtagggtaaaggttaggaaaaattggtatagggtgaattagtagaggttagtgtttgggttgggtaggtgtatgttgtagtttattgtattttttgggaaggggatgagtttggtatatagttatataggggtgatgttgatgaaggagagggtttataggaggtagattattagggtggttatagagggtttttggaattttgtggaagagatggggtggatagtggttaggtagtggttaatggttatggtggttaggatgtaggtgttggtgaattgattattggtatttatggttgtgatgagggtgtatatggtttttttaaagtgttatattttattgtttatgagttggtggattatgaagggtatgtttaggagaaagaggagatttattattgagaggttgatgatgaagatgttggggatgttgttgtattagtgtagtttggatttttttatgattgtgaagatgattgtggagtttttgatgatgtttaggaggtagatggtgttgaatattgaaggtatgatgatgttgatgtaggagatgttttttgtgtgaggaggtgattttggggatagaaggagtaagtgttggttgtttgatatgggttttgttttgagaattgatattttgttggtatgtttagtttttagtgatttattgtttatttggaatttttttttattattttttttttttttattgttgttaattttgtttttttttttttttttatgagttttttggtgaattttattagagtgttttgagttatttgttttggaaggatataatatgtttgttttttgtaggtattagaggtaagaattatagttgtttgtagagattattttgtgagttttgggttttattaggaaaatttgttagtatagttagaaggatataaaagtaagtgtttgtgtatgtgtgtgtgtgtgtgtgtgtgtgttttttttatgtgtagttttgagtgttttattttggagatttttggttggaaattgtgtattgatttttgggtatatttgtgggtgattgttttgtagaggtttttgttggttgtgttttggttaagttagtagttttttttattttaggttttttagtggggatttttttgattggtattttttgagtttgggttttttgagtgaagtagagatagaaattgtttgttggagtttagtagtttggaaaaattatttatataagtttttttttttttttttttttttttttttttttaaagttggaattttagggtattgtagttttggaaatgttaggaagtttaatttattagaaaagttaatttttttatggttttgtgaagttttttttttttagggttttttttaggtggtagtaaggatgttttagattttattatttaagtgggagtaaaaagttgaggttaatagtgtaggagtgagtttttagttgttttttatatattattttttagttttttttgtttgtttttttagtttggaattttttttgttaagtatttttggaatttagtagtgagtttttttttgttgttttatggttggttttttttttttgttattttgaatatgtttttgttttttgttttgtttttgtttgtttgtttttgtggattattgttttttttttttttgttttttagagtaaagtagattatagattttgtttttaagaattgtgataaagttttttaagtagtt

SEQ ID NO: 2128 - DNA, 2494 bp, Artificial Sequence
  chemically treated genomic DNA (Homo sapiens)
agtttatgggagtttttgaattatatagaattatagtatatagtaaataatatattaaatttttgttattttattgggttttgtttatagatttatttaggtattattgtggttttttgggttttttttattttaatttttattttaagttattattattgaggttgattaataaaaatataatattaaatttttttatttttgaggttttttttttaaggggaggtagaaatagaatattttttattggggagggaaaggggtttaataaaaattggtataattagttaaatattgattttggttaggttttttttgtgtttatgggtttagttttggttggttgtttttttttagggagtttttttttattttggggtttgaggtggtattaggagggggttgggggtggttagtattagtggtgttttgtttagtttttttgtagggagtgagtaggtaggtaagttgttgggtggtgggatgttattattgtaggaaattgtgaatgaatttttagagtttggtgatttataggttggtgttgaggtttattaggtattggattttgggtgtgagtatgtgttggtagagttgtgtgtgttgttgtttgatgttttttttgaggttgtagtttaggatggatttggtgtttagtggttgttagggttgtatggttttgttttggatggtggtggtgtttatggtgtggtttttgttgatgtagatggtttgtatgtgtttgttggtatggtgtagggtggttattttgtgggttatgtgtttttgtttgaaggtttttattttgtgttagaagttggtgttgaagtggtggtagaggtgggagtttagtatgttttaggtggtggtgtgtttatatagtttttttgagagttgtggtatgggtgagttgtggtgggtgttgagtttgaagtagagtatgttttttagtttttagtatagtaggttttttagtagtattagtgatttgttgaagtatttttgaaggagtattaggtggaagtgatgttttatttttaggatgtgtttttgtatttgtgggttgttggggtttaggttgttgttatagtttaggttgaagaagagtaggttttggaggtagtgggtattgaagttgttggggttgtagtagtgatttgggttttgtaggaatttggttagtttgttgttggttgagagtttttatgtgaggggtattattggtttgaagtagtggaaggaggatttgaataagtgggtggggttgtggagtattgtgatgaagatggtgttggttggtattaggttgtgtattttgttgtagtggaagtgtatgtggttgtagatgatgttgaagtaggttttgggttgatagttttgtattaggttgtgggtgaagaaggttgggtagttgaagttattgtggttgttagggaaggtgaatttgagttggtgtttttggttgaagtggaataggatgttgagtagggtgttgttggttgttttgtgtgtttttaagaatatgatgttgtgttgtggttggtatttttttgttgagttgttggtttggattattgtttttggtttgagtgtaggtggagagtaggatgttgtggtttttggggttttgttggggatagagaggtggggagagttttaggggggtgttggggtttttaggattttggtagttagagagggagattattgggaatagtggtggtaaaggagttgggatagtgagatttgtggggtttgagtttaggttgggtgtttgtgtgggtggtttggtttttttagttttatgttttttttttgtgaaatggggatgataataggttttatttatggtgttgtgagatgaggtatataggttttttttttatttatggttattgtgttgtatgtattatgaattagtattagtttgggttatatgaaattgttattttataggataaaaatggtttatttttgtagaaatttgtagttttttttgtgttaagttaatattattaattattggtattgtattagttataggttgtgttgggtttgtgtagagtagttttatgaggaaatgggagagtttggtttttaggagttgggtttggagttagattgatttgtttgaatttatgtttatggataggttgtttttattagggttttgttggtattttagatgatgtaaatttgagttttgtatagatagtgttatttgatttttatgttttatgaggaaggttttgggttttttttgtttgtttgtttttttttttgttttgagatagttttattttgttggtttagtttggagtatagtggtgttattttggtttattgtaatttttgttttttgggtttaagtaatttttttgttttagatttttaagtagttgagattatagatatatattattatgtttagttaatttttgtatttttagtagagatggggttttattatgttggttaggttggttttgaattt

SEQ ID NO: 2129 - DNA, 2494 bp, Artificial Sequence
  chemically treated genomic DNA (Homo sapiens)
gagtttgagattagtttggttaatatggtgaaattttatttttattaaaaatataaaaattagttgggtatggtggtgtgtgtttgtaattttagttatttgggagtttgaggtaggagaattgtttgaatttggaaggtagaagttgtagtgagttgagatggtattattgtattttaggttgggttaatggagtgagattgttttaaaataaaaagaaaaataaataaataaaaaaaatttagagttttttttatagagtatgagaattaggtaatattgtttgtatagggtttagatttgtattatttgagatgttaatggggttttggtgggggtgatttgtttatgggtatggatttaaatgggttggtttgattttaggtttagtttttgagaattaggtttttttgtttttttatggggttgttttgtatagatttagtatagtttgtagttggtgtaatattagtggttggtgatattaatttgatatagaggaaattgtaaatttttgtaaaaatggattatttttgttttataaaatggtagttttatgtggtttaagttgatattgatttatggtatatgtaatatagtggttatgaatgagaggagagtttgtgtgttttattttataatattgtgaatagggtttgttattgtttttattttatagaagaggaatatgaggttagagaggttaaattatttgtgtaggtatttagtttggatttaggttttataggttttattattttagtttttttgttattattgtttttaataatttttttttttaattattagagttttgagggttttagtatttttttgaggttttttttatttttttgtttttagtaggattttggaggttgtagtgttttgttttttatttgtatttgagttagaggtagtgatttgggttaatggtttggtgggggagtgttagttgtggtgtaatattgtgtttttgaagatgtataagatggttagtagtattttgtttaatattttgttttgttttggttagaagtattggtttaagtttgttttttttaatggttgtaatgattttgattatttgattttttttgtttgtagtttggtgtaggattattggtttggggtttgttttaatattatttgtaattatatgtgtttttattatgatgaggtgtgtggtttggtgttgattaatgttatttttattatggtgttttgtgattttgtttgtttgtttgagttttttttttattattttgggttggtggtgttttttatgtggaagtttttggttggtgataagttgattgagtttttgtaagatttggattgttattatgattttaatggttttaatgtttattatttttgaaatttgtttttttttgatttgggttatgataatagtttggattttagtagtttgtaggtgtaggagtatattttggaggtggagtgttgtttttatttggtgtttttttaagagtattttgatgagttgttggtgttgttgaaggatttgttgtgttgggagttggaggatgtgttttattttaagtttaatgtttgttgtgatttgtttgtgttgtggtttttgggggagttgtatgggtgtgttattgtttggaatatgttggatttttatttttattgttattttaatgttagtttttggtgtaaggtggaggtttttgggtgggagtgtatggtttgtgaggtggttgttttgtgttatgttaatgagtgtatgtggattatttgtattgatgggggttatgttgtggatgttgttgttatttaggatgaggttatgtagttttggtagttgttgggtattaagtttattttgggttataattttaagaagagtattgggtagtggtatgtgtagttttgttggtgtatgtttatgtttgagatttagtatttgatggattttggtgttaatttgtgggttattaagttttggaagtttatttgtgattttttgtggtggtgatgttttattgtttagtggtttgtttgtttgtttgttttttgtagaggggttgagtaggatgttgttggtgttggttgtttttagtttttttttggtgttattttagattttggggtgagggggggttttttggggggaggtagttagttaagattgggtttatgaatatagagagggtttaattgagattagtatttaattaattatattagtttttattaaatttttttttttttttgataaagaatgttttatttttgtttttttttaaaggggagattttagaagtaaaggaatttgatgttgtgtttttgttaattagttttagtggtggtgatttggggtgggggttggggtggggggaatttaagagattatagtggtgtttgggtgagtttgtgggtagagtttaatggggtggtagggatttgatgtgttatttgttatatgttatagttttatatggtttagggatttttatgagtt

SEQ ID NO: 2130 - DNA, 3457 bp, Artificial Sequence
  chemically treated genomic DNA (Homo sapiens)
aaaaattagttggatgtggtggtgggtgtttgtaattttagttatttgggaggttgagatagaagaattgtttgaatttgggaggtggaggttgtagtgagtagagattgtgttattgtattttaatttggtgatagagatgttgtttaaaaaaaaaaaatgtaaggattattgtgaaatttgtatgttaatgtaaaatattatttgtgtgtttagaagataaagtgatttttttttttagaaaaggtaaaatggtttaagggagtgtgagagttgtggatttgattaatttggtttagtgttttgtgttgttttttagttgtaggatttgagaaaatgtatttgaaaatttgttaagttttggttttttgattatataaggttatatttttttagaagttgtggggaggtttatatattattattgtgttgggtatatagtaggtgttggttttagtttttttgtttttgtttgtggagtttttagtgtttagttgaggttatagtgagttgaattgaatttaaggtttgtattaaatttataggtatttgggggtggagtatttgtaggtgtggtttttggtgtgtggtttagttttttttatatgtagatgaaaattatgatttaaatgtttttatggtggaaattagaagatgtgtagggaaaatagggatgtggaaattgttgggaagtgtaggggttgataagtagtttggtttaggttgttttatgagtgtttttttgtgggagtagtgtttttgaggttgttagtgagttagaggaaggtagggtgtatttgttttttagtaagaatgtgatgtatttgggtgtgatgatggtttaggtagtttttaggaggttgggatattagtttggttgtttttttttttttgtggttttttgttttgtttttggttttgagtggtgagtggtttggttagaatttggatgtttttatttgagtggggtttatagtatagtatttgtgggtggggtggttttggagttttgtagttgtgtgtgttgtttgttagtaaagtttatgtgttgtgttgagtgtagttatatagttttatgtagttatttggttgttgttgtgtgtatgtgtatggtgtgtggttttttttttttgtgagtttgtttgttgtatagttaattagtggttggtgtgtgtggtattatgggagttgtagttttgtaagtgtgtggagtttgttgggtgtttatggaatttgatttgtaggttaaaggggttttgttgtaaggaagaagtgtggggttttgttgttttttagattgagattgtggtgagttggttgtggtgtataatgggtatggtttgggtggtggtgtttgtattattgttttgtgtttgtggattttggtaatattgtgtggtaggttttaggttggttttttttagttttgtggattgtttgggttgggggttttaattttgattttagggttgggttgttggggtagatttttagtgatgtttaggttttttgggtttttgttagttaagggatgtttgttgtgtgttaattgttaagttttttattgtttttgtaaatttgttgatgtttttttagtgtatagggagattgtgtatgtgagtttgtttttgtgtgtattgtggagaggtagaggtatgaatgtagtataaggtataaaatgattattttagagagggttagatgattaagttagtaaatatttagggaatatgattgtgtttgttgtgtgttttttggagtagatataagggtgaatgaataaagaatggattttggttattgaaagtggagaggtagttgattttgtttgtggaggtttttagtagagttggatttggtagttttttggttatgaggggagattttgttggaggaaagaggtttttatttttattgtttgaaatgtgtaggatgtttttagattttttggtttatttataggtatagttatgttaaaaatgtgggattttataatgtatttagtattagtagagagggagttgaggatatggatagagattgtattagtttatatattagtaggttagggtgtggtggtttatttttgtaattttagaattttggaaggttaaggtgggaggaaaatttgagtttaggagttttagattagtttgggtaatatagggagattttttttttattttaaaaataataaaatagggttgggtgtggtggtttatatttgtaattttagtattttgggagattgaggtgagtggattaggaggttaggggtttaagattatttagttaagatggtgaaattttgtttttgttgaaaattgtaaaaattagttaggtgtggtggtaggtgttttaagttttagttatttgggaggttgaggtaggagaattgtttgaatttaggtagtagaagttgtagtgagttgagattgtgttaatgtattttagtttgggtgatggagtgagattttgttttgaaaaaaaaaaaaataataataataataataaaatgaagaagtagttagtggtgttttttggtttttagttttgaagggtaagattttaatttagtttaattatagttaattagaatttggaagattaatttaagttagttaaatttataatagtttgatatttaaattttgttaggggatatagttttttaggattgtaatgtttttaattttttttttttattaaattatttagaaattgatttagttattagaaattttttggtatgatggtttttaaatatgtttatagttttttttgataattggttttttaaaagtatagttaggtgtggtggtttatatttgtaattttagtattttgggaggttaagttaggtggattatttgagattaggagtttaagattagtttggttaatatggtgaaatttgtttttattaaaaatataaaaattagtttgttatgtatttgtaattttagttatttgggaagttgaggtaggagaattgtttgaatttgggaggtggaggttgtagtgagttgagagtgtgttattgtatttgagtttgggtaatagagtgagattttattttaaaaaaaaaaaaaaaagaaagaagaaaaaaaggttggttatagtggtttatgtttgtaattttagtattttgggaggttgaggtaggtggattatttgaggttaggagtttgtgattagtttggttaatatggtgaaattttgtttttattaaaaatataaaaattagttaggtatggtggtgtgtgtttgtaattttagttatttgggaggttgaggtaggagaattatttgaatttgggaagtagaggttgtagagagttgagttgagattgagttattgtattttagtttgagtgatagagtggaattatgtttttaaaaaaaaaaaaagttggagttgggtgggtatggtggtttatgtttgtaattttaatat

SEQ ID NO: 2131 - DNA, 3457 bp, Artificial Sequence
  chemically treated genomic DNA (Homo sapiens)
gtgttgggattataggtatgaattattatatttatttaattttagttttttttttttttggagatatagttttgttttgttgtttaggttggagtgtagtggtttaattttagtttagttttttgtaatttttgttttttaggtttaagtgatttttttgttttagttttttaagtagttgggattataggtatatattattatgtttggttaatttttgtatttttagtagagatagagttttattatgttggttaggttggttatgaatttttgattttagatgatttatttattttggttttttaaagtgttgggattataggtatgagttattgtgattggtttttttttttttttttttttttttttttttttgagatagagttttattttgttgtttaggtttgagtatagtggtatgtttttagtttattgtaatttttattttttaggtttaagtgatttttttgttttagttttttaagtagttgggattataggtgtatgatgagttaatttttgtatttttagtagagatgggttttgttatgttggttaggttggttttgaatttttgattttagatgatttgtttgatttggttttttaaagtgttgggattataggtgtgagttattgtgtttggttatgtttttgaggagttgattgttaaaaaaaattgtgggtatgtttaaaagttattatattaagaaatttttaatgattaaattagtttttaggtagtttaatagaaggaagggattaggaatattgtaattttagagagttatgttttttggtagggtttaagtgttgggttattgtgagtttgattgatttgaattagttttttaaattttgattagttgtagttgaattgaattaagattttgttttttaaagttgaggattaaaggatattgttaattatttttttattttattattattattattattttttttttttttaagatggagttttattttgttatttaggttggagtgtattggtgtaattttggtttattgtaatttttgttgtttgggtttaagtgatttttttgttttagttttttgagtagttgggatttgaggtgtttgttattgtgtttggttaatttttgtagtttttagtagagatggggttttattattttggttaggtggttttgaatttttgattttttgatttatttgttttagttttttaaagtgttgggattataggtgtgagttattgtatttggttttattttattatttttaaaatagagaaggggtttttttatgttgtttaggttggtttggaatttttggatttaagttttttttttattttgattttttaaagttttgggattataggggtgagttattgtattttggtttgttaatgtgtgagttagtgtagtttttgtttatatttttgattttttttttgttagtgttaagtatattgtagggttttgtgtttttagtatagttatatttatgaatgggttaaagaatttgagggtattttatatattttaaatggtgggaatggagattttttttttttagtagaatttttttttatgattgggggattattagatttagttttgttaagggtttttatggatggagttggttatttttttatttttagtgattgaaatttattttttgtttatttatttttgtgtttattttgggaaatgtgtagtggatatagttgtgttttttaagtgtttgttgatttagttatttggttttttttggagtagttattttgtattttgtattatatttgtgtttttatttttttgtagtgtgtgtgggggtggatttatgtgtgtagtttttttatgtgttgggagggtgttagtaggtttatagaaataatgaaagatttaataattggtgtgtgatgagtgttttttgattggtaggggtttagaggatttgaatattattaagggtttgttttagtggtttggttttgaagttaaggttgagatttttggtttagatagtttgtgaagttgagggaggttggtttggggtttgttgtgtaatgttattgggatttgtaggtatagggtgatagtatggatgttgttgtttaggttgtgtttattgtgtgttgtggttagtttattgtgattttggtttaggaggtggtgggattttgtattttttttttgtaatggagtttttttggtttgtgggttgagttttataggtgtttgatgggttttgtgtgtttataggattataatttttgtgatgttgtgtgtgttgattgttgattggttgtgtagtggatggatttgtggggggggggggttgtatgttgtgtatgtgtgtatggtgatggttggatggttgtgtggggttgtgtggttgtgtttggtgtggtgtgtgggttttgttggtgggtggtgtgtgtggttgtggggttttagggttgttttgtttgtaggtgttatgttgtgggttttgtttaggtgaggatgtttgggttttggttgagttatttgttatttagggttggaggtggggtggggagttgtggggaaggaggggtggttgggttggtattttagttttttgggaattgtttggattgttgttgtgtttgagtgtattgtgtttttgttggagggtggatgtgttttgtttttttttgatttgttggtggttttggaaatgttatttttgtgggagagtgtttgtgggatggtttgggttaggttgtttgttagtttttgtgttttttggtagtttttgtgtttttgttttttttgtgtgttttttgatttttattatgaggatgtttgggttgtgatttttatttgtatgtggaggaaattgggttgtgtgttgggagttgtgtttgtgggtgttttgtttttaagtgtttgtgggtttggtgtgggttttgggtttagtttagtttgttgtgattttgattgagtgttggaggttttgtgggtgggagtaggagggttggagttggtgtttgttgtgtgtttggtgtggtagtgatgtgtgagtttttttgtaatttttgagaaggtgtgattttgtgtggttaggaagttgaagtttgatgagtttttaagtatgtttttttaggttttgtagttgggagatggtataggatattaaattaggttggttagatttatggtttttatgtttttttgggttgttttgttttttttggaaaaaggaattattttgttttttaaatgtataagtaatattttatattaatatatggattttatagtaatttttgtattttttttttttagatggtatttttgttattaggttggagtgtagtggtgtaatttttgtttattgtaatttttgttttttgggtttaagtgatttttttgttttagttttttgagtagttgggattataggtatttgttattatatttggttaattttt

SEQ ID NO: 2132 - DNA, 2424 bp, Artificial Sequence
  chemically treated genomic DNA (Homo sapiens)
tttaattgtttttatagttattagggtagaaaaaattgagattaggggtagggtataaaggagaatatatttatgttttatttgtataattataaattaatgttaaaaagaatgtaaagttaggtttagggtagggatgaagaggttgtagatgtttttaagtattggaaagttttggttttttggttttatgtttttttttttttttttttttttttttatttttgagatagggtttttttttgttgtttaggttggagtgtaatggtatgattttggtttattgtaattttaaattttttggtttaagtgatttttttattttagttttttgagtagttgggattataggtgtatgttaggtggtttagttaatttttgtattttttaaaatttttttgagatggagttttgttttgttgtttaggttggagtgtaatggtggaattttggtttattgtaattttagttttttgggtttaagtgatttttgtgttttagttttttaagtagttgggattataggtgtgtgttattatgtttagttaatttttgtattttttgtagagatgggtttttaatatgttggttaggttggttttgaatttttgattttaagtgatgtgtttgttttagttttttagagtgttgggattttaggtggagttattgtgttgtattttttgggtttttttttaatttgggtttttgggttttttaggtttttgttttttttttttatgttgttttgtgtttgttttagatttttttgggatttgttggtttggtgttttggtttgtttgagttttatggttttttgggttttaattttggtggggtaggtatttttttaggaagttttggagtaggttgttgttgtataggtggtttaggttggtggtttttgattgaaggttgtgttgggttagtgtgtagtttgtggttgagaggtggttgttgaggggttgggtgggttaggggttggttagttgttgtttgtttttgttttgtatatttatgaagtttagtgaggttggttgtttaggttagttgtggatgggttatgaattatttatgaggaaatttttggttttgtttagaaaggttttgttgattatttatgagttgaggagtgggtttgggttggaaaaggttgttgatttttggtgggagggaagtgttgatgagttgaggtgagggttgttgagatgtgaggttttggtttagagagggtatttgggtgttgttagttttgtttttatgttaaaaaataatttttttttttttttttattatttaaggttttaagttggatttgaaagtattatattttgtgagggtttaaagtattgtgaagagaattgggagggtagggggttgaggaggaaggtaaaagggaggtgattttttttagaattggatagagagtatttaggtagttttgaaatttagatttttttggatatgaaattaaatttgttgagtaagtagtagttataatgagttatgatgaggttggtagggtagatgatgtttgtgtttgatattggagggggttgtgtgtggtggagttttggggaagtttattttatttgggttagattttttttagttattgaggttttttgttaggattgatgtttggtataggttaagaggtgagagaggtggggataagatattttgttttttttgattttagttttttttttattttagtgaggatttgttaattaatttttatggattttagttttttaaatagagggagagagttttgaattttaggattagttaattgttaaaatgtgtttgagtatgtagggtattggataggttgtgtagtatattgtgtatttagttggtagaaatgaggggtggttttggtttttaaaggggtttttaattttagtaggattataatttaattttttttttattggattattaatttgttgaggtaggaatagtattttatattttgtaattttgtatgttgttgtttggtatattgtagttgttttgtagatgttgaatgaatgaataattgaaatagtatgaaaaagatattaaaaagttaaaagagtatgaataaatatttaattaatatagtggaagttattttttttgaatgagtataggtaggggaattattagggttaaatggaatttgttaaaatggtgaataatttattgaagtaagttttgttggaaggtttaagtaattgggtgaattttggtaaattaagtttttttgtttagttttattttttttttttttttttttttttttttgtgagatggagttgagttttgtgttaggttggagtgtagtgatgtaattttagtttattgtaatttttattttttgggtttaagtgatttttttgttttagttttttatgtagttgggattataggtg

SEQ ID NO: 2133 - DNA, 2424 bp, Artificial Sequence
  chemically treated genomic DNA (Homo sapiens)
tatttgtagttttagttatatgggaggttgaggtaggggaattgtttgaatttgagaggtggaggttgtagtgagttgagattgtgttattgtattttagtttggtatagagtttgattttattttataaaaaaaaaagaaaaaagaaaaggaaagtgaggttaagtaagggaatttggtttgttaaagtttgtttaattatttagattttttaatagagtttgttttaataaattatttattattttaataaattttatttggttttggtaatttttttatttgtgtttatttagagaaaatggtttttattatattaattgagtatttgtttatgtttttttgattttttaatattttttttatgttattttaattatttatttatttaatatttatgaggtaattataatgtgttaggtaataatatgtaggattatgagatgtaaaatattgtttttattttaatagattgatggtttaatggaggagaaattagattatgattttgttgagattaaaaatttttttaggggttagaattattttttatttttattagttgagtatatgatgtattgtatagtttgtttagtgttttgtgtatttggatatattttggtgattggttaattttgaggtttaagattttttttttttgtttagggaattaaagtttatagggattaattggtaaatttttattaaagtgaaaggggagttgaggttaaggggggtggggtgttttgtttttattttttttattttttggtttgtattaggtattgattttggtagaaaattttaatggttggggagaatttgatttaggtaagataaatttttttaaagttttattatatatggttttttttaatgttgggtatagatattgtttgttttgttagttttattatggtttattatggttgttgtttgtttagtaagtttgattttatgtttagaaaaatttgaattttaaaattatttgggtgttttttgtttagttttgggggaaattgttttttttttgtttttttttttagttttttgtttttttgattttttttatagtattttaggtttttatgaaatatgatatttttaaatttaatttaaagttttaagtaataagaaaagaaaaaaaaattgttttttgatataaagatagaattaataatgtttgagtgttttttttgggttgagattttgtgttttaatagtttttattttagtttgttgatgttttttttttattgggggttaatggttttttttggtttaaatttgttttttggtttatgaatagttaatgaggtttttttgggtgggattagaggtttttttatgaataatttatgatttgtttatggttagtttgggtgattggttttgttagattttatgaatatgtaaagtaggggtgaatggtggttagttggtttttagtttgtttggttttttagtagttgttttttagttatgggttgtatattgatttgatgtgatttttggttaggggttgttagtttgggttatttatataatgatagtttgttttggggttttttgaggaggtgtttgttttgttgaggttaggatttgagggattgtggggtttgggtgggttaggatgttaggttggtgggttttagagaggtttgaggtgggtgtggggtggtgtaggggagggaagtgagagtttggggggtttagggatttgagttagaagaaggtttgagaagtgtggtgtggtggttttatttgggattttagtattttgggaggttgaggtgggtgtgttatttgaggttaggaatttgagattagtttggttaatatgttgaaaatttgtttttataaaaaatataaaaattagttgggtgtggtggtgtgtgtttgtagttttagttatttgggaagttgaggtatgagaattgtttgagtttaggaggttgaggttgtagtgagttgagattttgttattgtattttagtttgggtgatagagtgagattttgttttaaaaaaattttaaaaagtataaaaattagttgggttatttgatgtgtgtttgtagttttagttgtttgggaggttgaggtaggaggattgtttgagttggggagtttgaggttgtagtgagttaagattgtattattgtattttagtttgggtaatagagggagattttgttttaaaaataaaaaaaaagaaaagaaagaaaaaagatataaggttagaaggttagagttttttaatatttgagggtatttgtaatttttttatttttattttggatttgattttgtattttttttaatattaatttgtaattatgtaaataaaatataaatatatttttttttgtgttttatttttaattttagttttttttgttttggtaattgtgggagtagttggg

SEQ ID NO: 2134 - DNA, 2371 bp, Artificial Sequence
  chemically treated genomic DNA (Homo sapiens)
ttttaggttttttatgtggttgttggttagaagtatatttgataaggtgttttggttgttttggttgtttttatatgaagtttgtttagttaaggtatttttaggggtttaatgagaagggaattgtggttgggtgattttgaaggtgatgggaaagatgttgttttttatttataaagttgttagggttagttggggaaaagtagaggaaagggaaattataagaaagtagatttaaagaaatagaatttgaaagagttttttaggttgttgtttagaatatttggaattaagttaatgggtatggagggagagtagttgttaagttattttttggtatgagttttgagagttgtttgagggagttggagtagatgttgtgggattttttttttgagttattgtagtttttttttggagttggtttggggtggtggtttaaatatggaaatgtggtttgaattttttttttagtaattgttgttgggttttagtttttttttgtgaggtgggtagttgagtgaaatgaaattataatatttaattataatattgtgagtgttagatattgtgttgagttttgtatgtggatttttttaatttttaaaataattttagaggtggtaatgattgtatttattttatagatagaataattggttagagagggtgtgtgtgtgttatttaaggttatggagttagtaagggtattgggtgagaatttgaatttagagttattggttttttaattatagtgtttttttgttgagtagggataagtatttatttttttagttttttttgtagttagggagttagaatattttgggattggaaattgttgtttggatgattttagttagttattttgttttgtagatggggaaagtgagaattagagaaggttggtgattggtttaaggttatgttgtgttttatattttttttttatttttggatgtttagttttttaatagttttagtatagagttggggaaaaatttttagagatatttttttgggaagatagttggaaggtagggttgagttggggttatttgtgatttagtggtgaggtgatgaggtattgatgaaagtattgtattttttttttttgagaaatgttttggtattagatgagttttgggggagggaggagaggaatttggtagggatttggttataagttatttggagggtggtgtgaggattggaaaagttgttgtttgttttgtttggttttattttttgaatgaggttattgaatgtgtatgggaggtttagtgttgttttattttagtttgatggagaaattttatttgaaattttaaagtagggtagggatatttttattagatatttttgtagtttttgttttgtgggatgaagtaagggatgatgatatatttgtttgtttatttggaagtgagttttaggttattgtattagaagggtgataatttaatataagttattgttaagtaatttttgtgtgtttagtatttatatttttttgttttattttgattattatattgtataggagttattatttttattttttgtttttatttatagatgaggatattgagatttagagagttttttgttttgttttgttttttgagatggagttttgttttgttatttaggttggagtgtaatggtatgattttagtttattgtaatttttgttttttgggtttaagagatttttttgttttagttttttgagtagttgggattataggtatttgttattatatttagttaattttgtattagagatggggttttattatgttggttaggttggtttttaatttttgattttgtgatttatttgttttagttttttaaagtgttgggattataggtatgagttattgtgtttggtttgttttattttttgttttgtttgtttgttttgttttgtttttagagatagggtttggttttgttttttaggttagggtgtagtggtgtgattatagtttattgtagttttaaatttttgggtttaagtaatttttttgttttagtttattaggaattggaattataaatgtatgttattatttttagttaatattttttttttttggaaaaatgaagttttattatgttgtttaggttggttttaaatttttgggtttaagtgatttttttgtagtgttgggattataggtatgagttattttgtttggttaattttagagagttttgatgaagttataaaattttgattatggagttagaatttaaatttaggtatgtgaggtttgagtttaggtttttattagggttattgtgttgtaattgttattattttttggtattttaagtgatatttgagtattatttaagggaa

SEQ ID NO: 2135 - DNA, 2371 bp, Artificial Sequence
  chemically treated genomic DNA (Homo sapiens)
tttttttgaatgatgtttgggtgttatttgaggtgttaggaagtggtggtagttgtagtatagtggttttggtggaagtttgggtttagattttatatatttagatttgagttttggttttatggttagaattttgtaattttattaaaattttttgagattggttgggtagagtggtttatgtttgtaattttagtattgtaggaggattatttgagtttaggagtttgagattagtttgggtaatatagtgagattttatttttttaaaaaggaaaaatattagttggggatggtggtatgtatttgtagttttagtttttggtaggttgaggtgagaggattgtttgagtttaggagtttgaggttatagtgagttatggttgtattattgtattttaatttggaaaataaagttagattttatttttgaaaataaaataaaataaataaataaaataaaaaataaaataggttaggtgtggtggtttatgtttgtaattttagtattttgggaggttgaggtaggtggattatgaggttaggagttggagattagtttggttaatatggtgaaattttatttttaatataaaattagttgggtgtggtggtaggtgtttgtagttttagttatttaggaggttgaggtaagggaattttttgaatttaggaggtagaggttgtagtgagttgagattgtgttattgtattttagtttgggtgatagagtaagattttattttaaaaaataaaataaaataaaaaattttttgggttttggtgtttttatttgtaaatggaggtggggggtgagaataatggtttttgtgtagtgtagtggttagaatgaagtaagaaaatgtgaatattgagtatgtgagagttgtttagtaatgatttgtgttaggttgttatttttttgatgtaatgatttgagatttatttttgggtgggtaggtgagtgtgttattattttttgttttgttttataggataaaggttgtaaaagtatttggtgggaatgtttttgttttgttttgggattttgggtaggatttttttattaggttggagtggggtagtgttgagttttttgtgtatatttagtgattttatttaggggatgagattaaatagaatgggtagtggtttttttggtttttatgttattttttagatggtttataattagatttttgttaaatttttttttttttttttttaagatttatttgatgttaaagtgttttttaaaagggggaaatatagtatttttgttagtattttattattttattgttgggttataaatgattttggtttagttttgttttttagttgtttttttaaggggatgtttttgaagatttttttttagttttgtgttggggttgttggggagttggatgtttgggaatgagaggaggatatgggatataatgtgattttgggttagttattggttttttttggtttttattttttttgtttgtgaaatgaggtagttggttgaggttatttaggtagtagtttttggttttagggtgttttggttttttgattgtagggagagttgggaagatgagtatttgtttttgtttagtaggagagtgttgtggttaggaagttagtggttttgggtttaaatttttatttggtgtttttgttggttttgtgattttaggtaatatatatatattttttttgattagttattttatttgtaaagtgggtgtaattattgttatttttggagttgttttaaggattaagaggatttatatgtagaatttagtgtagtgtttgatatttgtaatattataattaaatattataattttattttgtttaattgtttgttttatagagagaaattgaggtttagtagtggttgttgggaagaggatttagattatatttttatgtttgagttgttattttgggttggttttaggaggaagttgtaataatttaggggaaaagttttatggtgtttgttttagtttttttaggtggtttttagagtttgtgttaagagatggtttggtagttgttttttttttatgtttattagtttagttttagatgttttaggtagtagtttggggagtttttttaggttttgtttttttggatttatttttttgtagttttttttttttttgtttttttttaattggttttggtagttttataaatgaaaaataatgttttttttattatttttgaaattatttaattatagttttttttttattagatttttggaaatgttttggttagatagattttatgtagggatggttaggatagttgggatattttattaaatgtgtttttgattagtaattatatgaaaggtttagag

SEQ ID NO: 2136 - DNA, 2500 bp, Artificial Sequence
  chemically treated genomic DNA (Homo sapiens)
ttttggagaataggatatgtggagggttaggaaggggttaggtttagagatgggagatttttttttggagtaggtggaggtataggattatttgttattttatttgttggtatttgtgggggagtttaggtattttttgtaagtttttttgattatttggtttaaagaaaatagaagtatggaggttgttaagtatttttaagaaataattttatgaatatggtattatttttttagaaagaggggtttggggtaggtagaggagagaagggagattaaattgagagttaagtttttagatggttttgtaggaggagaggatgtagttgtttagagggaagtaggattatatttaaggaagtgtgtggggtttttggatgatattagtatttagtgtggttttgtttggtaattgtttttaaggtggtaggagtgggtgttttttgtgtgttagtgggtagtttttgttgaatttatagtttattggggagtttgatagtggggttatgtgtttgatatttttttttgtttgtggatttggtaaggtagggagtagaaaatagagttatttgaaggttttttgtttgtgtttgtgtgtagtgtggatttagttgtgttttttatttgttgggagagtatagttattatttataagtagtgttatttttgtgggtggtgaggatagaataggagtttttgttttttgtatttatttgggtttggtgggtttttttgttttggtttttatttttgttttagtgattatttagttttgtataggaatatatgttgtttagaaaagttaaatttagtttttgtttttgttttttttggttttatgatgtgtatttgttattttgaaattggaaattagtttattaatgtttgtgttaattttttattttttttttaatttttttttttatatgattttttatttatgtaggatgtgtgttgtttaatgatgggatgattatatttttttatgttttaaaagtgttttttttttatagggttttagggttggtggttgttttgggtttatagttatgttttatttgttttttgttttaatagtttgtgtggtggtaaagttggtgtggggttggggaatgtagtgttttttaggaggggatttggttttttttttgtagtgtaggtgaaggtttagatgttagtgtgattttttataaggtgtggtttttagattttttggttggaagtgatgtttttttgttgtgggttttgggtttgaagtagtttggtttttttttggtaagtggttggtgttttagtagttgtaatttgagtttagttatttatatattattgtggttgatatttttattaaaaagttttttgagatgatttgtgtgtatgttgattttatgattagtgttgttgggaagaattttagagttggtggggtggggttggaagtagtaggtgtagtgatagggttgggtgtttaggaggttttagtgtttaattaggttaaggtggttaagtttaggttgtagggaaggttggtttggggggtgtgggtgagtataggtaggtattagttgggtagtgttaggatgttggagtagtatttgtaattttattgagtggggtagtttggttggggtagggattgttgttgttttggtagagagagaggatttttattggggagaggttgttttgattttgtaggtgggatagggatagatggttattagggtgatttggttggtttttttttgttatgttaagttttgggatatggaggatttttgttatatagtttgggtttgggtttttatttgtggttattgttttggtatgagttttttagttttgggtggtttttgtttggtttgggatttggtgttgttgttgagtttagtttttttgttatttttgtatgggttgtgggtggtgatgttagttgttttttattttggttttagtagtttatttagtttataggggagttgttttgggttggagatgggtatgtattttgggttttatttgaatgaatgtagtttgaggagatttggttatatatattgggttataggttatttttggtaatgtttatattagttgttagtttgagtttttttaggagagtaaggtttatatgataaaggttgtttgtggttagtgaggtggttgagtttagttaggattttttttggatttttgggatgtggttttgtttgtgagttgtttggttagtttttttggggtgagaggggtttgttatatgggtttttgtttgtagtgtgattttttttagttttttttagtagttttgtttgtagagtgttattattattatgattatttttttgatattgtgagggttgggggatgttttgggtagagatagggtttgtggtagtagtaggtttaggggtgttttatattggtgggttggggatttggtggagattatgttaagggttggataaggggatgagtttttattttggtttttttgtaggtt

SEQ ID NO: 2137 - DNA, 2500 bp, Artificial Sequence
  chemically treated genomic DNA (Homo sapiens)
ggtttgtggagaggttagggtggaggtttgtttttttgtttagtttttggtgtggtttttattaggtttttagtttattagtgtagggtgtttttgagtttgttgttgttatgggttttgtttttatttaggatgttttttgatttttgtagtgttagggaaatgattatggtggtggtgatattttgtaggtagggttgttgagagaagttgagaagggttatattgtaggtaggggtttgtgtgataagttttttttattttgagagagttgattaggtagtttatgagtagagttatattttgggagtttgagaaaggttttggttgggtttagttattttattggttatgggtagtttttgttgtgtgagttttgtttttttggggaggtttaggttgatggttgatgtgggtattgttgagggtaatttgtggtttagtgtatatggttgggtttttttaagttgtatttatttaagtaggatttagggtgtatgtttatttttagtttagggtagtttttttgtaagttgggtgagttattgaagttaaggtgggaggtagttgatattattatttatggtttatgtggaggtggtagaaaggttggatttagtagtaatattaaattttggattaggtagaaattatttaagattgaggggtttatgttagagtggtggttataggtaagaatttgggtttaggttgtgtggtaggaattttttatgttttagggtttagtatagtaaaggaagattagttgggttattttggtggttatttgtttttgttttatttgtagagttagaatagtttttttttagtggggattttttttttttgttaaagtaatagtggtttttgttttaattagattattttatttagtggagttatggatgttgttttagtattttaatattgtttagttggtgtttgtttgtgtttatttatattttttaggttggttttttttgtagtttgggtttggttattttggtttgattgagtattgaggttttttgggtatttagttttattattgtatttgttgtttttagttttattttattggttttggggttttttttagtggtgttgattatgaagttaatatgtatgtaagttgttttaggaaattttttaatgaaagtgttggttatggtggtgtgtaggtggttgagtttagattgtagttgttaagatattagttatttattaagagaaagttaggttgttttaaatttagggtttgtggtaaaaaagtattatttttggttggggagtttggaagttatgttttgtgggaggttatattggtatttaggtttttgtttgtattgtagaaggagagttgggtttttttttggagaatgttgtgttttttagttttatattggttttgttattatataggttgttgaggtaggaggtgggtaagatgtagttgtagatttaaagtaattattagttttgggattttgtgggagaggagtatttttagaatatggaaaagtgtggttattttattattagatagtatatattttatataaataaaaagttgtatggggaaggaggttggggagggaataaaaaattggtatagatattgatagattggtttttagttttaaggtaatagatgtatattatgagattagaggaggtagagataagggttggatttggtttttttaagtaatatgtgtttttgtgtagggttgaatggttgttgagatagagatggaagttaggataagggagtttattgggtttagataggtatagagagtagaggtttttgttttgtttttgttatttatgagggtgatattgtttgtaaatggtggttgtgtttttttagtaagtaaaaagtataattaaatttatattgtatatagatgtagatagaaagtttttaagtagttttgttttttgttttttgttttgttaggtttataagtagagaggagtgttaggtatatggttttattgttaggttttttagtgagttgtgggtttagtaggagttgtttattgatatataggggatatttatttttgttattttgggagtggttgttagatagagttgtattgggtgttggtgttatttagggattttatatatttttttaaatgtgattttgtttttttttgggtagttgtattttttttttttgtaggattgtttggaaatttggtttttagtttgatttttttttttttttttgtttgttttaagtttttttttttaaaaaagtgatgttatgtttatgggattattttttgaaaatatttggtggtttttatgtttttgttttttttgagttaggtggttaggagggtttataaagaatgtttgggtttttttgtaggtgttggtagatggggtagtgaatggttttgtgtttttatttgttttgggagggagttttttgtttttaggtttggtttttttttaattttttatgtattttgttttttagag

SEQ ID NO: 2138 - DNA, 2431 bp, Artificial Sequence; identical to SEQ ID NO: 2098
  chemically treated genomic DNA (Homo sapiens)

SEQ ID NO: 2139 - DNA, 2431 bp, Artificial Sequence; identical to SEQ ID NO: 2099
  chemically treated genomic DNA (Homo sapiens)

SEQ ID NO: 2140 - DNA, 2451 bp, Artificial Sequence
  chemically treated genomic DNA (Homo sapiens)
taattaaagatttttttaaatttagtagggattagtaaatatttatagaagattagagattttttgtgagtgtaaagggtttagagtgatttgatgttatagattaaattttatggtttttttaaatttatgtgttaaaatttaattttttatatgatgggatttggaggtgaggttttggaaggtgattagattatgaaagtagagattgtatgaatgggattagtgtttttattaaagggattgttgagagtttttttattttttttgttatgtgaggatatagtaaaaagatggtagtttatgaataaggaaggaagtttttattagatatgaaatttgttgatgagttgattttggattttattatttttagaagtatgagaaatgaatttgtttttttgttatttagtgtagtgtattattttttggtatttagattggttatagtattaatatattaatttgtatatgtaatttttgaaattttgatgttaaatttttgatggtaataggtgattgatttgttggaggaatggattgatatgatttttttttttataataaattagagagtaaaaataagtaaaagtaggttaaggttttttaaaagttgtatttgaaaggtttttagtaatagttgattagatggtaatttaattatataaataattatggtaaagatatataattattagatatttttagaatagtttttaaaataatatttgataatattagggagttaaagaaggtatgaatttttaaaaagttaaattttatttaaatgttattgtagaaatttgtaattttaatattatggatgaattttagggtaggtggtggtatggtatggtgatttgggggtataagtgttgagttttgaagttttggttttgatattttttggagatgttttttggtttttatatttttgtttatttgttaagaagagtttgttttgggtagtattttagggataaatagtttagaagtttagttgagggtagatttttaaggttggaggaagaagttgtttttgggagtaggaggagttgttggattttttttttttaggtttttttttttgttttttagtgttttttgtaggtaggtaaataattttagtaggagtagtagtaggttttttagttgtagggttgtagttttgttgaatgagagaagtttttttttggtgagttagaggagtgtaggttatatatttgggtttttatttttatgttttttattgtgtttaggattgagtttagtgtgggagatgtgggttggggttgtgttggttatttttttttttttattttttgttttagttatgtttttagttttagggttgaggttagtggttagagtagattttatgatgttaggtagttttttattgggttggtttttggtaggattaggataggggtaggagggatttggagttgttgatagttttagttttgtttttgaaggggggtttttttttggtgttggtattggtttattagttggtgttggaattttttgtgttgttgtatatggaataggagatgaaaaagaagaaagatttattaatgttagttattttttattggaatttttatatatagaattaattttgttgaatgtaaggtattttagtttgaaaatattgtttttgtaaaggtttatagattataggttattttattgtgtgtttgtgttttgatgaattttagaggttttagttggataagaataatgtgtagatgtggttgtgatgggattattggtggggtttggtttggtagggtttgttttgggttgttttgtggtatttgggggtgtttttgtttaaatggttagaggtgtttggagtgagagatgagtgaggtattgttttttataagagggtattagttgtggggatttgtttatagattttgatttaaatgatggatgaataaaatgtatattgatatagagttattttgttttgttagttttgttgagtgttttattgtttgtatattaagagaggtttgttattgtagttggttgtgaatagtttgtattgtaggtatttatttagtatagaatttataatggaagttttgagtaaatatttttgtggataattaatatggttaagagagtagttttattaatgattaaagtttaggtattatggtttaaagtaaatattattgggggtaattttttgggtttatttttttttttttttttaagaggattatttggtttaaaggttagttaatggaagtagggtaaatagatttaattggggaagtttttattgtttttaatatttattttatgagttaatgttttaagataagaagtagttgtttttagtttgtttaattattataagttatgtaatttttttgttttttaaaaggtttgtgattattttttgtaattttttttaatatttttttttaa

SEQ ID NO: 2141 - DNA, 2451 bp, Artificial Sequence
  chemically treated genomic DNA (Homo sapiens)
ttaaagggaaatattagggaaagttatagggaatagttataaattttttggaaggtggaaaggttatatagtttgtaataattgaataggttgaaggtagttgttttttattttagagtattagtttatagggtaaatgttagggataatagaggtttttttagttaagtttgtttattttatttttattaattagtttttgagttagatagtttttttggggaggaggggggaggtagatttgggaaattgtttttagtggtatttattttaaattatggtatttgagttttaattattggtagaattatttttttaattatgttaattatttataagagtatttatttaaagtttttgttgtaaattttatattaaataaatgtttgtagtgtgagttatttatggttagttgtagtgataaattttttttggtgtgtaggtagtgggatatttagtaggattggtaaagtagaataattttgtgttagtgtatgttttatttatttgttatttgggttagggtttgtgggtggatttttgtagttaatgtttttttgtgaggggtaatattttatttattttttattttaggtgtttttggttatttgggtaaaggtgtttttaagtattatagggtagtttagggtaggttttattaggttaggttttattggtgattttattgtggttatatttgtatattgtttttgtttagttggagtttttggagtttattgaggtataggtatatggtgaggtggtttatagtttatgagtttttgtaggggtagtgtttttgggttggaatattttatatttagtgaggttgattttgtgtgtgaaaattttagtggaaagtgattgatgttggtgagtttttttttttttttattttttgttttatgtgtagtaatataggaaattttagtgttagttgatgagttagtgttagtattaggggaagatttttttttagggatagaattggagttattagtagttttagattttttttgtttttgttttggttttgttaaggattagtttagtgaggagttatttgatattatgagatttgttttagttattggttttagttttggagttgaaagtatggttggagtaagaggtggaagagagggggtggttagtatggttttagtttgtattttttatgttgggtttagttttgggtatagtgggagatatggaggtagagatttgggtatatggtttgtgtttttttgatttgttagagagaggttttttttatttagtagagttgtagttttgtggttgaagggtttgttgttgtttttgttggggttgtttgtttgtttgtaagaggtgttggggggtaggaaaagaaatttgggaggaggggatttagtagttttttttgtttttagaggtggtttttttttttaattttggaggtttgtttttaattgggtttttgggttgtttgtttttgaggtgttgtttaggataggttttttttgataggtgggtaggggtgtggaggttagggggtatttttaaagggtattaaaattgaagttttaaaatttagtatttgtgtttttaaattgttatgttatgttattatttgttttagaatttatttatagtgttaaaattataagtttttataataatatttaaataaagtttgattttttgaaagtttgtgttttttttaattttttaatgttgttagatgttgttttagaggttattttgaaaatgtttgatagttgtgtatttttgttgtggttgtttgtgtgattgaattattatttaattaattgttattggaaattttttaggtatggtttttagaagattttgatttatttttgtttgtttttattttttggtttattgtggaaagagggattatgttagtttatttttttagtagattaattatttgttgttattaaagatttggtattagaattttaaaaattatgtgtataagttgatatgttggtattgtagttaatttgggtgttaaaagataatgtattgtattaggtagtagagaaataaatttattttttatgtttttggagatggtaaaatttaaggttaatttgttagtaggttttgtgtttgatgagggtttttttttttgtttatagattgttatttttttattgtgtttttatatgatagaagagatgagggagtttttagtagtttttttgatagggatattgattttatttatatagtttttgtttttatgatttaattattttttaaggttttatttttaaattttattatatggggaattagattttaatatatgaatttgaggggattataagatttggtttatagtattaggttattttgagttttttgtatttataagaaatttttaattttttataagtatttgttggtttttgttgggtttagggaaatttttaattg

SEQ ID NO: 2142 - DNA, 2402 bp, Artificial Sequence
  chemically treated genomic DNA (Homo sapiens)
ttgtttttgtaggttgagttttggagtttttttgtgtttgggatggagttggagtttatttttttgatttttatttgggagtagtggagttttgagtttttttgaatattggggaggatgggtgtagatggattgtgtatttttgttttttttgttaatttggtgggtaggtgttgagtttataaggttttagaattttataatgaagttagggtgtttggtgggagtttagggagttttagttgttgtttatttttttttttttttaaaaagtttgtttatttgtggtgtggggattattattagtggggagtggttaaggtaggttaggtagggatgtagtttataagttttgtggtattttttttttttttgtggatttttggggtgatttttttgtttttgtttttgttttttagaaatgtttttattaatttgagtgtggtggtttatgtttgtaattttagtattttggaggttgaggtggggtagattatttttggttaggggtttgagattagtttggttaatatggtgaaattttattttgattaaaaatataaaaaatgagttgggtatggtggtgtttgtttataaatttagtaatttgggaggttgagttgggagaattatttgaatttagtggagattgtagtgagttaagatagtattattgtattttagtttgggtgataaagtgaggttttattaaaaagaaaaagaaaaaaaaagttttaatttgtgtgttttgtttttttttaggattaggtttgttaggtagtagtgggagttgattttttagtagatttataaattgaaagttgaattggatgttatgtttttttgagaagatgtagatggtatggtagggtgttgatagtaggtttatgtagagttttagggttatgttgagatatatgttaggttttatagttgtagttggttagttatagatttgggtttatgtttggttagagtttttggttttgtgttttttttgatttgggtttaggattttgtattttggaattttttgtttttttttgtgttgttataaggttaggaagtttgtaatttttatagtattaaggattttaaggaggtttaggagtaggttggtagaggtttgtggtaaaggtgtggtagttgtgattttatttttttttttttatgtgtgtttgtgttttgtggtgttattttatagatattttgtttgagaagggattatgtttgggaatttttagggttggattttgattgtagaatttgatgaaaggggttttgtagggtttagaatgaggaggaggtaatgagaattatttttggaggattttagaagtagaggttgggagtatttataggtgaatggagtttgaattatgattagaaaggaattgggagaaagagatataggaatttgggagttttgggagtagtggggatattattattaggaagttagggggtatttggtaatgaaagtggtagatgtaataaaatttttaatatattgttgtataatgtataataatgtaataaaaatatattttttatatattattgttttaattttagttttatttattgttttttttatatgaatttttttttttatattttattttttagttaattttaattaggttttttgtttatattagttatattaagtttagttgtttattttattttgtgattaggatgagtatttaatttgaaatatgtatttattggtgtattatgtatagtggtttaaatagttttatatgaagttattttagttattatttttttattagttttattaataagtggtttatttaatttgtatatatttattggaatagaagaatttttttggttgtttttattattatgatttttggttataatatgatttatttttatattagtagaaattagttgagtttttttagatttaatagagggggaattagaattaattttgggttttaatgttgaatatgttgtaggtttatttgttttgttttttatagtagattatataaatattattataataaatgttttgaaggttgtaagaggtttgtgggtgtagtgtataggagattatatttggggatagtagttgtagtagattttaagttgggttatttttgttatttgttaggtggtgtttggtgaaggtaagtagtttttatttgtttggggaatatagtgtgatttttggtggtatgttttttagtattattttaggaggtattaggattatttattattggaaatttttgatggagtgttgaaatttatttgtgattaaaatatttttaagggatttgtttattatttttggggttattagttttgttagtgatgatttttttaatggaagttagttagagttatttgagtaatagttt

SEQ ID NO: 2143 - DNA, 2402 bp, Artificial Sequence
  chemically treated genomic DNA (Homo sapiens)
ggattattgtttaggtggttttggttggtttttgttggggggattattattggtagggttggtgattttgggaatggtgggtagattttttgggagtgttttggttatgggtaagttttaatattttattaggaatttttagtggtagatgattttggtattttttggggtggtgttgaagagtatgttgttgggggttgtgttgtattttttgggtgggtgggagttgtttgtttttgttaagtattatttggtaagtggtagggatggtttagtttggggtttgttgtagttgttgtttttagatatggttttttgtgtattgtatttatgaattttttgtggtttttagggtatttattataatgatatttatatagtttgttataaagaatagggtaaatgggtttgtagtatatttgatgttaaagtttgagattaattttgattttttttttgttaggtttaaagaggtttggttggtttttgttagtgtggaaataagttatattatggttagaggttatgatggtaggagtagttagagaaatttttttgttttaatgagtatatataaattaaatgaattatttattaataggattgataggaggataatagttagagtgattttatatgagattgtttgggttattgtatatagtgtattgatgagtgtatattttaaattagatgtttattttgattataggatagagtagatagttaggtttgatgtggttaatataaataggaggtttagttaagattaattagagaatggggtatggggagagggatttatatgaggagggtaatagatagagttagagttggaataataatgtatagggggtgtatttttattatattattgtatattatataataatatgttaaaagttttattgtatttgttatttttattgttgagtgttttttgattttttggtggtggtgtttttattgtttttgaagtttttaggtttttgtgttttttttttttaatttttttttagttatagtttaggttttatttatttgtggatgtttttagtttttatttttagaattttttagggataatttttattgttttttttttattttggattttgtaaagttttttttgttaggttttgtaattaaagtttggttttgggaatttttaggtataatttttttttagatagggtgtttgtgaggtggtgttatgggatatagatatatgtgagagggggagagtagggttatggttgttatatttttgttatgggtttttgttagtttatttttgggtttttttagaatttttgatgttgtgagaattgtaggttttttggttttatgataatataaagggaaataagaggttttagaatgtagggttttgggtttagattggagagggtatagggttagggattttggttagatataggtttaggtttgtggttggttagttgtagttgtggggtttggtatgtgttttaatatggttttggagttttatatggatttgttgttagtattttgttgtgttgtttatatttttttgaagaagtatgatatttagtttaatttttagtttgtggatttgttgaaaggttagtttttattgttgtttggtaggtttggttttggggggaggtaggatatatagattggagttttttttttttttttttttttggtagagttttattttgttatttaggttggagtgtagtggtgttattttggtttattgtaatttttattgggtttaagtgatttttttagtttagttttttgagttgttgggtttataggtaaatgttattatgtttggtttattttttgtatttttagttgagatggagttttattatgttggttaggttggttttgaatttttgattaaaagtgatttgttttgttttagtttttaaagtgttgggattataggtgtgagttattatgtttagattgataggggtatttttgagaagtagggatagagataagggaattattttagaggtttatagggaaggaaaagatgttatggggtttgtaggttgtgtttttgtttagtttattttagttattttttattaatgatagtttttatgttatagatgaataggttttttgaggagaagggggaatgaatagtagttgggattttttgggtttttattaggtattttggttttgttgtgggattttaggattttgtgaatttagtatttgtttattaggttggtaaagggggtagaagtgtatagtttgtttatatttattttttttagtgtttagaaaggtttagggttttattgtttttgagtgagggttagaggggtgggttttaattttattttgagtatagagggattttaaaatttagtttgtaaaagtag

SEQ ID NO: 2144 - DNA, 2500 bp, Artificial Sequence
  chemically treated genomic DNA (Homo sapiens)
aatatttgtatgtttagtagtaatggggttttattgtgttgtttaggttggttttgaatttgtgattttaggtgatttgtttattttggttttttaaagtgttgggattataggtgtgagttattatgttttatttttatttgttttttattataggagttaaagaatattttttttttggtttgtgttttttttttttttttttttttggttttattaagatattttaagatgagtttttgttatttttatttgaaaaagttttgattagtttatttttttgaattaattagaagatataaagtagagtttatttttttggaaatgggttttttatttttttttttttttttttttttttagtttggaaattttttttttttatttttgtttgttttaggttttattggttatgattgttttttattgttgggttttagtttttttttttttttataaattttttttttttttagatgaaaagattaatattgaaaaggtaagttgatgtgttttggtttgtatagagttttggaagtagagttgggatttgaattttgggtttttgattttttgtttagggttttttattttggtagagtaggagattaattttttttttttttttttttttaaatgaagtttttatatatagttatttatatatgtataagtagtttttaaggttagagaagttaattttaaattttagagttgtggaggttttatagattatatggagttttagttagtgattaaatttgaggtaatagtatttggaggtttagttttagtattgaggggagttggagggaaaaattaagttaagagtaaaatttttttgttttgaaaataatagtggtataatataatatttttggattgtgggaaataaaatggagagggatatgattagaaggaaatttttagaattttattaattttatgttttttaaattggtataattggtgataattttagagttatttgttattgtattaaagtttgatagagaaggatgatttataggagtagttttgttgtgtttgaggattgtttgatatttgaaatgagttttggattagtttttggttgaagtttatttaggttttttttgtgaaggttaagttattagagttaattattatttttgttttattttgtttaaatattgttgttggggttgataattgtatttagtgaatatttgtattggaatttggagtatttatttttttttatttgtagtttgaggaattttgattttttggtgatttttagaagtttttggatgtagttgtttgtgaggtggatttgtttgttgttggttttggggttggatgatatgtttggagttttagggaggttgtgaggagtttgttttttggttaggaagtgattgttgtttgtgttgtggtttttaaggataatttttgggtggtaattatttttttttatttaggagattaatttttttgttgaggttttatttaaggttgtagtatttatttattgaggtttttaagaaatttgtttgttttaggaaattttttattgagatttgttttgtattgttatttggtggtaagatataaaaatatattttttatggtgggattagattgtgtgtttgttttgtttttattttgttttttttttggtggtggggtagagggatggtggaaagggaattaagagttagtttttagaagtgtaggtatttgggattgagattggagtggggttatatttttttttttgtttttagtattagttatagttttgttattgtgtttttagttttttttttttttgtagatattggttatttgtgaaattaattgtattttttttttgtattgttttttaggatatttggaattagtgtatagtttattgttagtaattggatagaattgtatggtaggaatttagaagaggagtttaatttttgagtttatatttttttttttgggttttatttttttattttattttatatttagttttttgatgatgtttaggatatttttttagttattttaatttttttttttgtaagggataggagggataaagtaaggttatatatttagaaagagtttgtttattttttgtaagttttagtttttttttttataaagtgggtataagaatttttgttttggagggttttgtgtgtgttttaggagatgttggattaatattagtgtttattttattttttatttttttattttttaggttttttgttagttatgtgatgtaggttaggatgtaaaggagattaatagtatagattattttttttttagtgttatttgtgttttgtaggtttagtgggtgtttttattagagttttgtattttgagtttagtttttatttgttttttggaagatgttggttttagaattttttgttttttttttgtaggtattgtggtatttatagttgatttgtagagagtttagatgtattttataaataaggaatgtatt

SEQ ID NO: 2145 - DNA, 2500 bp, Artificial Sequence
  chemically treated genomic DNA (Homo sapiens)
agtatattttttatttatgagatgtatttgggttttttgtaaattagttgtgaatgttataatgtttgtaggagggaggtagagaattttggagttaatattttttagaaggtaggtagggattgggtttagggtataaggttttagtaggggtatttattgggtttgtagagtataaatggtattggggaaaaagtgatttgtgttgttgattttttttgtattttagtttgtattatataattggtagagagtttggaggatggggaggtgggaaatagggtggatattaatattaatttagtattttttgaaatatatataaaattttttaaggtagggatttttgtgtttattttataggggaggaaattgagatttgtagaaggtaggtaagttttttttgaatgtataattttgttttgttttttttgttttttataaagaggagagttaaggtggttggaaggatgttttgaatattattagaaaattaaatataaaataaggtaggaaaatgaggtttaggggaaggaatgtggatttagagattaagttttttttttaaatttttgttatgtgattttatttagttgttaatagtgaattgtatgttggttttaggtgttttggaagataatgtaaagagggaatataattagttttataagtggttaatgtttgtaaagaggaaagaaattagaggtatagtgatagagttatggttggtattgaaaatagagaaggaggtgtagttttattttaattttaattttagatatttatatttttgggaattagtttttggttttttttttattatttttttattttattattggggagagggtggggtgggggtggagtaggtgtgtaatttgattttattgtggagggtgtgtttttatattttattattaggtggtagtgtggggtaggttttagtaggaggttttttaggataggtaggttttttaggaattttagtgagtgagtgttatagttttaggtggaattttaataaagaaattgattttttgggtggaggaagatggttgttgtttaggggttgtttttaagggttgtgatgtagatagtggttattttttggttgaggggtaggttttttgtggtttttttgggattttgggtgtgttgtttagttttgaggttggtgatgggtagatttgttttatggatagttgtgtttagaggtttttggaaattattaaaggattagaattttttaggttgtaggtggagggaggtagatgttttggattttagtatagatgtttattggatatagttattaattttgatgatggtatttgaatagggtggggtaagagtggtggttgattttgatagtttagtttttgtgaaaggggtttaggtggattttagttaagaattgatttgaagtttattttaagtgttaaataatttttaagtatagtaaggttgtttttgtgggttatttttttttgttaaattttgatgtgatgataggtgattttgagattgttattagttgtattaatttgaggaatgtggaattagtagaattttagaagtttttttttaattatgtttttttttattttattttttatagtttaggagtattgtgttatgttattattatttttagaatgggaagattttatttttggtttaatttttttttttaattttttttagtgttaaggttgagtttttagatgttgttattttagatttaattattagttgaaattttatataatttgtagagtttttatagttttaaaatttggaattaatttttttggttttaagagttgtttgtatatatgtggatagttatgtataaaagttttatttaaaaaaaaagaaagagaagaaattgattttttgttttgttagaatgaagagttttggatagagaattaggagtttagaatttaaattttagttttgtttttagggttttgtgtaaattggagtatattaatttgtttttttagtgttggtttttttatttgagaaagggggagatttatggagggaggaggagattgagatttagtaatggaggatgattatggttaatgaagtttgggataggtagaagtggagagaaagaatttttaaattagaggagaaaaaaaaaaagagggggtaaagggtttatttttaggaaggtgagttttgttttgtgttttttggttggtttgggggagtaaattagttaggatttttttaaatggaaatgatagaaatttattttaaaatgttttggtagaattaaaaaaaaaaaaaaaaaaaaaatgtaaattagggagagagtgttttttggtttttgtgataaaaagtgaatgggagtggggtatggtggtttatgtttataattttaatattttgggaggttgaggtgggtagattatttgaggttatgagtttgagattagtttgggtaatatagtgaaattttattgttattaaatgtataaatatt

SEQ ID NO: 2146 - DNA, 2480 bp, Artificial Sequence
  chemically treated genomic DNA (Homo sapiens)
gagattttattttaaaaaaaaaaaaaaaaaaaaaataaaaaaaaatttaattaattaaaaaataaaaggtatttatttggtaggttttggtaattttagagttaatttgtgtggtgtggtggttaggaggtttagtgtatatttaataaatattagtggttattatgatttatttatagttgtaagttatttttgtgattgggaagtttttagaatttagagtttttgtttttggtaaaatttttttgttttaggtttttttttgttaagagattgttttttttatagtgtgaatagatggttatggattattttataaatgattttttattgaaggtgtttagtttggtttgtttttttaggaagtaggttgaggtttttttagaaagttgtttagaagtagtgtttttttagttgttgtgatgatagttggttgaatgtgttttaatttagttttgatttttgttttttttgagtttgtgtagtagttgtgtttattattaagtgttgttggtagagtttggtggtggaatgttaaagtgtgtgttttagtaaatgtttgttatgtgtttgtgttagtttatgtatgttatatttttgtagtttttagttattttattaataggtttgaattagttttataatattggggagtgaagaatgaatgattttatttttttttttttagtttgtttattttattttttattatattttgtgtttagaatagtgtttggtatgggtagatgtttagtaggtatattttattttatttttatttttgagatagagttttgttttgttatttaggttggagtgtagtggtatgattttggtttattgtaatttttgttttttgggtttaagtgattttttttttttagttttttgggtaagtgggattataggtgtttattattatgtttggttaatttttgtagagagagttttgttatgttggttaggttgagttggagtaatgttttttttattttatggagtttttatttattatagttgttagttttttttaattttaggaatttttgttttaagggaaataggatagatagtgtttgtgttttattttgtttatttttagatgaggaaatagttattaaggttttgtgtaaatttgttgtttatttaatagtttatattatttgttttgttttagttttttgtttgttagttggtgtttttggtagttagtaggtttgtgggggttttgttttagttaggttgggggttgggggttgggttttaggaattttgttgttgttgttggggttgttttaagttagtgtggatagaagtttagagtttaggggtattttagggttgaggggtttaggttggtttttgggttttgggtttagggtagttatttagggtgtgtgtttgtagttaattagggttgtggggaggaaggtttttggtattgttatagtttgtaggttttatgagtttggttttggggttgggaaggtgggagtttttggttttaggaggttgtttttgtttttaatttttggtagagtgtttatgggaggagggggaggagttgtttttatagtgggttatagttaattgtttataggttttaggttgttattttgagttggtttttaggttatagttttttttgtttatagttttattatgttaggattaggataggagtgggtgttgttgatagggaataaagggggtagtgtggggttgagtttttggggtaggtagggtgttttgtgatttatgggttttttattgtttttggaaattttattggttttgttttattatggagggggtagttggttttggttgttttagttgattaggaagttattttggtttttaggggtggtaggtgtttgtgtgttattaatagaaattttgggttagggtgggttggagagtttaaggtttggagtttttatgggggtgttttttttatgtaggaaattgattagagtgtttttaggagtttgttttgaaggtgggggtggggagtggttggtttggttgggttaagggttagtgggttagggttttagtatttttttttttttggttgtaggaggttttgtggtaggtatggggttgttggtggaaggtgtagtaggatggttgtgtagtgggggtgtttgattttttgtttttgttaggtttaggttaggtttttttaagggtttatagtatagatttttgtggagatgaatgaaattgtagttgtagtggaagttatttataaatatgtgttttagtgggtttagttttggggttttttttttaatggtattgttatgttggttggtgtaggtgaagggtttggggttaggaggtgtgagatgaagttagttttgttgaagagtttgtggttgaggagttgttgtttgagtttttagggtttagtgtgtttaggatttgttaatagggtggtagagagtaggtgattgtgttggttggttgttggg

SEQ ID NO: 2147 - DNA, 2480 bp, Artificial Sequence
  chemically treated genomic DNA (Homo sapiens)
tttagtagttagttagtatagttatttgttttttattattttgttggtgaattttggatatattgggttttgaaggtttaggtagtggttttttagttatgagttttttagtgaggttgattttattttatgttttttggttttaagttttttatttgtgttagttagtatggtaatgttattgaggaggaggttttagagttgggtttattggggtgtgtgtttgtagatgatttttattatgattataattttatttatttttatgaggatttgtgttatgggtttttagaggggtttgatttagatttggtagggataggggattggatgtttttattgtatagttgttttgttgtattttttattggtagttttatgtttgttatagggttttttgtagttaaggaggagggggtattgagattttggtttattagtttttggtttagttaggttagttattttttatttttatttttagagtagatttttgggaatattttggttaattttttgtgtgaggaagatatttttatagaggttttagattttgagttttttagtttgttttggtttagggtttttattgatggtatgtagatgtttgttatttttgggagttaaaatgattttttagttgattaggatagttagaattagttgttttttttatggtgggataggattaatgaggtttttaaggataatgaggaatttgtgggttatggagtattttatttgttttagagatttagttttatgttgttttttttgttttttgttgatagtatttatttttgttttggttttgatatggtggagttgtggataggaaggattgtagtttgggagttagtttaggatggtggtttggggtttgtggatagttagttgtggtttattgtgggggtggtttttttttttttttttgtaggtattttgttggagattaagggtagggatagttttttggagttagagatttttatttttttaattttaggattaggtttatgggatttgtagattgtggtagtgttggggatttttttttttataattttgattggttgtaggtatatattttgggtgattgttttgagtttgagatttaagggttagtttgagttttttagttttgaggtgtttttgagttttgggtttttgtttatgttagtttggggtagttttaatagtagtagtagagtttttgaggtttagtttttggtttttagtttggttgagatggggtttttgtggatttgttggttgttaggaatattagttggtgagtgggaagttggagtaaggtaagtgatgtgggttgttgggtgggtggtgagtttgtatgggattttggtgattgtttttttatttgaaaatgagtagagtgggatatgggtgttgtttgttttgttttttttggggtgggggtttttaggattaggggaaattgatagttgtggtaggtggaggttttatgaggtgagaggagtattgttttagtttagtttggttaatatggtaaaattttttttataaaaattagttaggtgtggtggtgggtgtttgtagttttatttatttaagaggttgagggaggagaattgtttgaatttaggaggtggaggttgtagtgagttgagattgtgttattgtattttagtttgggtgatagagtaagattttgttttaaaaataaaaataaaataaaatatatttattaagtatttatttgtgttaagtattattttaggtataggatatagtgaaaaatgagatagataaattgagaaaaaagaaataggattatttattttttattttttaatattatagaattagtttaggtttattaatgaaataattgagggttatgaaaatgtagtgtgtatagattaatgtaggtatgtgatgagtatttattgaaatatatattttggtgttttattattaggttttgttggtagtatttggtaatgaatatggttgttgtataggtttaaaagaagtaagagttagggttgggttagggtatgtttagttagttgttgttgtaatagttggagagatattatttttgggtaattttttggagaaattttaatttgttttttgaaagggtaagttaggttgaatatttttagtagagagttatttgtggaataatttatgattatttatttgtgttataggaaaagtagttttttgatagaggagaatttaggatagggaaattttgttagggatagggattttgagttttgaggattttttagttgtggggatgatttgtagttgtgggtgaattatgatggttattgatgtttattgaatgtgtattgagttttttggttattatattatatagattaattttagaattattaaaatttattaggtaggtattttttgttttttgattggttgggtttttttttgttttttttttttttttttttttgagatggagtttt

SEQ ID NO: 2148 - DNA, 2364 bp, Artificial Sequence
  chemically treated genomic DNA (Homo sapiens)
aagttttttttgtaattgttaagtgggttattaaggtaggggaattgtagtggagaaagagtttaatttatgtagaaatggttgaataggagattagagttgttttttgtttgtttgttttggttttttttttgagatgaaggtttgttttgttgtttaggttggagtgtagtggtgtgattttggtttattgtaattttttttttttaggtttaatttatttttttgttttaattttttaagtagttgggattataggtatgtgttattaggtttggttaatttttgtatttttagtagaaatggggttttattatgttggttaggttggttttgaatttttgattttaggtgatttttttgttttgattttttaaagtgttgggattataagtaggagttattgagattggagtttttttattatttaaattagttttttggagtatttaggggttagggttttttaaaggtagtttaagggaagggtggtgggggtggttaggtaatggggtttgttgttgattggttgggggtgtaatgataggggtgtgggaaatgattttgtatgttgagttatttttgggtgaggttataggagtagttggtaggtttaggtggaattataggtgttagatatataaaaagtttgaaaagatattttaaaaaagtttgggtgtgatggtttatatttgtaattttagtattttgggaagttgaggtgggtggattatttgaggttaggagtttgagattagtttggttaatatggtgaaatttttgtttttattaaaaatataaaagttagttgggtgtggtgatgggtatttgtaattttagttatttaggaggttgaggtaggagaattgtttgaatttaggaggtggaggttgtagtgagttgagattgtgttattgaattttagtttgagtgatgagagagaaattttgttttaaaaaagaaaaaaaaaaagatattttaaaaggttaatttttatgaagggttaggggttttataggtgagtggagttttagtagtttttttagttttgtgtgtttatgtattggttttttttttggttttatatttagtgtttaaggggttgtagtgagatggggtttgggttgtggagttgtgtttggttttgttgttttataagggtattgtggttgttagtttgtttttgtaattgttgtagagttatgtagggttataggtggtggttggttgtgggatttattttttgtgtatgatatttttaggtatttggttgggtgtggttttggtagttagtagggtttttgtattagttggtttagtttgtgttagagggtatggtggttggtatttttttttatattatttttttggaaatttttttaggagttggtgatttttgagtaaaggatttttaaggttattttgtttttagaagggtgtgttttgtttattggtttgttttttatttatatttagggggttttgaaatagaggttgttgttttttttttttgttttagtgtgtggggaaaaggaaggaatgggaagggaggttttgaggatgaaagttttttttaggagttaaggatggagtttttggtattatttgatttatgagagggaagtgggtaggtaagagagattggttttagttttaaggaatgagagatggttgagttattagagatatgattagggatattagtgttattagaaaggggttttgatttagattttaagagagggtttttggtttttatataagaaataatttgaggtgggtttataaagtgaaagtaagtttattaagaaagtaaaggaaggttagatgtggtggtttatgtttgtaattttagtattttgggaggttaaggtgggtagattaaaaggttaggagattaagattagattggttgatatggtgaaattttgtttttattaaaaatataaaaattagttagttgtggtggtgtatatttgtaattttagttgtttgggaggttgaggtaggagaattgtttgaatttgggaggtggaggttgtagtgagttaagattgtgttattgtgttttagtttgggtgatagagtgagattttgttttaaaaaaaaaaaaaaaggaagtaaaagaattaaagaatattttatagatagagtagtagtatgggttgtttgattgagtatatttatagttattttttgattatgtaattgtttagtgggttttttttgtttattgtttagatagagttgattgattaagatgggaattgtaatagagaaatagtaatttatatagagtttgttgtgtgggagattggagttttattattatttaaattagtttttttgagtatttggggatta

SEQ ID NO: 2149 - DNA, 2364 bp, Artificial Sequence
  chemically treated genomic DNA (Homo sapiens)
tgatttttgaatgtttggggagattgatttgagtaatgataaaattttagttttttatatagtaggttttgtgtgaattattgtttttttattgtaatttttgttttgattaattggttttgtttaggtagtgggtaaggagaatttgttgggtagttatatgattaagaaataattgtaagtatatttagttaagtagtttatgttgttgttttgtttatggagtattttttaatttttttattttttttttttttttttttgagatggagttttattttgttatttaggttggagtgtagtggtataattttggtttattgtaatttttgttttttgggtttaagtgatttttttgttttagttttttaagtagttgggattataggtatgtgttattatagttggttaatttttgtatttttagtagaggtagggttttattgtgttagttagtttggttttgattttttgattttttgatttgtttattttggttttttaaagtgttgggattataggtatgagttattgtgtttggtttttttttatttttttaataaatttgtttttattttatggatttattttgaattattttttgtgtaagagttaagaatttttttttggggtttggattgggatttttttttagtaatattaatgtttttgattatgtttttagtgatttagttgttttttgttttttggggttgagattagttttttttgtttgtttattttttttttatgggttagatagtgttaaaggttttatttttagtttttagagaaagtttttgtttttagaatttttttttttattttttttttttttttatatattggggtagggagggagaatagtggtttttattttaaagttttttagatatggatgaagagtaggttagtgagtagggtatatttttttaggagtagaatgattttgaggattttttgtttagaagttgttagtttttggaaagatttttagaaaggtggtatagaggaaggtgttagttattatgttttttagtatagattgggttagttggtgtagaggttttgttgattgttagagttgtatttagttggatgtttagaagtgttatgtataagaagtggattttatagttagttattatttgtaattttatgtggttttgtagtagttgtagggataggttgatagttatggtgtttttgtggagtagtaaagttaggtgtagttttgtggtttaagttttgttttattgtaattttttgaatattgagtatagagttagggagaagattagtatatgggtatgtagagttgagggggttgttggggttttatttatttgtgggatttttggttttttgtgaagattggttttttgaggtattttttttttttttttttttgagatagagttttttttttgttgtttaggttggagtttaatggtatgattttggtttattgtaatttttgttttttgggtttaagtaatttttttgttttagttttttgagtagttgggattatagatgtttattattatgtttagttagtttttgtatttttagtagagataaaggttttattatgttggttaggttggttttaaatttttgattttaggtgatttatttattttggttttttaaagtgttgggattataggtgtgagttattatgtttgggtttttttgaggtatttttttaggttttttgtatgtttgatatttatggttttatttggatttgttaattgtttttgtggttttatttagaagtgatttagtatataggattattttttatatttttattattgtatttttaattagttagtagtaggttttattgtttagttatttttgttattttttttttaaattatttttgaaaaattttagtttttaaatgttttaagagattaatttgaataataaaaaaattttagttttagtggtttttgtttgtaattttagtattttgggaggttaaggtagaaggattatttgaggttaggagtttaagattagtttggttaatatggtgaaattttatttttattaaaaatataaaaattagttagatttggtggtgtatgtttgtagttttagttatttaggaggttgagataggagaatgggttgaatttgggaggaggaggttgtagtgagttgagattatgttattgtattttagtttgggtgatagagtaagtttttattttaaaagaaaaattaaaataaataaataaaaaataattttggttttttgtttagttatttttgtataaattaaattttttttttattgtaatttttttgttttgataatttatttggtggttataagaggagttt

SEQ ID NO: 2150 - DNA, 2467 bp, Artificial Sequence
  chemically treated genomic DNA (Homo sapiens)
gagaggttttggaagggtaggggtgtgtggtgatattgggtgtttttgggttttagtatttttttagttagttggaagaatataggtaagttaagtttttttttttttttgagtttttaattttttattggtaaagtagggatgataaaaataaattattaaattgttgtgaggttttaatgagggtaaagtttgttgtttgaaatagagtaagtttttgtggtgttttagttatttgtattagttatttgtatttttttttgtggttttttttttaatttttattttttttttattttaaaaagattttttttgaaaatgttagtttgttttagtagtattaggagatattagggaaaggtttttttttttttaagttgaggttgagaaggaatgggaagaatgaagagaagtatttttgtggaggttttttttagttggttttgggtttaggaatattatatatttaatttttaaaggtttttaggggttggtttaaggttatatagtttgatagtgtggagtattttgaagttagggtgtgtggtgtagaataggttgggtgtttgaatttaattagttttttttatttttttatttagagttttttaggttgtggggtgtttatttgtgtatttttaagttgattatttttttggggtttttgttaatttaattttatggaaatattataaggggtagatagagatgagttgtgttagtgtttgtattagtagagggtaggattattgagtgtttggaggggagatgagtgtttgggtgtttttgggaatttggtttgttttgatttttttggggggttttttttggttttgatttttatttttttagatttatttttatttatgtttatttattttgaggggttttttagtgtgtatttatatatttatatttaaatttattattttatttgttttttaattattaggaatgtggtgttgttttaggtttttttttttttgtattttttagtagttgtttttattgggtagggtaaattatattgtggtttgattataaaagttattttttaaaaaaagaagttttaaggtttttgagagatgtagttgagttttttatttggtagtgtttgatttaggaggtgatgtttgggttatgagttatagagtttggtgtttttttaagtagggagtataaatttttattttttttttttgttttttttgatgttagttggaaggtgtgtgagtgagtgaggggttgaggtattgtttgtgtgagtatatatagatatatatatatatatatatatatatatatatatatattttttagatttattttttgtttgttagttttatgagttagagagagatagagtgtggatgttgtaggaggtagtgtttggattttagttgtttaggagaggtgaggggttagatggggtttgaggatattgtgttagaaattgtggttttggttaggttgaaggagagaggtataatgtgaaggtgggggttggattagtttagtttagtttatagatagggtgttgggggtatagaggatattatttgttttttttttttttattttttttttgtgatttttaaatgaggtgaggttgtgtggtttttgtgggagtatgtttgtgtttgtgtttgtgtttgtgtttgggatttgtgtttggtttaggaggtagagagtagtagatatttgttaagttgtagttttttgtttgggaagtagtgggagagaggattgttttgattagagaaattttagtgttgtttttagttgttgaaagtagagtgtagtagggatttttgttggttttttttttggaatgttgggttgggaagggattggttgggaaaggtagatagttggatttggagtagttgttttattttgattttattttttttttagtgtgatggggataattgtgttagttggtttagagaggtggttttgtgtggttattttttttttttaggtattattttattttgagtttttgttttttgtttgtttgttggtttgttttgatttttatttttgttagggtatagtttttggagggtaggggtgataagttagggtttgttaggtttttattttgggatatagggatttagggtggttttggttggtgttaagtttatgaatggtttgattttggtataaggagtttaggtggagataaggggtgatgttggtatttataaggagatagtaggtttttgttaagttgttagtttgtaggttttttttagggagaggggagggggatatagagtgagaataataataaatatagagtgtgaattgttgtatttattggggttggggtaggagaggaggaagtatgtttagtggggggtgggtaatttttttgagagtttggtattatgttgtttggttgtgatttggtaggggtttttttttgggaaagggggtttttagttttttgggggat

SEQ ID NO: 2151 - DNA, 2467 bp, Artificial Sequence
  chemically treated genomic DNA (Homo sapiens)
attttttagaaagttggagatttttttttttagggagaggtttttgttggattatagttaggtagtatgatgttaggtttttagagaggttgtttattttttattgggtatattttttttttttttattttagttttagtggatgtagtagtttatattttgtatttattattgtttttgttttgtgttttttttttttttttttgggaagagtttgtaggttggtagtttggtaggaatttgttgtttttttgtgggtgttagtgttgttttttatttttgtttggattttttgtgttagggttaggttatttatgggtttggtattagttaaggttattttaagtttttgtattttaagatagaggtttggtaggttttgatttattatttttgttttttgggggttgtgttttggtaagggtggaggttagagtagattagtaggtaggtaagaagtaagggtttggggtggggtggtatttgggggaagagaataattatatggagttatttttttaagttaattaatataattatttttattatattggggaaaaaatagagttaggataagatagttgttttaggtttaattgtttgttttttttagttggtttttttttagtttaatattttaggggaaggattagtaagggtttttgttgtattttgtttttagtaattggaagtggtattggggtttttttggttaaggtggtttttttttttgttgttttttagataggaggttgtggtttggtaggtatttgttgttttttgttttttgagttagatgtaggttttagatatagatatagatatagatatagatatgtttttatgggagttatatggttttattttatttgggggttatggggagagaatgagggagggagagataggtggtattttttatatttttaatattttatttgtaagttgaattgggttgatttagtttttatttttatgttgtattttttttttttggtttggttaaagttatagtttttggtatagtgtttttaggttttatttagttttttattttttttgggtagttggggtttaggtattgttttttgtggtgtttgtgttttgtttttttttggtttgtggagttggtaggtaggggatgggtttggaagatgtgtgtgtgtgtgtgtgtgtgtgtgtgtgtgtgtgtttgtgtgtgtttgtgtgggtggtattttagttttttatttatttatatgttttttagttgatgttagggagagtaggagggagggatgagaatttgtattttttgtttaaagggatattaggttttgtggtttatggtttagatattattttttgagttaggtattgttaggtgagaggtttagttgtgttttttgggggttttaaagtttttttttttggaaagtggtttttatggttgggttatggtataatttgttttgtttagtgagggtagttgttgaggaatgtaggggaggaagaatttgagatagtgttatgtttttggtaattagagagtaagtggggtggtgagtttgagtgtgagtgtgtgagtgtatattggggggttttttggggtgggtgggtatgagtgggggtgagtttgggagaatggaggttagagttaagaggagttttttagaggggttgagataagttaggtttttagggatatttagatatttgttttttttttggatgtttagtggttttgttttttgttagtatagatattgatatggtttatttttgtttattttttgtaatatttttatggaattgaattgatgaggattttaaggaagtgattggtttgaaggtgtataggtgaatattttatagtttgggaggttttgagtagagaagtagagagggttgattgaatttaggtatttagtttgttttatattatatgttttggttttgaagtgttttgtattgttaagttgtgtgattttgggttagtttttgagggtttttggaggttgagtgtgtgatgtttttaaatttagggttagttggaggaggtttttataaaggtgtttttttttgttttttttatttttttttagttttagtttggaaagaaggaagtttttttttggtgttttttggtattattgaggtaggttggtatttttaaaaggagtttttttaaaataaaaaggaggtgggagttaaaagggaaattgtagagaaaaatataagtaattaatataaatagttaagatgttataagagtttgttttgttttaggtagtaagttttgtttttattgaaattttataataatttaataatttatttttattatttttattttattggtgaggaattagaggtttagggaggaggaaggatttgatttgtttatatttttttaattggttagagaggtattggaatttaggagtatttagtgttattatatgtttttgtttttttagaatttttt

SEQ ID NO: 2152 - DNA, 2366 bp, Artificial Sequence
  chemically treated genomic DNA (Homo sapiens)
gatttatgtgttttagtgtttttttttgtaatatgggggtgatgattgtatttattttataaggaagtttttagtaaaatgaaagtttttaaaattatgtttgttttattattaatgattttataaatattagtaataatattagtattaagttttgttattttttattaattttttgtaaatgattttatttttttgtttttatatattttttatatttgtattttatttgatttagttattttttgtttaatttgttagaaagggtagatagttttttagttatttgttgttagggaaatttattattttagtttggatggtgaagattttagtttgagagattagtttgggtttgaagtgtttttttatttattgtgttgagattttttttttttgaattttgttatgtttttgtatatgttgttttttttatttgttatgtttttattttttttttttttattgtaaatttttatgtagttgttaaggttttatttttttttggaaagtttttttgatttttttggtaataattattattaatatttatttattgagtttattttgtgttaagtattgttttagatatgggtatgtaattgtgattgagagagatagattatgtatagtttggattttattttaagagttattgggtgttgttggtgggtttgagtgagtggggttaggaagtgatttatttttttgagggtttgtgggagttttagtttaggggtgggtagggggtgtggggaagtttgtagttgagagtttaggtaggagttttttgtgtggttttgggagaggaaggggtttggtttggggtggggtgtggaggtgggaggatggtggtgtgggatggagggtggaggttaggttgatagggtgttggtggtgggttgtgggggttgattttaggttttggtttatgtagttgttattttggaggtgaatagtttgtggggaaattggtatggtttggggaaggtggggagagggggagaaatgaaagtattgagtttaagtggtttgtagaattttgggggtttaggtggtatggtgggtgttggggttttgggtagagttttttggaggtttgtggtagttttatttttatggtatttattttttttgggttttgttgtagagaggaggaagtttttgttggttgagtgggtttggaggaagtgagtagtggggtttttgttttttggtttggtttttgaagattttagaagaatttggaatttgtttttatttggaatttagggattattttttgtatttagtaggtttttgtttttttgtgtggaaagtggttgggtgagttttggtattggggttattatatttgagtgttgggggttatggagggaggggtttagatattatttgggaaggattttagagtgtagttttagtttaggttatttggggaagggagttggtaaagtgggattttgagtttttatggtttttttggttgtttttgtttagaggttgtttggtgttttttttttttgttttattgaggagttgttgtttttgaattttagttaatttttttgtttttaggtgaagaaattgaggttttggggttaggaaggggtttgtttaggttgttgatttttttgggtagtattgagtttaggttttttttgtaattatgtattaggattagagagggtagggggtttgtttaatgttatatagtttgagtgaggaggagttggtttgggatttaggttttttgatgtttaggttaggtttttttgttttttttggttatggtttttagtttggatattaaggggttgggagttagttgtgtttttattatttttatgttatagggtaggatggagtttggtattttttgttttaggttggttgttggtgtgatatgggtggttttagttgagtgaatgtttttgttttttatagtttagggggttttttgttttggttattaatttttgttatgtgatttttttattttaatgtttgattgagtttgaaaatattgagaagatttaggggttgaaaagggaggaagagggaggttagaaggtgttagttgagttagtgaagtttttataggagaggaagtgggttaggggaataggaaggagggttgggttggtttttgggtttgtttttgttttgggtatgtggtgagtttagttttttgtttgtaatgaggaggaggaagatgaatagtgtttttgttaattttggtttttttggtttatgggatgggagatgttattattttatgtatttattttagttagttttatataggttgattggggaggttttttttgagtttaatttgataagttttgaggagtgagttgtat

SEQ ID NO: 2153 - DNA, 2366 bp, Artificial Sequence
  chemically treated genomic DNA (Homo sapiens)
gtatagtttattttttagagtttgttaggttgagtttaagggaaatttttttggttggtttgtgtggggttggttgaggtggatatgtggaatggtgatattttttattttataaattggaagggttagggttgatagaggtattgtttattttttttttttttattataggtagaaggttgggtttattatatgtttgggataggggtagatttagaggttagtttagtttttttttttgtttttttggtttatttttttttttgtgaaggttttgttggtttggttggtgttttttggtttttttttttttttttttttagtttttgggtttttttagtgtttttaaatttaattagatattgaggtaggggagttatatggtagaagttggtggttagagtagggagttttttgagttgtgggagatggaggtatttatttgattggagttatttatgttatattagtagttagtttggggtgggggatgttagattttattttgttttgtagtatggaggtggtggggatataattgatttttagttttttaatatttaagttgagggttatggttagagaaaatgaaagagtttggtttgggtgttaggaagtttgggttttaggttagtttttttttatttaggttgtgtgatgttgggtaaattttttgttttttttggttttgatgtatggttataaggagggtttggatttgatgttgtttaaagggattagtagtttgggtaagtttttttttggttttagggttttagtttttttatttggagatggaggggttggttgaagtttagaggtggtaattttttagtagaatagggagggaggatgttgagtagtttttgagtaggggtagttggaggggttgtggggatttaaggttttattttattgatttttttttttgggtggtttgggttgggattgtattttgggattttttttaggtggtgtttgggtttttttttttgtgatttttaatatttaagtatggtggttttgatgttagaatttatttaattgttttttatgtaggaaaataaaggtttattgagtgtaaagggtggtttttggattttgaatggaagtaagttttgggtttttttggggtttttggggattaggttgggaggtaggagttttgttgtttattttttttaggtttgtttagttggtaggagtttttttttttttgtggtagggtttgaggggggtggatgttgtgaaagtgaagttgttataaatttttagaaagttttgtttggagttttagtgtttgttgtgttgtttgggtttttggggttttgtaggttatttaaatttaatgtttttatttttttttttttttttgttttttttaaattatgttagtttttttgtaggttgtttatttttaaaatggtagttatataggttagagtttggggttgatttttgtaatttattattagtattttgttagtttggtttttattttttattttgtattgttgtttttttatttttatattttgttttgggttaggttttttttttttttgggattatgtaggagatttttatttggatttttggttgtagatttttttatgttttttgtttgtttttgagttgaggtttttataagtttttggaggagtgagttattttttgattttatttatttaaatttattaatggtatttaatagtttttaaaataaaatttaggttgtgtgtggtttgttttttttaattgtggttatatatttgtgtttagaataatgtttggtataaagtgggtttagtgaataaatattggtggtggttgttgttaaggggattgggaaggttttttagaggagaatggggttttgatggttgtataggagtttgtagtggaagaagaaggggtgagaatgtggtaggtggagaaaatagtgtatgtaaaggtatagtagggtttgagaaggagagattttagtatagtagatagagaaatattttagatttgagttggttttttaagttggaatttttattatttgggttgaaatggtgagtttttttagtaataggtgattgggaagttatttattttttttgataggttaggtagaaagtggttaaattaggtgggatgtaggtgtaaggagtgtgtgagagtaggaaagtagggttgtttataagaagttaataaaaaatgataaaatttagtattggtattgttgttaatatttatggagttattggtgatgaaataaatataattttaagggtttttattttattggaaatttttttgtgaggtaggtataattattatttttatattatagaggaagatattgaggtatatgagtt

SEQ ID NO: 2154 - DNA, 2333 bp, Artificial Sequence
  chemically treated genomic DNA (Homo sapiens)
ttgatatatatgtatatatatatagagtgtatatatatgtatatatgtgtagttgtattttttggtgtgtttgttgtgagggtataggggtgggtaggttggtaggtatgtgaagttgttattagttttgagggattgtgagtgagttgggatttgggggagaaaaaaatgggggtggatgttagttttttgggtggttgttgttattgtttttgtttttttgaggttttttttgtatttttgggtagtgaagttttttgttaagatgggggttgatgttattttgggttgtttagttaggggatttgggggttttggtggttgtttttggaagtgagttagttgtttgttggttgataggtttggaatttttagttagaggatagaaaatttgtatgggttaggtgagtggggtttggttgagggtagttgggtagggggtagtagggtgtggtagtttgtttattggaattttttagggtgtattttaggggggttgtttatttgaagggaagtgaggatgagggtgtttaaaggttgttttttttatttttatttttatttttattttttgttttttgggattgttatgttttggagtgagtgtagttggtttgttttttaaagttttttgttttggttgattagttgggtgagttttggaattggaatttggattgtttagtgtgttgattttataattttgttggggtggatttttagtttggtatttagttgttttttaattttgagtggtatttgtggatgtagttggtttttggtttagggatgtttatttatttttggtttgtttgaagaaagttgttgtttttaatttttttttttttaagtaagtttaaaatttttatgagtaaaagagtttaaagaggtaagaggatattggtgttttaattgttttttttttttttaattttttttttttttttttttttggttggttttatggattatttgggagataaatttatagtggtttagatttatatgatttagtggatgggtattgtgaggaggtttttttaggaagtttttaatttggtgattattatggtgggttatgaatggatgagtgtagagttggttagttggattttttttaagtgtattttttttttttgatatttggttttttggagttgggaatttttttgttgtttttttgtttgtagttaatagagattttttttattgaggaaaaggtatatagatttggaattgttagatattgtaagtttattatgttttaaaaaatattaaaataatattgaaagttttttttttttagtttttttagggagggggttttagatattaaattggggaagttattttttttagaatagttgttagttaaagtttaggtattttttgttttttgtatttgggaaagaggtatgtagtaataattttttttttttgaagttagttaggatatttttgttggagttgatgtttgtgtggatagggttagtatgtgagttgggttgaatttgttagttgatttatgtttaagtgtgaatattttaatttttgatatgaaagtttatttttttttttatttttagggtggattagtggtatttgttttatttttttttatttttttaggaagtataagtggtggtgttatgtgtatgttgagttgtagtttttgttgttttattgagtttttattggattgttaaggaaagggttttaggagattgaggtgtggtgggtgagtttgtttgttggttgtgaattttgggtttggtgtgagtgggttagggagggaggttttgattttttatttaggtaggtttgggagggtttggattgggatagtagggtggaatgatagttaatgattaaaattttggtttgtgttttgttaggtgatagtgtagaaataattgtaaggtttttttgatgatttggagaggtgggattgggtttagaaagtgaaagtgtttattgtgggggaagtatagtgagtgagtggtagagttaggttttgaattttaggttttgatttttttatttatggttttttgtagtttagtttttagtagatgttttttttagatttttttaattaatttagggttgtttaggttattgattagatttgagtttaaagagagggtttgttatttttatataggagatttttgttatttgattgtgttggtttagtttatgggagtatttgaggataggtgaagggttaagttagtttttttttttgggttttttttagttaggagtgttatagttattaagggatttagtatttagggaggagttttgagttggttttttttatatttgag

SEQ ID NO: 2155 - DNA, 2333 bp, Artificial Sequence
  chemically treated genomic DNA (Homo sapiens)
tttgagtgtagggagggttagtttagggtttttttttaaatgttgggttttttaatgattatagtatttttggttaggaggaatttagaaaaaggggttggtttagttttttgtttgtttttaagtgtttttataaattgggttaatatagttaggtggtagaagttttttatgtgaaaatggtaggttttttttttaggtttaggtttggttagtgatttgggtagttttgaattaattgggagggtttggggagaatatttgttgggagttggattgtaaagagttgtgaatggggaggttagagtttggggtttgggatttggttttgttatttatttattgtgttttttttatagtaggtatttttgttttttgggtttagttttatttttttaaattattagaaggattttatgattgtttttgtattgttgtttagtaggatataggttaaggttttaattattagttgttattttattttgttgttttaatttaagtttttttgagtttgtttgagtaagaaattaaggtttttttttttggtttatttatattaaatttaaggtttatggttagtgggtaaatttgtttattatattttggttttttaagattttttttttggtaatttaatgaaagtttggtggaatgataaaagttataatttagtgtgtatatgatattgttatttgtgttttttaggagggtgagaggagatgaggtaggtgttattaatttattttaaaaatagggagaaggatgagtttttgtgttgggggttggggtgtttatatttaaatataaattaattggtaaatttagtttaatttatgtgttggttttgtttatatagatgttgattttagtaaaaatgttttgattgattttaggagagaggaattattgttatgtgttttttttttaggtataggggataggaagtgtttgggttttgattgataattattttggaagaagtaatttttttggtttgatgtttgggattttttttttgggaggattggaggggaggagtttttagtgttgttttaatattttttaaaatataataagtttataatatttggtggttttgaatttgtatgttttttttttagtgaagaaaatttttgttggttgtgagtagagaagtggtggaaggatttttgattttgggaagttaggtgttggaaggaggaagtatgtttgaagggggtttggttggttgattttgtatttgtttgtttgtggtttattgtggtggttattaaattgagggttttttggaaggatttttttatggtgtttatttattgggttatgtgggtttgggttattgtgagtttattttttaggtaatttatggggttagttaggaggagagggaagaaggaagttagggagggagagagtaattaaaatgttagtgtttttttgtttttttggatttttttgtttatggaagttttgggtttgtttggaggaaaaaaaattaaaaatagtagttttttttaggtaaattaagggtaagtaaatatttttgagttaggagttggttgtatttatgggtgttgtttagaattaagaggtagttaagtgttaggttgggagtttattttagtggagttataaagttaatatattgggtagtttaggttttagttttagggtttatttagttgattggttgagataaggagttttgaggaataagttggttgtatttattttagggtgtgatggttttgaaaggtgggggatggggatgggggtgggggtggagggggtggtttttgggtatttttgtttttatttttttttaggtaggtagtttttttgaggtgtattttgggaggttttggtgggtaagttgttgtattttgttgttttttgtttggttgtttttggttagattttgtttatttgatttatgtaggttttttgttttttggttggagattttaaatttgttggttggtaggtggttagtttatttttggaggtagttattagggtttttgggttttttggttgagtagtttgggatgatattagtttttgttttagtgaggggttttgttgtttaggaatgtaggaggggttttggggaggtggaggtggtggtggtggttgtttagggagttgatgtttgtttttattttttttttttttaagttttaatttgtttatggttttttggggttgatggtaattttatgtgtttgttagtttatttatttttgtgtttttatagtaagtgtattaggaaatgtggttgtatgtgtgtgtatgtgtgtgtattttgtgtgtgtgtgtgtgtatgttgg

SEQ ID NO: 2156 - DNA, 2378 bp, Artificial Sequence
  chemically treated genomic DNA (Homo sapiens)
gttaaggttggaataatatagtgatttagttttttgatttggttatatggagtggggttaggtttgttttttttgttttttattttttttttaattttatagttttttgagatttagatgttataagggtttaggtgtttatataggggtttaggagtttgttggtgttttgtatgagatttgtttgtttttggagttggttaaggagtatgtggtatttttttgagtagttgtttatagttgttatgtttgttatgtttggaaataggagtgtaaggattagatttaaggtagagaagaggggtgttatttgatttggtgaggaaagttatagatgggagttttggggagggggtttaagagggttttgaaaggtgttttttttattttagattttgtgtagtggagggtgggggttgggtattgtgtggtatggtgtgtgtttaggtgtgtttattaaggttattattatttttttagtaagttattgtttagggtttgatatagtaagtagtgggagggattgagatagtggttgtgatttattaagtaggtttttgagtaaaggttgtagtgtttggttggattttagttttgtttatagtatggttttaattttgggagttgattttttgtaaggtgggattggttttttgtaagattattgggttaaagattggttattgttttaggatttgttttgttagttgttttggttatttaggtagatgggtttgagagggttttagggtaggtagtttgggagtagtttgtgtttttagttttgtttagaattaggagaggttgtttttttaattagaggtgtagtttggaatagatgtggaagattttttagtttatgtttttatttttttgataggtaaattaagttttaggagaaggttttatttaggttatataaggttagggtttttttttgattttttttgttttttttttttttttataagtggttttttttgttaggtttattagggatgttgtgagtttgttagaaggtgttgggggtgggtatagttattgtttattattatttttaatggggtattggtagttatgtggttggaaggggtttatggtgtaatggtttggaaggtagtgatattattgtttttgttttaagaattatttggttttttggggaagattggttgttggggagggttaaggggttaggtatttaggtttagtgattttatggtatttttgttgtttttttaggtatttgttgttgggttttggtaggggtttgtgtttgtggtagtgtatgtgggattggggtttttgtgtggttgtgtatttgggtttgtgtgtggtgtgagggagatttgttttgtttattatggggattttggtttgtatgtgggggtttttgggttggtgagatttagggttgtagatgatgttatatggttgtgtgtgtatgtggttatgtgggtgtggttgtgtatgttgtgtgattgtgtgggttttggggtttttaggtttggttgattttttatttattttgggtaagttggaggttttataatttttttatattttatattatttttttgtttagtttttgagttttttttttttgtttagtttttttgtttattttatttttttattttttggtttttagagttgtttttatattttgatattatttttttttggaagttttttagggatgttttttttttatttgtggagatgttaggtttttagtggattattttttttgtttgattttttggtttttttttttttttagtatttttttgtttggtgtttggtttttttagtttttggagggtagagggtgtttttgttttttattggtatttgtgggtagatttagtaggtgggttttggtggggaggaaggaagtatttattgagtagtgttttttgtgtgagtagtatttttatgttgggtgtttgtgttttggtttgtgtttgttgggggtgatattttttggttgggagttttgtaggttggtagttattttatgtttgttggggtgattggttaatattttatgaggtgggtggggatggggaggggggagggtaggttttttgggaatatgattttaaaaattaaaatttttatgggtggttaatgggtgtagggtgtggtgtatgtttgtttttttttttgttttttttgaatttgttttttgaggttagttttatgtttaaggatgatgtaaaattgtagttttagtttttttagggtgagtggggaggaaaagggtttatgttatttttagggaattgggttagggatgggtaggagggattttgagttgggtttttggaggttttaggttagttttggtttaggagttattggttttataggat

SEQ ID NO: 2157 - DNA, 2378 bp, Artificial Sequence
  chemically treated genomic DNA (Homo sapiens)
gttttgtgaggttaatggtttttgggttaagattggtttggggtttttagaggtttagtttgaagttttttttgtttatttttggtttagttttttgaagatggtatggattttttttttttttatttattttaggaaggttgaggttgtggttttatattatttttgggtgtagggttgattttgaagaatgaatttgaagaaaataggaggaggagtgggtatatattgtgttttgtgtttattggttgtttgtggaaattttggtttttggggttatgtttttagaaggtttgtttttttttttttttatttttatttattttatgaggtgttggttaattgttttagtgggtataaagtggttgttagtttgtagggtttttagttgagaggtgttatttttagtgggtgtgggttggagtatgggtatttagtatgggggtattgtttatatagaggatgttgtttagtaagtattttttttttttttgttagaatttgtttgttgggtttgtttatgggtgttggtggggagtagaggtattttttgttttttgggaattggggaggttaggtgttaggtagaaggatgttgagaaggggagagagttaggaggttaggtagagagagtggtttattgagaatttggtatttttataggtagagaaggggtatttttggaaggtttttagggggaggtgatgttaagatgtagaggtaattttgggaattagggggtgagagaataggatgggtaaagaggttgggtaggagagggaggtttagaagttgggtagggaagtggtgtgaggtgtggaggggttgtggggtttttagtttgtttgggatgaatagaaagttagttaggtttgggggttttagggtttatataattatatagtatgtatagttatatttatatggttatatgtgtatatagttatatgatgttatttatagttttggattttattagtttaggaatttttatatgtagattagagtttttatggtgaatggaataggttttttttatgttgtatatagatttagatgtatagttatatagaaattttagttttatgtgtgttgttataggtataggtttttgttagagtttggtagtagatatttggggaggtggtgagggtgttgtggggttgttaagtttgggtgtttggttttttggttttttttaatagttagttttttttaaagggttggatggtttttaggatgggaatgatggtgttattgttttttgggttattgtgttataggttttttttgattatgtggttgttggtgttttgttgggggtggtggtgagtggtaattgtatttgtttttaatattttttgataggtttatagtatttttggtgggtttgatagaaggagttatttatggagagaggagggaggtaagagaggttaggggagagttttggttttgtgtgatttgagtaggatttttttttgagatttggtttatttgttaggaaagtggggatatggattggaaggttttttatatttgttttaggttgtatttttggttgaaaaggtagttttttttggttttagatagagttgaggatataagttgtttttgggttgtttgttttgaagtttttttaggtttatttatttggatggttagagtagttgataaggtaggttttagggtagtggttggtttttagtttagtggttttgtagggagttagttttattttgtagagagttagtttttgaggttagaattgtgttgtaggtaggattgggatttggttaggtattgtagtttttgtttaaagatttatttggtaaattgtagttattgttttagttttttttattgtttgttgtgttaggttttgggtagtgatttattggggagatgatggtggttttggtgggtatatttgggtatatattgtgttatatagtgtttagtttttgttttttattatataaagtttgggatgaaggaggtattttttaaggtttttttgaattttttttttgaggtttttatttgtggttttttttattaagttaggtgatattttttttttttgttttaggtttggtttttgtatttttgtttttaagtatggtgagtatggtggttataggtagttgtttgaaagagtattgtgtgttttttggttagttttagaagtagatagattttatgtaggatattagtagatttttggatttttatgtaagtatttgggtttttgtggtatttgagttttagagaattatggggttaggaagggagtgagaagtagggaggataggtttagttttattttatatggttaggttggggaattgagttgttatgttattttagttttaat

SEQ ID NO: 2158 - DNA, 2269 bp, Artificial Sequence
  chemically treated genomic DNA (Homo sapiens)
agtttgttggtgttttgtatgagatttgtttgtttttggagttggttaaggagtatgtggtatttttttgagtagttgtttatagttgttatgtttgttatgtttggaaataggagtgtaaggattagatttaaggtagagaagaggggtgttatttgatttggtgaggaaagttatagatgggagttttggggagggggtttaagagggttttgaaaggtgttttttttattttagattttgtgtagtggagggtgggggttgggtattgtgtggtatggtgtgtgtttaggtgtgtttattaaggttattattatttttttagtaagttattgtttagggtttgatatagtaagtagtgggagggattgagatagtggttgtgatttattaagtaggtttttgagtaaaggttgtagtgtttggttggattttagttttgtttatagtatggttttaattttgggagttgattttttgtaaggtgggattggttttttgtaagattattgggttaaagattggttattgttttaggatttgttttgttagttgttttggttatttaggtagatgggtttgagagggttttagggtaggtagtttgggagtagtttgtgtttttagttttgtttagaattaggagaggttgtttttttaattagaggtgtagtttggaatagatgtggaagattttttagtttatgtttttatttttttgataggtaaattaagttttaggagaaggttttatttaggttatataaggttagggtttttttttgattttttttgttttttttttttttttataagtggttttttttgttaggtttattagggatgttgtgagtttgttagaaggtgttgggggtgggtatagttattgtttattattatttttaatggggtattggtagttatgtggttggaaggggtttatggtgtaatggtttggaaggtagtgatattattgtttttgttttaagaattatttggttttttggggaagattggttgttggggagggttaaggggttaggtatttaggtttagtgattttatggtatttttgttgtttttttaggtatttgttgttgggttttggtaggggtttgtgtttgtggtagtgtatgtgggattggggtttttgtgtggttgtgtatttgggtttgtgtgtggtgtgagggagatttgttttgtttattatggggattttggtttgtatgtgggggtttttgggttggtgagatttagggttgtagatgatgttatatggttgtgtgtgtatgtggttatgtgggtgtggttgtgtatgttgtgtgattgtgtgggttttggggtttttaggtttggttgattttttatttattttgggtaagttggaggttttataatttttttatattttatattatttttttgtttagtttttgagttttttttttttgtttagtttttttgtttattttatttttttattttttggtttttagagttgtttttatattttgatattatttttttttggaagttttttagggatgttttttttttatttgtggagatgttaggtttttagtggattattttttttgtttgattttttggtttttttttttttttagtatttttttgtttggtgtttggtttttttagtttttggagggtagagggtgtttttgttttttattggtatttgtgggtagatttagtaggtgggttttggtggggaggaaggaagtatttattgagtagtgttttttgtgtgagtagtatttttatgttgggtgtttgtgttttggtttgtgtttgttgggggtgatattttttggttgggagttttgtaggttggtagttattttatgtttgttggggtgattggttaatattttatgaggtgggtggggatggggaggggggagggtaggttttttgggaatatgattttaaaaattaaaatttttatgggtggttaatgggtgtagggtgtggtgtatgtttgtttttttttttgttttttttgaatttgttttttgaggttagttttatgtttaaggatgatgtaaaattgtagttttagtttttttagggtgagtggggaggaaaagggtttatgttatttttagggaattgggttagggatgggtaggagggattttgagttgggtttttggaggttttaggttagttttggtttaggagttattggttttataggatatggtggttgggggttgaggggagtgagatatttttttttttgagt

SEQ ID NO: 2159 - DNA, 2269 bp, Artificial Sequence
  chemically treated genomic DNA (Homo sapiens)
atttaagaaggaagatgttttgttttttttagtttttaattattgtgttttgtgaggttaatggtttttgggttaagattggtttggggtttttagaggtttagtttgaagttttttttgtttatttttggtttagttttttgaagatggtatggattttttttttttttatttattttaggaaggttgaggttgtggttttatattatttttgggtgtagggttgattttgaagaatgaatttgaagaaaataggaggaggagtgggtatatattgtgttttgtgtttattggttgtttgtggaaattttggtttttggggttatgtttttagaaggtttgtttttttttttttttatttttatttattttatgaggtgttggttaattgttttagtgggtataaagtggttgttagtttgtagggtttttagttgagaggtgttatttttagtgggtgtgggttggagtatgggtatttagtatgggggtattgtttatatagaggatgttgtttagtaagtattttttttttttttgttagaatttgtttgttgggtttgtttatgggtgttggtggggagtagaggtattttttgttttttgggaattggggaggttaggtgttaggtagaaggatgttgagaaggggagagagttaggaggttaggtagagagagtggtttattgagaatttggtatttttataggtagagaaggggtatttttggaaggtttttagggggaggtgatgttaagatgtagaggtaattttgggaattagggggtgagagaataggatgggtaaagaggttgggtaggagagggaggtttagaagttgggtagggaagtggtgtgaggtgtggaggggttgtggggtttttagtttgtttgggatgaatagaaagttagttaggtttgggggttttagggtttatataattatatagtatgtatagttatatttatatggttatatgtgtatatagttatatgatgttatttatagttttggattttattagtttaggaatttttatatgtagattagagtttttatggtgaatggaataggttttttttatgttgtatatagatttagatgtatagttatatagaaattttagttttatgtgtgttgttataggtataggtttttgttagagtttggtagtagatatttggggaggtggtgagggtgttgtggggttgttaagtttgggtgtttggttttttggttttttttaatagttagttttttttaaagggttggatggtttttaggatgggaatgatggtgttattgttttttgggttattgtgttataggttttttttgattatgtggttgttggtgttttgttgggggtggtggtgagtggtaattgtatttgtttttaatattttttgataggtttatagtatttttggtgggtttgatagaaggagttatttatggagagaggagggaggtaagagaggttaggggagagttttggttttgtgtgatttgagtaggatttttttttgagatttggtttatttgttaggaaagtggggatatggattggaaggttttttatatttgttttaggttgtatttttggttgaaaaggtagttttttttggttttagatagagttgaggatataagttgtttttgggttgtttgttttgaagtttttttaggtttatttatttggatggttagagtagttgataaggtaggttttagggtagtggttggtttttagtttagtggttttgtagggagttagttttattttgtagagagttagtttttgaggttagaattgtgttgtaggtaggattgggatttggttaggtattgtagtttttgtttaaagatttatttggtaaattgtagttattgttttagttttttttattgtttgttgtgttaggttttgggtagtgatttattggggagatgatggtggttttggtgggtatatttgggtatatattgtgttatatagtgtttagtttttgttttttattatataaagtttgggatgaaggaggtattttttaaggtttttttgaattttttttttgaggtttttatttgtggttttttttattaagttaggtgatattttttttttttgttttaggtttggtttttgtatttttgtttttaagtatggtgagtatggtggttataggtagttgtttgaaagagtattgtgtgttttttggttagttttagaagtagatagattttatgtaggatattagtagatt

SEQ ID NO: 2160 - DNA, 2496 bp, Artificial Sequence
  chemically treated genomic DNA (Homo sapiens)
tttgtattttgttttttttaggtagtggataaagtattttttttgttgttgtttttttgagatagagttttttattgtttaggttagagtgtagtggtgtgattttagtttattgtaatttttgttttttgggtttaagtaatttttttgttttagttttttaagtagttgggattatagataattattattttatttagttgatttttttttttttttttgagatggagtttttttttgttatttaggttggagtgtagtggtgtgattttggtttattgtaagttttgtttgtagttgggattataggtgtttattattatgtttggttaattttgtttttgtatttttagtagagatggggttttattgtgttagttaggatggttttaattttttgattttgtgatatgtttattttggttttttaaagtgttgggattatagatgtgagttattgtgttaggtttaaagtatttttttatagtttttagtttgttgttgtgtttgttttttttatggtttgtatagtttgggtttgaattttggttttttatggttttgggtaagttggttaattttttgtgttttaatttttttatttgtaaagtggggttggggaaaaattttattttatagggaatattaagtgagtttatgaaagtttttggtgtgtggtatgtgataattattatttaagtataaggtatgtttatatgtattggttgtttattatgatgtattagtatttatttaagttatttttttttagagtttgtttggaatgtagaattggttagtttttttttttaaatagtttttgtaatttttggttatttgtgtgggtagaggtgggagtgtgggtgtgtggttttgttttgggatagggatgatgagagagtatgtgtttgtgtttagagttgtttttttttttgtttaggggttattaaatatgtttatggtttttgttgtttggttaatggttattttgggttgttgttttttggttagatttggagtttataagttaattttagaaatgattggttgatttagttgttgttattatattggtttagaaggagggtggggggaggatgggttggggaggggtagtaaggggaagggatgtgtgttggtgtgtgtggagagggtgtttttttgtttttgtttttttggtttggtggggtttttttgtggttatttggggagatgttttagatagttgtggtttttgtgatttgtgttttttttgtagaaggtattattgggttgggttttagatgggtattttgtgagtggattggtgagttttaattttttggaatgtgttgttgggggttgtggtggtaggtttttggttttttggtttattttaggtttttttggtgttgagagtttttgaggtttgatttttttgtttgttgtttgtgttgtttattttgaaaataagagtgttttggtggaaggatttgagaataaaatgttggggtaaatggatatttgtaagaattattttttttaggttttagttgtttgttaataatttttaaaaatgtgtttagaattatgagttaatttttattgtgaatttttgtttgtagatgttagggtttatatttttttttaattattagtaatttttgttttattggtgtttagttatggttggggaagagttaggtttttttttttgtgttaataatgttgttgagttgaaatgttaattttaatgtttttttttaaattgtaaattaagtatgtatgagtgttgggggaagggtaatggaagtttatggttgaaggttttaattttatgttattttttttgagttttgtttgagggaaggtgttttatttggtattttggatagtaggtatttttttgaatgaagaagatttataggttttagtggttttatagtggggtagaagggggttatgttttgatatggagtttttttttaggagaggagaagattttattagttataggtttttgggttgttgtttttttgtagtttttttatggaggaggttaggagtggggaggtttggaatggggagtttagttggtttttagttggttttaagttgtttagtttggttttaatttgtaagtgtggggatttgggtttttattttgtagggtttggaatatgatgaggttgttatttttattttgtggttgtttaaaaagatgttgttttatttagtgtattagtttatggaggttgagtgttttattagggtttttagattttaataaggataatggtggttttgggtgttgtatttattgttgatttaagttgtatttttttatgtttgggtattatgtttagtgtgtattttgggagtagaaaagagaggggtttatatatttttaggttatggatgagttttagaaaataatagtggagaggagagagagaaaagaaggaagaggaggaggagaaggagaagaagagaaggaggaggaggaaaaaagtagga

SEQ ID NO: 2161 - DNA, 2496 bp, Artificial Sequence
  chemically treated genomic DNA (Homo sapiens)
ttttgttttttttttttttttttttttttttttttttttttttttttttttttttttttttttttttttttttttttattattattttttagaatttatttatagtttaagagtatatagattttttttttttttgtttttaaggtatatattggatatggtatttaggtataggagaatataatttaggttagtaatggatatagtatttaaggttattattatttttgttggagtttagaagttttagtgggatatttagtttttatgagttggtgtattgaatgaggtagtatttttttggatagttataaagtgaaagtaatagttttgttgtattttaggttttataggatagaagtttagatttttatatttgtgggttgaggttagattggatagtttggagttgattgggagttgattgggttttttattttgggtttttttatttttggttttttttatggaaaagttgtaggaaggtagtagtttagaggtttgtagttggtgaggttttttttttttttgggagagagttttatgttaaagtatagtttttttttgttttattatggggttattgggatttgtgaattttttttatttagagaaatgtttgttatttggggtgttagataagatatttttttttagatagagtttaaggaaggtggtatgaaattgaaatttttagttatgaatttttattgttttttttttaatatttatatatgtttaatttgtagtttaaaaaagaatattaaaattaatattttgatttaatagtgttgttaatatgaaaggggaagtttggtttttttttgattataattgaatattagtgaagtagaaattattggtagttgaggaaaaatataaattttgatgtttgtgggtaaagatttatagtggagattaatttatgattttaaatatatttttaaaaattattagtgaatagttggggtttgaggagagtgatttttatgaatgtttatttgttttagtattttgtttttaaatttttttattgaaatatttttgtttttaaagtgagtagtatgggtaataggtaaaggaattaggttttggaagtttttaatattagaaaggtttaaaatagattaaaagattggaggtttgttattgtagtttttagtagtgtattttggaaaattaaaatttgttgatttgtttgtaaggtgtttgtttaaaatttagtttaatagtattttttgtaaagaggatatagattataggaattatgattgtttaagatgtttttttgggtggttgtgaagggattttattgagttgggaaagtaggagtgaaggagtattttttttatatatattgatatatattttttttttttattgtttttttttgatttgttttttttttattttttttttgggttaatgtgatagtagtagttgagttgattagttatttttaaaattagtttgtgagttttaggtttggttaggagatggtagtttggggtggttgttgattaggtagtagagattatggatatatttggtggtttttgagtagggaaggggatagttttggatataagtatatgtttttttgttatttttgttttagggtagggttatatatttatatttttgtttttgtttatatagataattagaggttgtaggaattgtttgaggaggagagttggttggttttatattttaggtagattttggaagaaaataatttgaatgaatgttggtgtgttgtggtaaataattagtgtatgtaaatatattttatgtttaggtagtggttattgtatgttatatattgagggtttttatgaatttatttaatgttttttatgaggtagggtttttttttagttttattttataagtggggaaattgagatataaaaagttaattaatttgtttaaggttatggagagttagaatttaaatttaggttgtgtgggttgtagaggaaatagatataatagtaaattaggggttataaaaaagtgttttgggtttggtatggtggtttatgtttgtaattttggtattttgggaagttgaggtgggtatattatgaggttaggagattgagattattttggttaatatagtgaaattttgtttttattaaaaatataaaaataaaattagttgggtgtggtggtgggtgtttgtagttttagttataggtggagtttgtagtaagttgagattgtgttattgtattttagtttgggtgatagagagagattttattttaaaaaaaaaaaaaaaaattagttgggtggggtagtggttgtttgtgattttagttatttgggaggttgaggtaggagaattgtttgaatttaggaggtggaggttgtaatgagttaaggttatgttattgtattttagtttaggtgataagagattttattttaaaaaaataataataaaaaaagtgttttgtttattgtttaaaaggagtaaagtataga

SEQ ID NO: 2162 - DNA, 2285 bp, Artificial Sequence
  chemically treated genomic DNA (Homo sapiens)
ttagtatttgatttgtggtatgtgttaatttattattgttaattgtagggatttagtgatttttttgaatttttgttatttttgttatggtttttgttttgtggaggtttgtggaatgggaagtggggaggggaaggagaagggggtggagttagttggagttttttggttaggtttggagttattttgttttgttatagtttttatgggtttagagtgggttttggggtagagggtttgtaaggataggggtgggtggttttgttgagggtggtgttttgagtaggttttattttttagtttgtttagtttggttttattttagttttgttgttttgttattttgtttttttgtgtttattttttattttttgttggggatattttaaggtttgttaaggttggagtaggggtgggatttagttatttaataaatgtttttttggttatgtagggttgggtattggggtggggggttgatttggattttttaagatattagattgtttaattgtttagtttttattggggtaagtgttttgttgagggtgaagggggttgtgagtgtttattagggagtttggataggttttgttttttatagttgttttattttttggagttgttttggtggtagatggtattgttttagaaaggtgaggttggagttgttttttttattaggggtggttaaggatgtttttagggttttttatgtaggtttttagggttattttgggtgtggttgagggtatgtagattatgttgtgtttttttttattttttatgtttgttgtttgtttgatatgttttttagttgttttgttttgtagaagttgtgtggttttttttgtgagtagagttgggttttatgattttttggagtagtgttagggattttttttaggtataattttaaagggggttttaggatttgttaggtttatggaagtggtttttgtaattttttttttggtggtagtttttggtgtattttggtaggggtagtttttttttattatagggattttgtgtgttaggttttagttgtgttgttgttgaattatggatttaatagtagagaagttttgtaggttgtttgtgttggtttgggaaattggggtttagttggggtttgttatggttttggtgttgttttgttttttgttggtgttatggagtaagtggagagatttatttttttggttttaagaggtattaatggaggaggttgagaggtaggagttgaataattgatggttttttttggtttaggatttgttgaaaatgatatggtgtaaggtagaggggttgagagtgttgattataaaatgttgagaagttattttagggtggttatggttagaaggaggatttttatttaggatggggttataggtatttggggtgggtgttagaggtttttgttttgggttattttagggggttaggatatttagaagttgggtttagaggtttatagggttggtttatttttattttttttttatatgtttgttattattggtgttttagtttagtaattttatggtttgttggttttgtttatagtttttattgttttttgtgtgttgggtgtgggtttttgagttttatttttagtttttttagttttaggagaggagtggaggataggggtttaatgtggggtgtggtgtggagtggggagggttgtggtgtttttttagtttttttttttttaatagttttagttttttttttggagaattttttatttgttgggtatatttggtttttttttattattttgtttttagttgggagatttttatttagtgaaatagtgaaataggaagggttttttggttattttgtgtagggtgtagggtatgtagtgggggagtggtttgtttttttagtgttttattgtttatatttttaggggagtatatagatgggtaggttgtggggttttgattttatggtagtgtttgggggtgaatgtttatagtttttgaaattttagtgggagtgtgttattgggtggttttttagtttagtggtttgtaggtggttggtgagagtgagtttaattagatttttgttttataataaggatagaggaatttttgtattttagggttttttgttttggtgtattaaaaaattggattatatgtgggtttggagaatgagtgtaaggttttattgagtggaagtagtttttagtagatgggggagttagaggggagatggtttttttttggagttaggtaatatttttgggatgtttagtagtttgt

SEQ ID NO: 2163 - DNA, 2285 bp, Artificial Sequence
  chemically treated genomic DNA (Homo sapiens)
ataagttgttggatattttgagaatgttgtttgattttaggggaaaattattttttttttggtttttttatttgttgagagttatttttatttaataaaattttgtatttattttttaagtttatgtgtgatttaattttttggtatattaaggtaagaaattttgggatatagaaatttttttgtttttgttataaggtaggggtttaattgagtttatttttattagttatttatagattgttagattaaaagattatttggtaatgtatttttattggggttttaagagttgtaaatatttatttttagatattgttatggggttagagttttatagtttgtttgtttgtatgtttttttagaggtgtgagtggtggggtattgaagaagtgagttatttttttgttgtatgttttgtgttttgtgtggggtaattagggaattttttttgttttattgttttattgggtagagattttttggttggagatagaatggtggggagaggttagatgtgtttagtaggtaggggattttttaggggggaggttgaggttgttaggaaaggaggggttgagggggtgttatagttttttttgttttgtattatattttatgttaaatttttgttttttattttttttttggggttaaggaggttgagagtagagtttagaggtttatgtttagtatataggaggtagtgggggttgtggatggggttaatgagttatggggttgttgggttgaagtattggtgatggtaggtgtgtgagagggaagtgggggtgagttagttttgtgggtttttaggtttagtttttgggtattttggttttttggaatgatttagggtaggagtttttgatatttgttttaaatgtttgtgattttgttttgagtgggggttttttttttggttgtgattgttttggagtggttttttagtattttgtggttagtatttttagtttttttgttttgtattgtgttatttttagtagattttgagttagagaaggttattaattatttagtttttgttttttagttttttttgttagtattttttaaagttgggaagataaatttttttgtttgttttgtggtgttgataggaagtagggtggtattaggattgtgataggttttggttgggttttggttttttgagttagtataggtggtttgtaaggtttttttgttattaaatttataatttagtggtaatgtagttggggtttggtatatagggtttttgtgatgaggaggggttgtttttgttggaatgtattagaggttgttattagggagagagttataaggattatttttgtggatttggtaggttttagggttttttttaaaattgtgtttggggagagtttttggtgttgttttggaggattatggagtttgattttatttataggggagattatatagtttttgtggggtaagatagttgaggagtatgttaggtaagtgatgggtatggggggtgggggggagtatagtgtggtttgtatgtttttagttatgtttagggtgattttggaggtttgtatggaagattttggaagtgtttttggttatttttggtggaagagatagttttagttttatttttttaggatagtgttatttgttattaaggtagttttagagagtgggatagttgtgagaggtgggatttgtttaggttttttgatgggtatttatagttttttttatttttagtgaggtatttgttttaatgaaaattgagtagttggataatttgatgttttggagggtttaggttagttttttattttaatgtttagttttgtataattaaggaagtgtttgttgaatggttgagttttatttttgttttaattttggtaggttttggagtgtttttggtaggaagtggagggtgaatatagggggataaagtaatagggtagtagagttggggtggggttaggttgggtagattggggaatgagatttatttagaatattgtttttggtagagttatttatttttatttttgtaaattttttgttttagggtttattttaaatttatgagagttgtggtaggatagggtgattttaggtttggttaggaggttttggttgattttgttttttttttttttttttttttattttttattttataggtttttatagggtaggggttgtgataggggtgatagaagtttggagaggttattgagtttttgtaattagtagtaatgagttgatatatgttataggttaagtgttaa

SEQ ID NO: 2164 - DNA, 2448 bp, Artificial Sequence
  chemically treated genomic DNA (Homo sapiens)
tgtgatatttgttgttgaatgaaatgggggtttgtttttaatttttggtaggagttggtgggttttttttttgttgtagtttgggaatgttttggagaaggttatatttatggtaaggtgagtgtagttttgaatgttgtagggtgaagttagtttgtataggatgtttttattggtttttgttttatgttttattgtgtttgggtttgggttatgtggtttaggataggggtggttttttatgaaattttttaaatttagatggaggagaagttattgttatgaaggtaagtgttttttaggaggttggtggttgtagtttttagttaggttagtgttgatttatttttgggatattgtatgtggtttttatagttgtgttaggtagtgtttgatggggaggggttgtggggatgtgtatgattttatttaggttttgtttttagaggggtttggttgtttttatagatttttaaatattttatgtatttattttttgtatagttaaaatttatataataaaattaattttgttgaagattgtattttgttggtatttagtgtagttattatgttgtataattttatagtagttgagtttttgtttttgttattttataaaaagttttgtgtttatgaagtaatttttttttttgtagttatttttttagttttggaagtttttgtttttttagatttttagaagtaaaggttgtagaggtttttttagattgggtatttggatgtttatttgaggtttttttttttttgtttttagtagggaagttaaagtaattgttatagggtttagttggtatagattttaggtttagttagtattagtagttgtttagtatgttttattttttttaggttttaggttttgggtttttgattttagagggttttggttattgggatggttggtagatgtaagatgggaagtagttttgatttttattatttttttttgggatatgtttatgttttgtttttgttatttttttttagttgtttgagggttggttggtgtgagtttaggtttttgtagggtatgttaggagtaagttgtgatttggttttgggttgtggagtttatgttattttttattgaggattttgggttgttttgttttgtgtatgggtatttgggttttgatagtttgttgggttttgggttattagaggttttgaattgtgttttggtgatagttagttttttgtatggggtatgtatagatttgggtttaggttggggtattgagatttttatatttagtagttgtggtgaggttggtttgtttgttttttggggttatttttgttgtgttgtttttttttttttttttgttttttttgttggttgttttttttttgttttttttgggtaggtatggttgggtgggggtgaggttttggtaaagttttttttgttttttagtttagtggtgtttatatgtgatggtgtgggggtagttttgtgaaaagtttttttgtgttttttttttaattaagaaatagtagtaggttttgggggtttaggttttatgttttttttgaatgttggttgtggttataggtggttggatgggtaggtttagtagtggattttaaggaagaattttttaggtttattaggtagttttgttgttttttgggggttttttttatattgttaggttatttggtaggtttgggaggttttttttatttttgggttttaggagttgagatggtatttgtaggagtttatgtgggatttgggtgtttggatttggggttttagatttgatttttttttttgttttgtggggtttttttgaggtttagtttttttttttgtgaaatggggagaataaggtgttttgttttttagaatttatatttagagagttagaagtttttttaggtttggataaagaggtgtttgttttttttaaattaaggtagagggatatttgagagggtgttttgagtttatttttttttgttttatttgggatgtttgtttgtgttttttttgtatagttgtttatgtttttaggaaaatgagggtttttgttttttttttagaattttagattttgaggtaaaggtttggaaagaatttatagtttttatggtattattgttattgagtgggttttattttttagtttgggaggtggatttttttagagtaggggtgtttagtagggagggttgattgaggggagttttgagagatttttgatgagaatagggggtttgtagaggaaataggttttttaaggttatggttatgtttagtgagattttagtttagttttttggagtgttgtgtttagggttatgttgggataggtaagtggtgttatttttttttttgaagatattttatatttatgtggaaaaggagaatggtattttttatttatttggaggagggatagaggtaagggttgtttt

SEQ ID NO: 2165 - DNA, 2448 bp, Artificial Sequence
  chemically treated genomic DNA (Homo sapiens)
ggggtagtttttgtttttgttttttttttaggtgagtgaaaagtattgttttttttttttatatgggtgtaaagtgtttttaggaaaagaggtgatattgtttgtttgttttagtgtgattttgggtatagtattttggaaagttgggttggagttttattgggtgtgattgtgattttaggggatttgttttttttgtaggttttttgtttttgttaggggttttttagggttttttttggttagttttttttgttgagtatttttgttttgagagagtttgttttttaggttggagggtaagatttgtttagtgataataatgttgtgagaattgtgggttttttttgagtttttgttttagaatttggggttttggaaaagagataagagtttttgtttttttgagggtatgggtagttatgtggaggagatatagatggatattttaggtgggatagggggaggtggatttaggatatttttttagatgtttttttgttttggtttggggaggatgggtatttttttgtttaggtttggaaggatttttagttttttgaatgtggattttggggggtagagtgttttattttttttattttatagaggggagggttgagttttagggaggttttatagaataggagggagaattaggtttgaaattttaggtttagatatttagattttatgtgggtttttgtgggtattattttagtttttgggatttgagggtggagaaagttttttagatttattgggtggtttgataatgtgagaggagtttttggaaagtagtagggttgtttggtgggtttgggggatttttttttgaagtttattgttaggtttgtttatttagttgtttgtgattatggttagtgtttagagaggatgtggggtttgggtttttggagtttgttgttattttttaattagggaggagatataaaggggttttttatgaggttgtttttgtattgttatatgtgagtgttattgggttggaaaatagagggggttttgttagaattttatttttatttggttgtgtttgtttagagagggtgggggaggagtaattaatagagggggtaggggagagggaggagatggtatggtagaggtggttttgggaagtaggtaggttagttttattgtggttgttggatgtggggattttggtgttttagtttaggtttaggtttgtgtgtgttttatgtaaggggttgattgttattaggatgtaatttaaggtttttggtggtttagggtttggtgggttattagaatttggatgtttgtatgtgggatagagtagtttaggatttttagtggagagtagtatgggttttatagtttggggttaggttatagtttgtttttggtatattttataggagtttgggtttatattagttagtttttaggtagttgaggaaggatagtagaggtagggtatgggtgtgttttaggaggaggtggtgggggttagggttgttttttattttgtatttgttagttgttttagtggttaggattttttgaagttagggatttaggatttgggatttggggagaatggggtatgttgagtaattgttggtgttggttgggtttggagtttgtgttagttgggttttgtagtagttgttttggtttttttgttgggggtaggagagagaggattttaggtggatgtttgagtgtttagtttggaaaggtttttgtagtttttgtttttgaaggtttgggagagtaggagtttttggggttgggagaatggttgtagagggagggattgttttataggtatggggttttttgtggggtgatggaaatgagaatttggttattgtggggttgtatagtatggtggttgtattagatgttagtagaatgtaatttttaatagggttgattttgttatgtgaattttaattatgtgaaaaataaatatataagatgtttgaaagtttgtaagggtagttagatttttttgagagtaggatttggatggggttgtgtatatttttatagtttttttttattaagtattgtttggtataattgtgagggttatatgtagtgttttggaggtgggttagtattggtttggttgggggttgtggttattaattttttggaaggtatttgtttttgtggtggtggttttttttttatttaaatttgggggattttatgaagggttatttttgttttgagttatatgatttgagtttagatataatgggatatgaagtagaggttagtagagatgttttgtgtagattggttttattttgtaatgtttagagttgtatttattttgttgtgggtatggttttttttaaggtgtttttaggttgtaatagggaaaaggtttattagtttttgttgagagttgggggtgggtttttattttgtttagtagtgaatgttata

SEQ ID NO: 2166 - DNA, 2374 bp, Artificial Sequence
  chemically treated genomic DNA (Homo sapiens)
gggttttggggatttattgtatgttgggtgttgggatgggggtagatattgttttttttttttattttttgtttgattttttttttttttattttgttttattattttagtggttttaagtttgtaaggagatttataggtagtaggagatatgggttgtagagtgggatgggggtgagtatgggtgtggtgtgtatatatataagttgttagaggtattatttgttataagtttttagatgagtattttagtttaagaggtaggatattagggtggtaatagttttagagttgttattttgagtgtgatattatttttttatgttttttttttgggttttaatttttttatgtgtagagaggaagtagtgatttatatggtttttttagttttgttattgtgatgattttattatattggattttttaatgatttagggatgttatttgtgttttgttaaggttatagtttgtagttagagaaagttttaaatttatgttttagggttttttttgagttttagatttttattgagaaggaaaatatattagtttttgggtttggtttttttttttattgttatatttttattttattttgtttgtgttttttttagttttgtgggttgaaagtgttttttaaatatttaggtagttttttaggtaggattttaggggtgttttttaggaaattgaggaatttttattttttgaatattatgagtttgtttatatagtgatatttagtgatgattttggttttgttttttttttttttattttttatgagtttttagtttagaatatttggttagatttaggttgggggagttagattttggggttaagtaattagaattgggggtttttgtttgaggattttagtttttttttttaggtgtttgtttgatggggagatggttgatgtttagaatattttattggatagtttagggagtgtgggggttgtggtagtgtttgtggtttttgttttaatttttttgttgggtatagtgggtaatgggttggtgttggtagtgtttttgtagtttggtttgagtgtttggtaggagtttggtagtattatggatttgtttatttttaatttggtggtggttgatttttgttttattttgtgttgtgtgtttttttaggttattatttatatgttggatgtttggttttttggggtttttgtttgtaaggttgtgtatttgtttatttattttattatgtatgttagtagttttatgttggttgttgtttttgtggataggtgtgttgtgtttggggtttggttgggtagggttgtgggggtgggggttgggggaggagttttgaatagatttttattggttttaggaaggagagagtgggggattagaaagggaggtgggtgggaggaaataaaagttttttgattttttgtaagtagtttttgggtatttgtagggtgtgtttgaggggattgttttgtttttttttttttttattgtgaatttttagaggatgtttttgagttttaagtggtagtatagggtttggtatatagtaagtgttttgtaagtgtgaaatgaattgtaaaagaagtttatgaatgtgtttattagtttttttgttttgttttgttttgttgttttttttttttggattttggtttattgtaatttttgttttttgggttttagtgatttttttgttatagttttttgagtagttgggattataggttattatatttggttaattttttgtatttttagtagaaatggggttttgttatgttggataggttggttttgaatttttgattttaagtgatttgtttgttttggttttttaagtgttgggattataggtgtgagttattgtgtttagtttagttattttttaattgtttatatttggttaagttgtgtatatatttgtttttatagtttgaaatttggggttaaatttaggtttattttagttgatgattttgggtaagttatttttttttggattttatttgatgtatttataaaataattttagaaataataagttattgggattgggtttttgttaggtgtaagggtttaagtattttgtgtgtttatatttttaatttttgttatgttttttatggtttataggaggtgtattgggttgtagggtttgggtgtgggatgtggtgtgggtttttgtgggagggtatttgtttgttttgttgattaggtgttttttgtaggtatttggttgtgtggtatttgttgtgtttgtgtgttttgtgtatgttgtgtaatgtttgtgttgtagtggggttggtgtggttgttggtggtgttttttttggtgttttattttagttattatggtattgtgtgttatgg

SEQ ID NO: 2167 - DNA, 2374 bp, Artificial Sequence
  chemically treated genomic DNA (Homo sapiens)
ttgtagtgtatggtgttgtagtagttgaggtagggtgttgagaagagtgttgttagtagttatattagttttattgtggtgtgggtgttatgtggtgtgtgtagggtgtgtgagtgtagtgggtgttgtatggttaggtatttgtggagggtgtttggttagtggggtgggtaggtgtttttttgtaggggtttgtgttatgttttgtgtttgggttttgtggtttagtgtgttttttgtgaattgtgggggatgtggtggggattaagggtgtgaatgtgtaaggtgtttaggtttttgtatttagtaagggtttgattttggtgatttgttatttttaggattattttatggatgtgttagatgaggtttagagagaagtgatttgtttagggttattagttggagtgagtttggatttgattttaagttttaagttgtggaagtagatgtgtgtatagtttggttaggtgtgggtagttagaaaatagttgggttgggtgtggtggtttatgtttgtaattttagtatttgggaggttgaggtgggtggattatttgaggttaggggtttgagattagtttgtttaatatggtaaaattttgtttttattaaaaatataaaaaattagttaggtgtggtggtttgtaattttagttatttaggaggttgtggtaggagaattgttggaatttaggaggtagaggttgtagtgagttaagatttaaaaaaaaaaaataataaaataaaataaaataaaaaaattgatgaatgtatttgtgagttttttttgtgatttattttgtgtttatagagtatttattatgtgttagattttgtgttgttatttgagatttagaggtgttttttggaagtttatagtggaggaggggaagggtaggatagtttttttaagtatgttttgtaggtgtttagaggttgtttgtgaggggttagggagtttttgtttttttttatttatttttttttttggttttttatttttttttttttaaggttagtgaggatttgtttaggattttttttttaatttttgtttttatagttttgtttagttaggttttaggtatagtgtatttgtttatggagatagtagttagtgtaaagttgttggtgtatatggtgaggtagatgagtaggtgtatggttttgtagatgagggttttaaagagttaggtatttagtgtgtagatggtggtttggaagggtatgtagtataggatgaagtagaggttagttattgttaggttgaggatgaataggtttgtggtgttgttaggtttttgttaggtatttgggttaggttgtaggagtattgttagtattagtttattgtttattgtgtttagtaggaagattagggtaaagattataggtattgttatggtttttatattttttgggttgtttagtgaaatgttttgggtattagttatttttttattagatgggtatttgggaagagaagttggaatttttaggtaagagtttttagttttggttgtttgattttgggatttaatttttttgatttgggtttggttaggtgttttgggttggaagtttgtgggagatggaggaggggagagtagagttaaagttattgttgagtgttattgtgtgagtaagtttgtggtgtttaaggggtgagagttttttagttttttaaggaatatttttggagttttgtttggaggattatttaggtatttgagggatatttttaatttatgaggttggggaaggtataagtgaagtaggatgaagatatggtgatggggggaggggttaaatttagaaattggtatgtttttttttttaatggggatttgaagtttaggggagattttgggatatgggtttagggttttttttggttataagttgtagttttagtaaaatatgggtaatatttttgagttattggagggtttagtatagtgagattattataatggtaaaattgggaagattgtgtaggttattgttttttttttgtatatagggaaattgaggtttagagaggggatatgggaggataatattatatttgaaatggtagttttggggttgttgttattttggtattttgttttttaagttagagtgtttatttgagagtttgtaataggtggtgtttttgataatttgtgtgtgtgtatattgtatttatgtttatttttattttattttatagtttatgttttttattgtttgtggatttttttgtaggtttgagattattggggtggtgggataaagtaggggaaaggggggttaggtagggagtagggaagaaaggtaatgtttgtttttattttagtatttagtatgtagtaggtttttaaagttt

SEQ ID NO: 2168 - DNA, 2500 bp, Artificial Sequence
  chemically treated genomic DNA (Homo sapiens)
ttgttgaattaggaggtttatttagtttggttattttatttaggattaagtttattgtttaaggtggaggtgggtgttgtttattttgggttttggggatttattgtatgttgggtgttgggatgggggtagatattgttttttttttttattttttgtttgattttttttttttttattttgttttattattttagtggttttaagtttgtaaggagatttataggtagtaggagatatgggttgtagagtgggatgggggtgagtatgggtgtggtgtgtatatatataagttgttagaggtattatttgttataagtttttagatgagtattttagtttaagaggtaggatattagggtggtaatagttttagagttgttattttgagtgtgatattatttttttatgttttttttttgggttttaatttttttatgtgtagagaggaagtagtgatttatatggtttttttagttttgttattgtgatgattttattatattggattttttaatgatttagggatgttatttgtgttttgttaaggttatagtttgtagttagagaaagttttaaatttatgttttagggttttttttgagttttagatttttattgagaaggaaaatatattagtttttgggtttggtttttttttttattgttatatttttattttattttgtttgtgttttttttagttttgtgggttgaaagtgttttttaaatatttaggtagttttttaggtaggattttaggggtgttttttaggaaattgaggaatttttattttttgaatattatgagtttgtttatatagtgatatttagtgatgattttggttttgttttttttttttttattttttatgagtttttagtttagaatatttggttagatttaggttgggggagttagattttggggttaagtaattagaattgggggtttttgtttgaggattttagtttttttttttaggtgtttgtttgatggggagatggttgatgtttagaatattttattggatagtttagggagtgtgggggttgtggtagtgtttgtggtttttgttttaatttttttgttgggtatagtgggtaatgggttggtgttggtagtgtttttgtagtttggtttgagtgtttggtaggagtttggtagtattatggatttgtttatttttaatttggtggtggttgatttttgttttattttgtgttgtgtgtttttttaggttattatttatatgttggatgtttggttttttggggtttttgtttgtaaggttgtgtatttgtttatttattttattatgtatgttagtagttttatgttggttgttgtttttgtggataggtgtgttgtgtttggggtttggttgggtagggttgtgggggtgggggttgggggaggagttttgaatagatttttattggttttaggaaggagagagtgggggattagaaagggaggtgggtgggaggaaataaaagttttttgattttttgtaagtagtttttgggtatttgtagggtgtgtttgaggggattgttttgtttttttttttttttattgtgaatttttagaggatgtttttgagttttaagtggtagtatagggtttggtatatagtaagtgttttgtaagtgtgaaatgaattgtaaaagaagtttatgaatgtgtttattagtttttttgttttgttttgttttgttgttttttttttttggattttggtttattgtaatttttgttttttgggttttagtgatttttttgttatagttttttgagtagttgggattataggttattatatttggttaattttttgtatttttagtagaaatggggttttgttatgttggataggttggttttgaatttttgattttaagtgatttgtttgttttggttttttaagtgttgggattataggtgtgagttattgtgtttagtttagttattttttaattgtttatatttggttaagttgtgtatatatttgtttttatagtttgaaatttggggttaaatttaggtttattttagttgatgattttgggtaagttatttttttttggattttatttgatgtatttataaaataattttagaaataataagttattgggattgggtttttgttaggtgtaagggtttaagtattttgtgtgtttatatttttaatttttgttatgttttttatggtttataggaggtgtattgggttgtagggtttgggtgtgggatgtggtgtgggtttttgtgggagggtatttgtttgttttgttgattaggtgttttttgtaggtatttggttgtgtggtatttgttgtgtttgtgtgttttgtgtatgttgtgtaatgtttgtgttgtagtggggttggtgtggttgttggtggtgttttttttggtgttttattttagttattatggtattgtgtgttatggtgtgttggagttttgtgtgtttgtttgggaggatgtgtg

SEQ ID NO: 2169 - DNA, 2500 bp, Artificial Sequence
  chemically treated genomic DNA (Homo sapiens)
tgtgtgtttttttaggtgggtatgtagagttttagtgtgttgtagtgtatggtgttgtagtagttgaggtagggtgttgagaagagtgttgttagtagttatattagttttattgtggtgtgggtgttatgtggtgtgtgtagggtgtgtgagtgtagtgggtgttgtatggttaggtatttgtggagggtgtttggttagtggggtgggtaggtgtttttttgtaggggtttgtgttatgttttgtgtttgggttttgtggtttagtgtgttttttgtgaattgtgggggatgtggtggggattaagggtgtgaatgtgtaaggtgtttaggtttttgtatttagtaagggtttgattttggtgatttgttatttttaggattattttatggatgtgttagatgaggtttagagagaagtgatttgtttagggttattagttggagtgagtttggatttgattttaagttttaagttgtggaagtagatgtgtgtatagtttggttaggtgtgggtagttagaaaatagttgggttgggtgtggtggtttatgtttgtaattttagtatttgggaggttgaggtgggtggattatttgaggttaggggtttgagattagtttgtttaatatggtaaaattttgtttttattaaaaatataaaaaattagttaggtgtggtggtttgtaattttagttatttaggaggttgtggtaggagaattgttggaatttaggaggtagaggttgtagtgagttaagatttaaaaaaaaaaaataataaaataaaataaaataaaaaaattgatgaatgtatttgtgagttttttttgtgatttattttgtgtttatagagtatttattatgtgttagattttgtgttgttatttgagatttagaggtgttttttggaagtttatagtggaggaggggaagggtaggatagtttttttaagtatgttttgtaggtgtttagaggttgtttgtgaggggttagggagtttttgtttttttttatttatttttttttttggttttttatttttttttttttaaggttagtgaggatttgtttaggattttttttttaatttttgtttttatagttttgtttagttaggttttaggtatagtgtatttgtttatggagatagtagttagtgtaaagttgttggtgtatatggtgaggtagatgagtaggtgtatggttttgtagatgagggttttaaagagttaggtatttagtgtgtagatggtggtttggaagggtatgtagtataggatgaagtagaggttagttattgttaggttgaggatgaataggtttgtggtgttgttaggtttttgttaggtatttgggttaggttgtaggagtattgttagtattagtttattgtttattgtgtttagtaggaagattagggtaaagattataggtattgttatggtttttatattttttgggttgtttagtgaaatgttttgggtattagttatttttttattagatgggtatttgggaagagaagttggaatttttaggtaagagtttttagttttggttgtttgattttgggatttaatttttttgatttgggtttggttaggtgttttgggttggaagtttgtgggagatggaggaggggagagtagagttaaagttattgttgagtgttattgtgtgagtaagtttgtggtgtttaaggggtgagagttttttagttttttaaggaatatttttggagttttgtttggaggattatttaggtatttgagggatatttttaatttatgaggttggggaaggtataagtgaagtaggatgaagatatggtgatggggggaggggttaaatttagaaattggtatgtttttttttttaatggggatttgaagtttaggggagattttgggatatgggtttagggttttttttggttataagttgtagttttagtaaaatatgggtaatatttttgagttattggagggtttagtatagtgagattattataatggtaaaattgggaagattgtgtaggttattgttttttttttgtatatagggaaattgaggtttagagaggggatatgggaggataatattatatttgaaatggtagttttggggttgttgttattttggtattttgttttttaagttagagtgtttatttgagagtttgtaataggtggtgtttttgataatttgtgtgtgtgtatattgtatttatgtttatttttattttattttatagtttatgttttttattgtttgtggatttttttgtaggtttgagattattggggtggtgggataaagtaggggaaaggggggttaggtagggagtagggaagaaaggtaatgtttgtttttattttagtatttagtatgtagtaggtttttaaagtttaggatgggtaatatttatttttgttttgggtagtgggtttgattttgggtggaatggttgggttgggtgggttttttgatttagtgg

SEQ ID NO: 2170 - DNA, 2419 bp, Artificial Sequence
  chemically treated genomic DNA (Homo sapiens)
agtgtttgggggtagtttagtttttagttttttttatagttttatgaggaggttttagtatgttttttttttgttaaatgaggagattaagaaatgggttaattttttatttaggtgagaagggtatagagttgggatttgaatttggttaggtgtagtttggggtttttgttgttattaggggtatatggtggttggggtagggtggtaaagtaggagtttgggagtttatggtttatttaatttgatttttgaatttaatggggtttatgtttttttgttttttttggttatttttatttgttatttttttgtttttatatatagtgtttgttttttgttatttaattttaggggtttttttagttgggtgtgggattttggttgtgggggaaggaaggggatttttggggatagtttagttttttattttattttttttttttgaggtgttataaatatagttaagagtgggaggttttggtttttaggagaggagagagtatgagttttaggtagttttaaagatagggttttatttttaatgtttggagatgtttttgatttgtttagttatgtagttaagggagggataaatttagatttaaatttagggttttgtttttagtttggggtttttagaggttttgtagtaattttattttatagatggttttttaaggggatttttttgtttttatttattttataagttttttgatgagtatgtaatatagggttgttttttttggtatatgggttttattttatagaggttaggagggggtttttgtttgttttattttatattttgtattttttttgggtatttaggttatttatttattttttttttatttttttgggttgggggtttagtatatagagtttagggaagttttttattttatagtagtttttagttttttttgaatgggttgggaaggagagttgatttgggattggggattgtttttttttttagttaggagttatgagagttgggtttaatttttttttaggggaattttaagataaagttgggggatgggagtttaggtagaaattgttgggggaattgagttagagttgaaagttttttttgtgatttttatttttagttttttggttggtttataggggttgggagggaggtagggggatattatttggttgagatatggggtggtggtagtgtgtgttttttagttttttttggtgttgggattgtggttatttttttagggttttgttgagttttggttgttggggttgtaaagattaaaagtttagagttagtttattttttgtgtagaggatagaggggtaaggtttggggtggagaggtggggagatgaggtttatgagaaagtttgaaattttttaagtatttagggttagataaagatttgttttttatgttgggggtggtatatatatatatatatatatatatatatatatatatatatatagatatatattgttaaataggggtttagttgtatataggagttaagggaatgtaggttttttttttttttttttttatattatttttatgttaatttatataggttatttaatatttttgatgtttttatttggttatatatatatttattaatatgtaggttttatataagtaggtttttttaggtgattttagtgttttattttttttttagtttgtaatatattatttttttgagatttttattttatttagttttttaggaagttttttattttgtttagtatttagagatgattgttttttttagtttttaattttgtgggtatgtggtaggtgtttatatttatgaggtatatgagttattttgatataggtatataatgtataataattatattagggtaaatggggtatttattattttaagtatttattttttttttgtgttaaaatttaagtatatttttttagttatttttaaatgtataataaattattgttgattaaagttattttgttatgttattaaatattagattttatttatttgatttaattttgtttttgtatttaataataatttttatttttttaatttttattgttttttttatttttattattgttttttttatttttatgaatttaattgttttaatttttagtttttataaataagtgagaatatgtgagttttgtttttttgtgtttggtttgttttatttaatataatgatttttagttttaaatatgtggttgtaaagataggattttatttttttttatggttgaatagtattttattgtatatatgtattatattttttttatttatttatttgttgatgggtatttaggttgtttttaaattttgggtattgtgaatagtgttgtaataaatgtgggaatgtagatgttttttttatatattgattttttttt

SEQ ID NO: 2171 - DNA, 2419 bp, Artificial Sequence
  chemically treated genomic DNA (Homo sapiens)
gaaaggaaattagtatatggaagagatatttgtatttttatatttgttgtagtattgtttataatatttaggatttggaagtaatttaagtgtttattaatagatgaatgaataaagaaaatgtggtatatatatgtaatggagtattatttagttatgaaaaagaatgagattttgtttttgtaattatatgtttgaaattggaggttattatgttaagtgaaataggttaggtataaaaagataaagtttatatgtttttatttatttgtgggagttaaaaattaaaataattgaatttatggaaatgggaagggtagtgatggagatgggaagggtagtgggggttggaggggtggggattgttgttgggtatgaaaatagaattagattgaatgaataagatttagtatttgatagtataatagggtgattttagttaataataatttattgtatatttaaaaataattaaaagagtatatttggattttaatataaagaaaggataaatatttgaggtgatggatattttatttattttgatgtgattattatatattgtatgtttgtattaaaatagtttatgtgttttatgaatatagatatttattatatgtttataaaattaaaaattaaaaaaaatagttatttttgaatgttaaatggagtaaggggttttttggaaggttgggtgaaatgggagttttggaaagatggtgtgttgtaggttgggaggagggtgagatgttggggttatttagagggatttgtttgtgtgaagtttatgtattagtgggtatgtgtgtgattggatggaggtgttagaggtgttgggtagtttgtgtgagttggtgtgggggtgatgtaggaggggagagagggagggtttgtgtttttttggtttttgtgtgtagttaggtttttatttgataatgtgtgtttgtgtgtgtgtgtgtgtgtgtgtgtgtgtgtgtgtgtgtgtgtgttgtttttagtgtaggaggtagatttttatttggttttgggtgtttgaggagttttaggtttttttataagttttgtttttttgtttttttattttaggttttgtttttttattttttgtataggaagtgggttggttttgggtttttagtttttgtggttttagtagttagagtttagtagggttttggagagatggttatggttttagtattggggaggattggagagtgtgtgttgttattgttttatgttttagttaggtgatgtttttttgttttttttttggtttttgtggattagttagagggttgggagtgaaagttatagagaagatttttagttttgatttagtttttttagtagtttttgtttgaatttttattttttaattttgttttagaatttttttagggaggggttgggtttagtttttatggtttttggttggaggaaaaagtggtttttagttttaggttagtttttttttttaatttatttaggggaggttagggattgttgtgggatgaggggtttttttgggttttgtgtgttgggtttttaatttggagaggtggagaagggatgggtggatagtttgggtgtttggagagggtatgggatatggggtgggataggtgggagtttttttttgatttttgtggagtggggtttatatattgggggaggtagttttgtgttgtgtgtttattaggaggtttgtggagtaagtggggatagaagggtttttttggagagttatttatgaagtgaagttgttgtgaggtttttgggagttttaggttggaggtagagttttgggtttgagtttgggtttgttttttttttggttgtatgattggataggttagaagtatttttggatattggggatgggattttatttttggggttgtttggagtttatgttttttttttttttgggggttgaagttttttatttttaattgtgtttgtagtattttgggggagggaggtggagtgaggagttgagttatttttaagggttttttttttttttttatagttagggttttgtatttagttggagaagtttttgaagttaaatagtaagagataagtattgtgtatgggagtaggggggtggtaggtggaggtggttagagaggatgaggggatataggttttattgagtttagaggttaagttggatgaattatgggtttttgagtttttgttttattattttgttttagttattatatatttttgatggtagtaggggttttgaattgtatttgattaggtttaaattttagttttatgttttttttgtttgggtgagaggttgatttgttttttagtttttttatttggtaaaaaggaggtatattagagtttttttatggggttgtagggagggttaaaagttgaattatttttgagtgtt

SEQ ID NO: 2172 - DNA, 2483 bp, Artificial Sequence
  chemically treated genomic DNA (Homo sapiens)
gtggatggaattgggtggtaggttgtggttttaggatatgtggttagattggttgagggtaggagggtgtagtattgattgtaattgtgaaagtgtagaatttttttgtggaaagtggtttggaatatggtttaattgaatattattattttataattgaggaatgtgaagtttgagtttttaagtttttaaatttgtttgaaatgagaatatagatatatatatagatatgtatatatatatatatatagattatagatatatatatagatatgtatatatatatatatagattatagatatatatatagatatgtatatatatatatagattatagatatatatagagatatataagatgtatatagatatgtatatatgtatatatatagatatatagatgtaatatagatagatatgtatagatatatatagatatatatatagatatgtaaagatatatatagatatatatagatatgtaaaaatataaagatatataggtttatatagatatagatatatatagatgtatatagatatagatatgtaaaaatgtataaatatatatagatatagatagatttatgtatatattgatatgtagatatatatattgatatatagttttagggaggttgagttgggtgttgggttagtttatagatttgtttttattatggtttttgatatatgggggtggttatgaggatgggggaggttgtggggatagaagtatagttggtttgatttaggtgggttagagtttattgggttttggttttttgtttttaggtgggtggttttagtttttttatttttttgggtttgggtaggttttgttttattgggtattgttttggtttttttggtatttaggtaatttttaggtaggtttggttgggtattggtgtggggtttggtttatattggggggtgggaagaagggttttgttttgtttttttgtatgtgggttttgttttttgtagaataattttaggtttgtaatggtgttggtatttgttagagtaaagtagaatttttttttttttagattttagtggttgagttgggttgttagggtagggatggtgagggtttaaatgttagggtagagtaggttatggtattttgtttatttataaatgtttttgtagattttggtgatggttgtattgggggtgtagtttttagaattatttgaagtttatgtagattgtttttttaagtatgggggtgggggaggttggttttttgagtagggtttggtttttgtattagtgtagttttattttttttttagtttaggtttaggttgttgggggtgtagagagggtgagttgtaagtggaggtgagaagggagtttgtgggatgtaggtttagagagaagtttttgaggaatttttttgttttttttatgagtggagttttggggtagttttgtgtttttgttatagttattttaggagatgatggttgtgggttgtgtttgtgggtgtgtgtatttgtgtatttgtgtgtgtgtgaagagggagagagatagaggggagtgagatagagatttggagaggggatgggagagagagattggaaggggaaggaggaggagagaggtaggaaagtagagagggatagggagagtgtggagggataggattattagggaaatagggagagggagggagaagagagggagagaggaggtgtgagaaatagtaggagagagagggagggtgtgggagagagagggattttaagaagggggaatttttttatagtttttttttattgttttttagagatatttttggggttgtttttgtagagggggttgttgtgagttgttggagggagtgagggtgatgtgttttttggtgttttaaaatgaggtttttgtttgtattttagtaatttagatttagggaaaatattattaggattttttaatagtaagggaggttttgttagataggtttaagtttttaggaagttgggttttgtttttgagttgggggtttttaggtttttgttagagttatttttttttaagatatttataagttggtttttagtaaattttaaatgttatggttgtttttatggtgttgtttttttatttttttatttttaaattgtaggatttttaattttatttaaaatagtggatgtttttttgttttttggggtattaggatgtgttgtgagtgttgagggtagatgtgggatttggaaggtttagttgggaatttatgttttgtaatgagttgttttgagtttttggatgaggtggaaaattattttagttttagttttttgtaaagatagattagtagttatatttttttatgggttttttgtgatgttattgaggtggtgaaaggagtatttgtttttaatggtatttattattaagttggattttagtaattatttgtgtggtaggagttattatattggagttttgtagtagttaaggagag

SEQ ID NO: 2173 - DNA, 2483 bp, Artificial Sequence
  chemically treated genomic DNA (Homo sapiens)
ttttttttggttattgtgaggttttagtgtgatagtttttgttatgtagatggttgttgagatttgatttaatggtgggtgttattagaggtaggtgttttttttattgttttagtgatattataaagaatttgtggaggggtgtaattgttgatttgtttttataggaaattgagattggagtaattttttattttgtttaaggatttagggtagtttattgtagagtgtgggtttttagttgggttttttggattttatgtttgtttttagtatttataatatattttggtgttttagaaaatagagaaatatttgttgttttgaatagaattaggaattttatagtttagaggtagagaagtgagagagtaatgttatgggaataattgtggtgtttagaatttattggggattggtttgtaggtgttttaagaggaagtggttttggtaggggtttgaagatttttagtttaggggtagggtttagttttttggaggtttgggtttgtttgatagagttttttttgttgttgaggggttttggtggtgttttttttgggtttgggttgttggagtgtaggtggaggttttattttggggtattgggagatgtattatttttattttttttagtagtttgtagtaattttttttgtagaggtggttttagggatgtttttgagagatagtgggagaaagttgtagggaggttttttttttttggaattttttttttttttgtgtttttttttttttttttgttgttttttatatttttttttttttttttttttttttttttttttttgtttttttaatggttttgtttttttgtattttttttgtttttttttgtttttttgtttttttttttttttttttttttttaattttttttttttattttttttttaggtttttgttttatttttttttgtttttttttttttttatatatatataggtgtataaatgtatatatttataaatatagtttatagttattattttttgagataattgtggtagaaatatggagttgttttaaggttttgtttgtgaagggaatagagaggttttttggaggtttttttttgagtttgtgttttatgagttttttttttatttttatttgtagtttgttttttttgtatttttagtagtttggatttgggttgggagggaggtggggttgtattggtgtagaggttgggttttgtttagggggttagttttttttatttttgtgtttgggggagtagtttatgtgagttttgagtggttttgggggttgtatttttagtatagttattattagggtttgtggagatatttgtgggtggatgggatgttgtggtttgttttgttttggtatttgaatttttattatttttgttttgatggtttagtttagttattggagtttgggaggagggaggttttgttttgttttgatagatgttaatattattgtaggtttgaggttgttttgtagaagatagagtttatatgtagggagatggggtaggatttttttttttattttttggtatgagttaggttttatattagtgtttagttaggtttgtttaggggttgtttgggtgttaggggggttaaggtagtgtttggtgggatagagtttgtttagatttgaggggatggaggggttggagttgtttatttgggaatgaaggattagagtttggtgagttttggtttgtttgggttaggttggttgtgtttttgtttttatggttttttttatttttatggttatttttatgtgttagaagttatggtggaagtaagtttgtgagttaatttagtatttggtttagtttttttgagattgtgtgttagtgtgtgtgtttgtgtgttagtgtgtgtatgggtttgtttgtgtttgtgtgtgtttgtgtgtttttgtatgtttgtgtttgtgtgtatttgtatgtgtttgtgtttgtgtgagtttgtgtgtttttgtgtttttatatgtttgtgtgtatttgtgtgtgtttttgtatgtttgtgtgtgtgtttgtatgtgtttgtgtgtgtttgtttatattgtatttgtgtgtttgtgtgtgtgtatgtgtgtatgtttgtgtgtattttgtgtgtttttgtgtgtgtttgtggtttgtgtgtgtgtgtgtatgtttgtgtgtgtgtttgtggtttgtgtgtgtgtgtgtgtatgtttatgtgtgtgtttgtggtttgtgtgtgtgtgtgtgtgtatgtttgtgtgtgtgtttgtgtttttattttagatgggtttgggagtttagaaatttagattttatattttttagttgtaggatgatgatgtttgattggattatgttttaagttattttttatgagaaaattttatgtttttataattgtagttaatattgtatttttttatttttagttaatttggttatatgttttaaaattatagtttgttatttagttttgtttat

SEQ ID NO: 2174 - DNA, 2439 bp, Artificial Sequence
  chemically treated genomic DNA (Homo sapiens)
tagttgggattgtaggtatgtattattatgtttagttaatttttgtatttttagtagagatggggttttattatgttggttaggttggttttaaatttttgattttgtgatttatttgttttagatttttaaagtgttaggattataagtgtgagttattgtgtttagttttgagtaaagttttaaaagtggaatgggttttttgtttttaatgtaggttttttatatggtagttttattaaatggagtagattttatttttatgtatatgaaataatagtattaagttatttttttttttgtttataatattttagttaagttggttttttttttatttttaagatattgtaaatttttttttatattggagttttttatgttgtttttttggttgagatgtttgtttttgttttttttattggttaggttttgtttttgtaagttttagtgtaaatgtttttgttaaagttgtttattttgatttttttttaatttaaattaggtttttttgataattttttattatttttgtttatttgttttttttttagaatttattatattttatttattattttttgagatggagttttgttttttttgtttaggtggagagtaatgatttgtttttattttattaaaatttttgttttttgggtttgggattattttgttgtaggtttttaagtagttgagattataggagtttgttattatgtttggttaatttttttgtatttttagtagagatggggttttattatgttggttaggttggttttgaatttttgattttaggtgatttgattgttttagttttttaaaatgttgagattataggtgtgagttattgtgttaggtttatgttttgtaattatataatgtgttttgttatttttgtaatttgtgttgtttttttttatgaaggtataggtatatttgtttagtttttggttatgtgggtatttggtgttgagtatttatttgtttgtgttgattgatgtttttttttagtttttattttttttttagaagttttttttttttgttttgagaggggttgagttagttgtggtttttttttattttgattttagtggagataagttggggaagtttttgggagttgtgtgggtgagtagagttgagatttggtatggttgtattggttgggttattgtagggtgattggtggtttggtttgataatatgtttatttgagttatttttggtaaaggttattaggttttaggatggaatatgtatgggggaaatgttttttttgtgatatgtttattttgttttaaagtgagatgagggagggagggtgtggttgttaggtaatgaagtttagagtttattagagttgagggattgatgtgttgtgtatgggttgggttttatttttaggaagtttaggataaaattttgtttatgttagagggttttggttaaattttgttttgtgtgtttgggtgaagttttgtttttataagtggttttagtttttttagagtaagaattatttgtattttatttatttatattatttatttatttatttatttgagatggagttttattttgtttattaggttggagtatagtggtgtaattttggtttattgtgaattttattttttgggtttaattgatttttttagtttagttttttaagtagttgagattataggtatgtgttattatatttagttaatttttgtatttttagtagagatagggttttgttgtgttggttaggttggttttgaatatttgattttaggtgatttgtttgttttggtttattaaagtgttgggattataggtgtgagttattgtgtttggtttgttttttaaaatttttatttgatagatgaggaaatggaggtttaggttttgttgtattaagaagagggttttggattttgatttaggtttgggtgaagtttaggttttttgatttagggtggaggtataaatagggtaaataggtaaaaataagtgaaataaataaaaaaaaagtataattattaatgttattgaaaagaattatttaagattttgaggttaggtgtggtggtttatgtttgtaattttagtattttgggaggttgaggtaggtggattatgaggttaggagattgagattattttggttaatatattgaaattttgtttttattaaaaatatataaaaaattagttggtgtggtggtatatgtttgtagttttagttatttgggaggttgaagtaggaggattatttgaatttaggaggtggaggttatagtgagttgagattgtgttattgtattttagtttgggtgagagagtaagagtttattttaaaaaaaagaaaaaaaaagattttgaaatgtaaagttgtaaaattttgtatttttttttatagttttaggtttgttgataggtaga

SEQ ID NO: 2175 - DNA, 2439 bp, Artificial Sequence
  chemically treated genomic DNA (Homo sapiens)
tttgtttgttagtaagtttggggttgtagagaagggtataggattttatagttttatattttaaaattttttttttttttttttttgagatggatttttgtttttttgtttaggttggagtgtagtggtataattttggtttattgtaatttttattttttgggtttaagtgatttttttgttttagttttttaagtagttgggattataggtgtgtgttattatattagttaattttttgtgtgtttttagtagagatagggttttaatgtgttagttaggatggttttgattttttgattttatgatttgtttgttttggttttttaaagtgttgagattataggtgtgagttattgtatttggttttaaagttttaagtaattttttttaatggtattagtgattatgttttttttttgtttgttttgtttgtttttatttgtttattttgtttatatttttattttaagttaagaggtttgagttttatttagatttgggttaggatttagagttttttttttagtgtagtgaggtttgggtttttatttttttatttgttaaatagaaattttaaaaaataggttgggtgtggtggtttatgtttgtaattttagtattttggtaggttaaggtgggtagattatttgaggttaggtgtttgagattagtttggttaatatggtaaaattttgtttttattaaaaatataaaaattagttggatgtggtggtatatgtttgtgattttagttatttgggaggttgagttaggagaattagttgaatttgggaggtggagtttgtagtgagttgagattgtattattgtattttagtttggtagatagagtgagattttattttaaatgaataaataaataaataatataaataaataaaatataaataatttttattttgaaggaattaaaattatttgtgaagataggattttatttaaatatataggatagaatttggttaaagttttttaatatgaatagggttttgttttgagttttttggaaatgagatttagtttatatgtaatatattaattttttaattttagtaaattttagattttattatttggtagttgtgtttttttttttttgttttattttagagtgaggtgggtgtgttatggaagaggtattttttttatgtgtgttttattttggagtttggtaatttttgttaaagatgatttaggtaaatgtgttattaagttgagttgttagttattttgtagtgatttggttagtatagttatgttgggttttagttttgtttatttgtgtagtttttagaaatttttttggtttgtttttattggaattgggatggaagggagttatggttggtttagttttttttggagtagaaagaggaaatttttgaaaagaagatgggggttgggggaggatattaattagtatggataagtaagtatttagtgttaggtgtttatgtggttaggaattaaatagatgtgtttgtgtttttgtaaaggagggtaatataggttataaaaataataagatatgttatgtgattataaagtataggtttggtgtggtggtttgtgtttgtaattttagtattttgggaggttgaggtagttggattatttgaggttaggagtttgagattagtttggttaatatggtgaaattttgtttttattaaaaatataaaaaaattagttaggtgtggtggtaggtttttgtaattttagttatttgggagtttgtggtaggataattttgaatttgggaggtagaggttttggtgaggtgagggtaggttattgttttttatttgggtaaaaagagtaaaattttattttgaaaaataataaataaagtatggtaagttttagaaagaaaataaatgagtaggaatgataaaaggttattaagaggatttgatttaaattggggaggggttaagatggataattttaataggagtatttatattgagatttgtaggagtgggatttggttggtgaagagggtaaggataagtattttagttgaaggaatagtatagaggattttaatgtgggaaagagtttgtagtgttttagaaatggaaaaggggttaatttagttaaaatattgtgagtaagggggagagtggtttgatgttattattttatatatataaagataaaatttattttgtttaataaagttgttatgtggggagtttatgttgggaatgggaaatttattttatttttaaaattttgtttgaggttgggtatagtggtttatgtttgtaattttagtgttttgggagtttgaggtgggtggattataaggttaggagtttgagattagtttggttaatatggtgaaattttgtttttattagaaatataaaaattagttgggtatgatggtgtgtgtttgtaattttagtta

SEQ ID NO: 2176 - DNA, 2450 bp, Artificial Sequence
  chemically treated genomic DNA (Homo sapiens)
gattttggtttattgtaatttttattttttaggtttaagtgatttttttgttttagttttattgggtagttgggattgtaggtatgtattattatgtttagttaatttttgtatttttagtagagatggggttttattatgttggttaggttggttttaaatttttgattttgtgatttatttgttttagatttttaaagtgttaggattataagtgtgagttattgtgtttagttttgagtaaagttttaaaagtggaatgggttttttgtttttaatgtaggttttttatatggtagttttattaaatggagtagattttatttttatgtatatgaaataatagtattaagttatttttttttttgtttataatattttagttaagttggttttttttttatttttaagatattgtaaatttttttttatattggagttttttatgttgtttttttggttgagatgtttgtttttgttttttttattggttaggttttgtttttgtaagttttagtgtaaatgtttttgttaaagttgtttattttgatttttttttaatttaaattaggtttttttgataattttttattatttttgtttatttgttttttttttagaatttattatattttatttattattttttgagatggagttttgttttttttgtttaggtggagagtaatgatttgtttttattttattaaaatttttgttttttgggtttgggattattttgttgtaggtttttaagtagttgagattataggagtttgttattatgtttggttaatttttttgtatttttagtagagatggggttttattatgttggttaggttggttttgaatttttgattttaggtgatttgattgttttagttttttaaaatgttgagattataggtgtgagttattgtgttaggtttatgttttgtaattatataatgtgttttgttatttttgtaatttgtgttgtttttttttatgaaggtataggtatatttgtttagtttttggttatgtgggtatttggtgttgagtatttatttgtttgtgttgattgatgtttttttttagtttttattttttttttagaagttttttttttttgttttgagaggggttgagttagttgtggtttttttttattttgattttagtggagataagttggggaagtttttgggagttgtgtgggtgagtagagttgagatttggtatggttgtattggttgggttattgtagggtgattggtggtttggtttgataatatgtttatttgagttatttttggtaaaggttattaggttttaggatggaatatgtatgggggaaatgttttttttgtgatatgtttattttgttttaaagtgagatgagggagggagggtgtggttgttaggtaatgaagtttagagtttattagagttgagggattgatgtgttgtgtatgggttgggttttatttttaggaagtttaggataaaattttgtttatgttagagggttttggttaaattttgttttgtgtgtttgggtgaagttttgtttttataagtggttttagtttttttagagtaagaattatttgtattttatttatttatattatttatttatttatttatttgagatggagttttattttgtttattaggttggagtatagtggtgtaattttggtttattgtgaattttattttttgggtttaattgatttttttagtttagttttttaagtagttgagattataggtatgtgttattatatttagttaatttttgtatttttagtagagatagggttttgttgtgttggttaggttggttttgaatatttgattttaggtgatttgtttgttttggtttattaaagtgttgggattataggtgtgagttattgtgtttggtttgttttttaaaatttttatttgatagatgaggaaatggaggtttaggttttgttgtattaagaagagggttttggattttgatttaggtttgggtgaagtttaggttttttgatttagggtggaggtataaatagggtaaataggtaaaaataagtgaaataaataaaaaaaaagtataattattaatgttattgaaaagaattatttaagattttgaggttaggtgtggtggtttatgtttgtaattttagtattttgggaggttgaggtaggtggattatgaggttaggagattgagattattttggttaatatattgaaattttgtttttattaaaaatatataaaaaattagttggtgtggtggtatatgtttgtagttttagttatttgggaggttgaagtaggaggattatttgaatttaggaggtggaggttatagtgagttgagattgtgttattgtattttagtttgggtgagagagtaagagtttattttaaaaaaaagaaaaaaaaagattttgaaatgt

SEQ ID NO: 2177 - DNA, 2450 bp, Artificial Sequence
  chemically treated genomic DNA (Homo sapiens)
atattttaaaattttttttttttttttttttgagatggatttttgtttttttgtttaggttggagtgtagtggtataattttggtttattgtaatttttattttttgggtttaagtgatttttttgttttagttttttaagtagttgggattataggtgtgtgttattatattagttaattttttgtgtgtttttagtagagatagggttttaatgtgttagttaggatggttttgattttttgattttatgatttgtttgttttggttttttaaagtgttgagattataggtgtgagttattgtatttggttttaaagttttaagtaattttttttaatggtattagtgattatgttttttttttgtttgttttgtttgtttttatttgtttattttgtttatatttttattttaagttaagaggtttgagttttatttagatttgggttaggatttagagttttttttttagtgtagtgaggtttgggtttttatttttttatttgttaaatagaaattttaaaaaataggttgggtgtggtggtttatgtttgtaattttagtattttggtaggttaaggtgggtagattatttgaggttaggtgtttgagattagtttggttaatatggtaaaattttgtttttattaaaaatataaaaattagttggatgtggtggtatatgtttgtgattttagttatttgggaggttgagttaggagaattagttgaatttgggaggtggagtttgtagtgagttgagattgtattattgtattttagtttggtagatagagtgagattttattttaaatgaataaataaataaataatataaataaataaaatataaataatttttattttgaaggaattaaaattatttgtgaagataggattttatttaaatatataggatagaatttggttaaagttttttaatatgaatagggttttgttttgagttttttggaaatgagatttagtttatatgtaatatattaattttttaattttagtaaattttagattttattatttggtagttgtgtttttttttttttgttttattttagagtgaggtgggtgtgttatggaagaggtattttttttatgtgtgttttattttggagtttggtaatttttgttaaagatgatttaggtaaatgtgttattaagttgagttgttagttattttgtagtgatttggttagtatagttatgttgggttttagttttgtttatttgtgtagtttttagaaatttttttggtttgtttttattggaattgggatggaagggagttatggttggtttagttttttttggagtagaaagaggaaatttttgaaaagaagatgggggttgggggaggatattaattagtatggataagtaagtatttagtgttaggtgtttatgtggttaggaattaaatagatgtgtttgtgtttttgtaaaggagggtaatataggttataaaaataataagatatgttatgtgattataaagtataggtttggtgtggtggtttgtgtttgtaattttagtattttgggaggttgaggtagttggattatttgaggttaggagtttgagattagtttggttaatatggtgaaattttgtttttattaaaaatataaaaaaattagttaggtgtggtggtaggtttttgtaattttagttatttgggagtttgtggtaggataattttgaatttgggaggtagaggttttggtgaggtgagggtaggttattgttttttatttgggtaaaaagagtaaaattttattttgaaaaataataaataaagtatggtaagttttagaaagaaaataaatgagtaggaatgataaaaggttattaagaggatttgatttaaattggggaggggttaagatggataattttaataggagtatttatattgagatttgtaggagtgggatttggttggtgaagagggtaaggataagtattttagttgaaggaatagtatagaggattttaatgtgggaaagagtttgtagtgttttagaaatggaaaaggggttaatttagttaaaatattgtgagtaagggggagagtggtttgatgttattattttatatatataaagataaaatttattttgtttaataaagttgttatgtggggagtttatgttgggaatgggaaatttattttatttttaaaattttgtttgaggttgggtatagtggtttatgtttgtaattttagtgttttgggagtttgaggtgggtggattataaggttaggagtttgagattagtttggttaatatggtgaaattttgtttttattagaaatataaaaattagttgggtatgatggtgtgtgtttgtaattttagttatttggtggggttgaagtaggagaattgtttgaatttgggaggtggaggttgtagtgaattaagatt

SEQ ID NO: 2178 - DNA, 2481 bp, Artificial Sequence
  chemically treated genomic DNA (Homo sapiens)
ggtataaagatattaggttgaataggttttttatttggggggtttgtggtttttgaaatgtattttagatattttgtataggtgtgtgtttttattttggttgttgtgtgagttgaggataaaattttggttgttgtgggagttgagtttgtgggtaggttgagttaggggtgggagtgagagggaggggtgagaggggtttgagtatttatttagtgtatgttttatagaattagtttgttttaggaagttttggtgtttagtgttataatgtatattttagttttgtgtttgtatattagattttgggtttgttttatatgggtgttttgagttgattttttttgttggagttgttgaagggttttgtaggttttaatttatagttagtttttaattttgttattagtaggggttttagtttatagtaatgtagttgtttttattgtaggttaattttgttatagtgttgttaatttgaaatatttagtttagagtgagtttttggggaggtgggaggttgtttaagtattttatttgttgtgtgggtaagaagtggtttgtattttattagagtttggggatttaggatttagatttgttgttttgtagttgtgtgattttgggaaggttaggttttattttgggtgtgttttttttttttgaagatttaatttggtttgtgtgttaggagtggagggtttgttggagtttgaggaagatggtagttgggttggtagtagggtgagtagggtttgagtggggttaggttttttatattggataatgatgtttattgtaaagtttatgttttggatttttgataaatattttagtaattgatttgatattttattatgtttaagttgatttgtttttatgttggatatgtgtttattaggatgtgtttttggttgttattggtagggtttggaatgaggatatttgttgtgtattttgttttggagttttagataggtaaaaaaatatttatgtggttttatttaggttatttttttgtttgtatgaattttaggttatttttagaaagggttttatagttttggtgttttattttttgatttttgttaagttgtttttagtagtagttggaattttttgaagtggttgttatagatgttggtaaagtttggtttgggatgtttttattttgtattaggtatggggttgtttttgttgtatatttatttggaaattatttatatgttaagtattgtagaggtaaggggagtttgttattggattgtgtttaatatggttgtagggatatagataagtatattttttggtagaggtatgggtttggttggttggagttgtagtagttgtgtgtggttatagagtttttaaatgagggagatggatggttttgttttatagtgtgtttagagtatgtttatggtgtttgggaagattagggatttattatgtttggttttggttttttttatagtgaagtttttttgttggtaggatttatggttaagtatgggggtaggggttgggggagttttgttagtgattttttgtaggtagtaaggtttttgggagttggttaggaaaatagaaattttattttggagtaggtgtgtaaattaatagtttagaaattaataaggtttttattaaggattatgagttatttgtgttgttttgtttgttttggtatttgtgtaggatatggggtggggggtgggggaagtatatgttaatagggagttggtggttgttttgagagttagttttttttttataatttgtttgaaatttttttttttgtagaagatggaatttagtatattttgagagtttattgtataggttaggtgtatttatgtttattgtttttattagtaaaagagtaaaattaaaattaaataaatgaagattttggtaagattgtttgattttgttttgaggtgagtatatagtagtattgggaaagtgtgtaatttataaagatggtgtagtttgtaggttaggaggggttggggtttgttgagggtagttggggttttgtagtttgatttataatattgtatttagagtggggaggtgttgtttttaggtttatttgtgatttttgaggtataggtagagggttgggtgtgtatgatattgtataggagttttttttgtagtgtggaatttatttatgttgtttgtttttttagtttttaaatgtatttggggtttgagattagaaatagtagaagttttggtggttagtggaatagttatttaagtggatttttattttttgggtattttttgagtatttttttgttaggtattgttttaggggttggtgatgggaagtttattttgtttatgaggtttttttggtatagaggtggatattgagggattgttggtttatatgtatgttgaaatatgtgtttagttgatgtttttttaagtgagtttttttgtaggataggattatatagtgtttttaaa

SEQ ID NO: 2179 - DNA, 2481 bp, Artificial Sequence
  chemically treated genomic DNA (Homo sapiens)
tttgaggatattgtgtggttttgttttgtaggagggtttatttgggaagatattagttgagtatatattttaatatgtgtgtgagttagtggttttttagtgtttatttttgtgttgaaagagttttatgggtaaggtgggttttttgttattagtttttgaaatagtgtttagtagggaggtgtttaaagaatgtttaggagatgagggtttatttaggtaattattttattaattattagagtttttgttgtttttgattttagattttagatgtatttggggattgagggagtaggtgatgtgggtgggttttatattgtggagaggatttttatgtagtgttatatatgtttgattttttgtttgtattttaggagttataggtgggtttggagatagtatttttttgttttgagtgtagtgttgtggattaggttgtaaagttttagttgtttttgatagattttagttttttttgatttgtaggttgtattatttttatgagttatgtatttttttgatgttgttgtgtgtttattttaaggtaggattaagtaattttgttagagtttttgtttgtttgattttggttttgtttttttgttgatagaaatagtaaatataaatgtatttgatttgtgtagtgggtttttgagatgtgttgggttttattttttgtaaagagaaggattttaagtaagttatgagaaaggagttggtttttagagtggttattagttttttgttgatatgtgttttttttgttttttattttgtgttttgtgtaagtattagaataaataggatagtataggtggtttatggtttttggtgggaattttgttaatttttgagttgttggtttgtgtatttgttttaggatggagtttttgtttttttggttagtttttagaggttttgttgtttgtgagaagttattgatagagtttttttagtttttgtttttatgtttggttatggattttattagtaaggaggttttattgtgagggaaattagagttgggtatggtgagtttttggtttttttaggtattgtggatatgttttgggtatattgtgaagtgaggttatttattttttttatttggaagttttgtgattatatatagttgttgtagttttagttagttgggtttgtgtttttgttagggaatgtgtttgtttgtatttttgtagttgtgttgaatgtagtttaatggtagattttttttgtttttgtggtgtttggtatgtggatgatttttaggtgaatatgtagtagaggtagttttgtgtttggtgtagggtggaggtattttaggttgggttttgttaatatttgtggtagttattttaaagagttttagttgttgttgaagatgatttggtaaaggttagagagtgagatattggggttatgagattttttttaagggtggtttgaggtttatataagtaaagagatgatttgggtgaagttatatggatatttttttgtttgtttggggttttaaagtaaggtgtataataagtgtttttattttaggttttgttagtggtagttaagagtatgttttggtagatatatgtttagtatggaaataaattaatttggatatagtggagtgttaggttgattgttaagatgtttgttaaaaatttaggatatgggttttatagtggatattattgtttagtgtgggaagtttggttttatttagattttgtttattttgttattgatttagttgttattttttttagattttagtaggttttttatttttagtatataggttggattgaatttttaggaaagaagagtatatttagggtgggatttgatttttttaaggttatataattgtggagtagtagatttgggttttggatttttaaattttgatgagatgtaggttgttttttgtttatatagtaggtaagatgtttggatagttttttgtttttttaaaaatttattttgggttggatgttttaggttggtaatgttgtggtagagttagtttgtagtgaaaatagttgtgttgttgtaagttggggtttttgttgatgatagggttgggggttgattgtagattgaggtttgtagaattttttagtaattttagtagagggaattagtttaaggtatttatgtggagtgggtttggggtttggtgtgtaggtatagggttggagtgtgtattgtggtattgggtattggaattttttggagtaggttagttttgtgaagtatgtgttgagtaggtgtttaggttttttttattttttttttttatttttatttttggtttagtttgtttataggtttagtttttatagtagttaggattttgtttttagtttatatagtagttaggatagagatgtatatttgtgtaaagtgtttaagatgtattttggggattataggttttttagatgaaggatttgtttagtttgatgtttttgtgtt

SEQ ID NO: 2180 - DNA, 2223 bp, Artificial Sequence
  chemically treated genomic DNA (Homo sapiens)
gtttttatattggttgtgattttttttatgttttttttatttatttatttatttatttatttgtttatttattttatatttgtatattttttatgtttttagtattttattatatattagaatataaaaggtaattttgtttttatggggtttggagagtaatggggaaatagatgaataattttgtatgtgttttgaagttatagggaatttatatttaatttatatttgtttttttatagtaaagttttttgtagaaaggatttgaattaatttgttagaaaaggtataaggaataatatgatatattttaattaaagaagataattaaaattaaaggagaaagtgtttattgagtatttattatgttttaagtatttttgatatatttttttattttatggtttttatatttttgagttagtgttattttttttttagagataagtaaagtgaggttgattagttttagttgagagttaaatagttgagttaggttttaaagtttatatgatattatagaatagttgttgatgagttttggatttgatgatgagttttttagtagtttgggggagaaggaaagtggaatatattatttgattgtttattagataagaaaaagttagatatttttttgaagggaagtaaagttttttttagtagtgaatttatttgtttttttttaagtgggagttggaagagagtttgtggggtggaatatagggggttttgttaggattgtttaagttgggtgtttttatggtatatatgtgaggaggttgttatgtgaatgtttatggttttttggaaaatgtttgtttttagtgaatattgtttttggtgtttgtgtatgtgtatgtgtgtatgtgtatatgtgtttgtgtgtttttttttgttttattgttttttttttttttatttggttttttttttattttatttgtttgtttgtttgtttgtttgtttgtttttatttttgtttttttttggtaaaagtttttgttgtttaaaattttgttagtttttaggaagtgttgttttgttaaaagtttgtatatgagatttttgtgggttaggattgattttttttttatatagggttgggtggggtaagtaggaaggagtttgttatagttaaggtgatgtatttttgttgggttagtttgaatagtagttgggttggtaagtgataggagtatgggttattttttttttagaggtgttggaatggatttgtgttatttaggtaagtaattgttgttaatttttttgggttttagggtgtttttttttagaatgggatagtagtttttgttttatagggttttagataaaggaatatagtgtaggtgggaaatgtagttgtaagaagtaaatatttgtgggtttagtttgtgtgtttagttgtgttttaggggttggatatatagtagtagtaaagtagatgttgtttttttttttataggtttgtgttttagatgaggagattggtagtgattttaatgtgattttatatgttagttgatggtaggtaggatgaagaatagtaaagtagggtaaggaagataggaatgtatggtggaaaaggttttaagaggagatgttgtttgatgagggatttgaggaagatgttagttaaggggttttttaaggaataaatattttagttagaaggaatagttagtttaaaggtttagaggtggatttagaaaagtgatttgtgattaagatgatgatgggatgttggtgatggtgatgtttgtttgggtgatataagggttttgaggtttttttttggtttttgggggttggggtggtttttggggaggttgaggatgttgtttagagttaggggagggttaggagtgagtaatagaggttttggttgaaattttttttagttattaagataatgtgtttggggagaaagaggagaaaggaggttgtaaagatggtgaggaaaagaatattagggttgtgttttgggaggtaaattgaaggtttggtagaggggttaagtttttgtattttggatgttagtatgttttagagttgtaatagttttggtgaatatggttgttggaattttagaatttaagggtttgtgggagttgtttgttttttaggtttagatgattttagttttgtttaggagtatttttgttttaaatgtatttaatgtggagtagtttggttttgtttattgggtatttttttttt

SEQ ID NO: 2181 - DNA, 2223 bp, Artificial Sequence
  chemically treated genomic DNA (Homo sapiens)
ggaagggggatgtttagtgggtggggttaggttgttttatattaggtgtgtttgaagtaagggtgtttttggataaggttgaggttatttggatttggggagtagatagtttttatgagtttttaggttttggaattttagtagttgtgtttattagaattgttgtagttttggagtatgttgatatttagggtgtagaaatttggtttttttattgggtttttaatttgttttttaaaatatgattttgatgtttttttttttattatttttgtagtttttttttttttttttttttttagatatattgttttagtagttggggagggttttaattagagtttttgttgtttatttttggtttttttttggttttaggtagtgtttttagtttttttaaagattattttaatttttgggggttaaaaaggggttttaaggtttttgtattatttagataagtattgttattattaatattttattattattttaattgtaagttatttttttgagtttatttttgagtttttggattggttgttttttttggttggaatgtttgttttttagaaagttttttagttgatattttttttaggttttttattagatagtatttttttttggggttttttttattatgtatttttgttttttttattttgttttattgttttttattttatttgttattaattgatatatggaattatattagagttattgttggtttttttatttagagtataagtttatgaagggggaaatagtgtttgttttgttattgttgtgtgtttagtttttagaatgtaattggatatataggttgagtttataaatgtttgttttttgtagttgtattttttatttgtgttgtatttttttatttaggattttgtgaggtaggggttgttgttttattttaaaagagagtattttgaggtttagagaggttgatggtagttgtttatttgggtggtataggtttattttgatgtttttggggaaaagatgatttgtgtttttgttgtttgttgatttagttgttgtttgggttggtttggtaaggatgtgttattttgattgtaataggtttttttttgtttgttttgtttagttttgtgtggggaggaagttagttttggtttatgggggttttgtgtgtaggtttttgataaaatagtattttttaaaaattggtagagttttgagtagtagggatttttgttagggagggatagaggtggaaataaataaataaataaataaataaatagatgaagtgaggggagggttagataaaaaagagaaagatagtgagatagaaagaaatatatagatatatatgtatatatatatgtatatatgtatagatattgagggtgatgtttattgaggatgaatattttttaggggattatgggtatttatgtggtagtttttttatatatatgttataggagtgtttaatttggatagttttagtagggttttttgtgttttattttataagtttttttttaatttttatttgagaagagataaatgaatttattgttaggaagggttttgtttttttttaaagaaatatttggtttttttttgtttagtgaataattgggtaatatgttttatttttttttttttttaggttgttgggaaatttattgttaaatttaaagtttattgatagttattttatgatgttatgtgaattttggggtttgatttagttgtttgatttttagttagggttagttagttttgttttgtttatttttgaaaggggaataatattaatttggggatatggaaattatggagtgagaggatgtgttggagatgtttgggatatagtaggtgtttaataaatatttttttttttgattttaattattttttttggttaaaatgtattatgttattttttgtgttttttttggtaggttggtttaaattttttttgtaaaaagttttgttgtaaagaaataggtataaattaaatgtgaattttttataattttaggatatatgtagagttatttatttgtttttttattattttttaggttttatgagggtaaggttattttttgtgttttggtgtgtggtaaaatgttggggatatagagggtgtgtaagtgtggaatgaatgaataaatgaatgaatgaatgaatgaatgaagggaatatggaagagattatggttgatgtgaaagt

SEQ ID NO: 2182 - DNA, 2495 bp, Artificial Sequence
  chemically treated genomic DNA (Homo sapiens)
tttttgatggatattggagttattatttttaatataatggaggattgtttttgagtgttggagatttagaggtatagggagatgttttgttttttgggggatgttttttttttttattattattattttagtttttatggggattttttttttaaggttttttatggtattttattgttaagtttaagtttttttataggatttggttttatttttttttgttttttttgtatttttttttttgtattttttttttggattttgggttttttaggatttagttttggtttttttttttttggttattttttataagattttgattatttttgtggttttttgggttatttgtgttattgttagttatttttaagtttttgattaaagtttaggtttttttttttgtggtttttgttttttagttagtttttttgtgtattttatagaattttatgtttaagtgtttttaattgaattttttattttttttttagttggttttttgtttttgatttttttatgttatttagtgagttttattgggtgttttggaggagtttaggttggtggtttttttttttttatttgtttttagtggtttgggtttagttgtttattttttatttttttttgtttattttttttttttttttagttattttttgggtttttattattagtgttattgttggaaataggggttttttatgtttgttttgttgtatggattgaagtttgttggttgttttgggggttttttttattgggatattattttattttttttttattagggtatatttggtatatatttttattggggatttattatatttttttttttttttttttattagggtatatgtggtttttttttattgtagggtttttgtttgggttgatttagagatgtaaggatatagtgtttagggatttttttttgggggtttgtttattttttttttgtaaaatgggaagttgtgtgttggtgattgttttgtttataggtttttttttttttgggattggttagattttttttagatggttttatttttgttatggttgattggtttaggttggatatgtgatttaagtgaaatttaatgggatttttttttgtgattttgaatttggggaggagatttggagtttggaggtggtagtgatttgggagttgtgtgggtttgtttgttttatatattgtttttttgtttttttttttaatttatggtttttttagaggataatttttttttttaaattttttggatgaggtttttgtggtagttgagagagttatgtagtgggggtgttttttttgtttgtgggggagttttaggtggtttgtatagttttgtggtggttgggtttggttatgtgtgttttttggtttttatgtggttttagtagggtgtttgttttttttttagggtttttttttttaggagggatagtaggaaggtaggtaaggataggatttgagtttatattttgtttgtggttatttgtttgattaggaggaaggggaggggataggagtgattttatggaggttatttgggagttggggttgggtgattttagggttggatgattttagggttgggtgattttagggttgggtgattttagggttgggtgattttaaggttgggtgattttagggttggatgattttagggttgggtgattttagggttgattattggtggagtatttggggtgggtgttatgggtatttgagagggaattttgatttgagtggaggttagaatttttttttgaggaagtgttttattttattgagtttttagaggttggtggtaggttgaataggggattatgttagtagagggattgttttttagagattttggattattattatgatgggttgattttataaatttagttattgttattggaggtttggttgaattttagagttttttttttagtgttggttttttggtttgtaatggggagggttggatttttttgtattgatatttttatggtatggttgtgggaggggtgtttattttgttggtttggtggttgtggagtggttggaggtggtgtgtgttaaagttgttgttggtgttttttttggttgttttggggtgatgataggagttgatggtttggtagtagtttttagggaggtagtagttgggttggtggtgggtggtggtggtggtgggagggggtttttggagagaataaagtattgaggatgttgggttttaggggtgatagaggagtgggggatgggggtagggttttggagtgtgtggtttatagggaggttatggtatgggtgtgtgtgtgggtgtaggatttggaatttattttgtggttgtgtgagtttaggtaggttatttagtttttttgggttttagtttttatagttgtgtaattggaataatattattattatattattgtatttttagtgttgagagtagtgagtggtatagagtaggtattta

SEQ ID NO: 2183 - DNA, 2495 bp, Artificial Sequence
  chemically treated genomic DNA (Homo sapiens)
tgaatgtttattttgtgttatttattatttttagtattggggatataataatgtaatgatggtattgttttaattgtataattgtggaaattgaggtttagagaggttaagtgatttgtttgggtttatataattatgaggtgggttttaaattttatatttgtatatatatttgtgttatggtttttttgtgggttatatattttagaattttgtttttattttttatttttttgttgtttttggagtttagtatttttagtgttttgttttttttagaagtttttttttattattgttattatttgttgttagtttggttgttgtttttttgggagttgttgttaagttgttagtttttgttattattttaaggtagttagagggagtattagtagtagttttggtatatgttatttttggttgttttatagttattaggttagtaggatgggtgttttttttgtagttatgttatgggagtattagtgtagggggatttagttttttttattataaattaagaaattgatgttggagaagaaattttgaagtttagttaggtttttggtgatagtggttaaatttgtaaaattaatttattgtggtgatgatttaaagtttttggaaggtagtttttttgttggtatagttttttgtttaatttgttattagtttttgggagtttagtggggtggggtatttttttagaggagggttttgatttttgtttaggttaaagtttttttttaggtgtttatggtatttattttaggtgttttgttaatagttagttttggggttatttagttttgaggttatttagttttgaggttatttagttttgaagttatttagttttgagattatttagttttgaggttatttagttttgaggttatttagttttggggttgtttagttttagtttttaggtgatttttgtggaattatttttgttttttttttttttttttggttaggtaggtgattgtggatgaggtgtggatttaggttttgtttttgtttgtttttttgttattttttttgggggaggaagttttgggagggaggtgggtgttttgttggggttatatggggattgaggagtatatgtggttaggtttgattattatgagattgtgtgggttgtttggggtttttttataggtggggaaggtatttttgttgtgtgatttttttggttgttataggaattttgtttgaggagtttaaggaaaaaggttgttttttgagggggttataggttgaaggaaggggtaagaaggtagtgtgtggaatagataggtttatgtggtttttaagttgttgttatttttaggttttaggttttttttttgggtttagaattataggagagaattttattgggttttatttgggttatgtgtttagtttggattaattagttatggtaggggtggggttatttggagggagtttggttagttttagagaagaaagagtttgtgggtgaggtagttattgatatgtagttttttattttataggagggaggtggataggtttttaaggaaagatttttgggtattgtgtttttgtgtttttggattaatttagataaaggttttgtagtgggagggagttatgtgtgttttggtgaagaggaggaagaagaggtgtggtaggtttttagtggaggtgtgtattaggtgtgttttggtggagaggaagtagggtaatgttttaatggagaggatttttgaggtggttgatggattttggtttatgtagtaagatagatatgagagatttttgtttttaataatgatattggtaataggagtttaggagatgattgggaggagggagggagtggatagggagagatagagggtgagtagttgaatttaggttattgaggataggtagagggagaggagttattggtttgggtttttttaggatatttagtggggtttgttgggtgatatggggggattgagggtaggaagttagttagggggaggatgaagagtttagttggaaatatttgagtatgaggttttgtggggtatataagagagttggttagagggtaggggttataaggagagaggtttgagttttgattggggatttaggggtgattggtagtgatataggtggtttaggaggttatgggagtagttaggattttataggaaatggttagaagagagggggttaggattgggttttgaggaatttaaaatttaggagaagggtgtagaggaaggagtgtggggagagtagggaggggtgagattagattttgtaggagaatttggatttagtaatgggatgttataggggattttgaggagagggtttttatgggggttaggatgatggtgataagaaggggagatattttttgaaaaatgaggtatttttttatgtttttgagtttttagtatttgggagtgattttttattatgttgagaataatgattttagtgtttattggggg

SEQ ID NO: 2184 - DNA, 2390 bp, Artificial Sequence
  chemically treated genomic DNA (Homo sapiens)
atagattagatttattgatagttaagtagaggtaggaagtgtttttaggagaggaaagtgaggtatttgtttttatgtaggagattgtataggtttatgtagatgttttatgttggttaatagggagttttgtatatataattttgaatattttttgtttaaagtgggtgggattatttttttttaagttatgagaaatagattttatagttattttagtttaatttgatttttattatttatttatttttttaatttatttatttatttaataaatatttttgtaggtttgttggggattatgttttgggttgggttttggttgtagtaatttttaggtttgtttgtaatttttttgttagtttgttattttattgttgggtttttttttatttaagttttttttttttagatagtttgaagggtttgtgtttattttaggttattaagtttttttattgaaatataggagatttttttagtttattaggtgattttgagtaagttttttttttaaattatatttagtgaatattggagagaagaaagttgatagaagttgggttgggttaggtttggttgtggggatatttgagggtagttaggtgtttgtagaagaggaggggttggtgttgaggtttgagatgggaaaagattgtagtggttggagtttgagtgtttggttttgggttgggaagaatagagtttgggattggtagtaggagtggagagggtggtattaagatttgaaaatggggtaagggtgggggttggggtaagttttgagttggtagggagttaggaaggttataggattagggtaagaatttagttgtttttgaggttttggagagggtgtagatttttgaattatttgttttattttaaggtaggtgtgttaatgtttttttttggagtaaagggttgattaggtttatggtagaaaggtgaaggtagatagatagttttttttttgttgttagttgggatttgggttaggtagatgggtatatttttttttttttattttatggttgttttagttttagtagttagtttgaaggatttttagggggtagttattttgttttggttttttttaggttgggaagtgggagtttgtgtttttaaatttttagtaggttgaaatggttgatgatattattggtttttgggagtggtagagttggagttggagttaagggagtttaggttgttgggggttgtagatatggagggttagagtagtaggggtagtaggaggttagggatttgggttggtttgggttttttgtttatgttttagggtgttgtttaaattggggtattttttaaggtaagatttttgagatttagtgttttttgtttttttgatttttggttttatatattttttttatatatattgtaggttttttggtgtttttgattgaggggttggtatttttttttgtttagtgagtaggggttaggtgaagagagtattttgggggttgaggggtagtgataggatgtttggagatagatgaagttagttatttttaggagtttttgggagagttttggattgggtattagaggatttagttgtgttttatttttgttgtgtgattttggttaagttgttttttttttttgagttaatgtaaaatgagggggtttgttgttgaagattaaaattgtgatatttgggatggttaagttgttagtattggaggtggtgtgatagttggggggaagttggtatatagtgtgatatttggagttaaggagggtgtttaaaatgttattttaaagaattgagtttgagaagggaggtggagatggagttttaggtattttgaattgagaaggatatgggatagaaatagaagtgtgtttttagaggtagggtttttttgtgttttgttattttatttagggttattttggggtaagtatagatatttttttgttttttttggtgaaggatattttattttgttttttggagataggggatattagagagaatagatggggaaggaggataggtttttataggattttgtgattttttattttttttatttgttggatataaatgggatatttgtttgtttgtttttttaggtaggggagaaagtggaggatgtaagagggtataatttgggtatagagagatgtgatattaggattaatttagaattttggatttgttttgaatgttagatttatatttggtgaggatggattatttaatggggttagatggaattttagtaaatgttgggtttataaatgtagataatgggagatgaagattttttagaatataatgtggttaggaattttagattttatttttttattttatagatagagaaattgaggtgttgggtagagaggta

SEQ ID NO: 2185 - DNA, 2390 bp, Artificial Sequence
  chemically treated genomic DNA (Homo sapiens)
tatttttttgtttagtgttttagtttttttgtttgtaaaatgaagggatggggtttagggtttttggttatattatattttggggaatttttattttttattgtttgtatttatgagtttaatatttgttagaattttatttagttttgttgaatagtttatttttattaagtgtgaatttagtatttagagtaagtttaggattttaagttgattttggtgttatatttttttgtgtttaggttgtgtttttttatattttttatttttttttttatttgaaaggataggtaagtaggtattttatttatgtttggtaggtgggaggggtggggagttatggagttttgtagagatttattttttttttttatttattttttttgatgttttttgtttttagaagataggataaagtgttttttattaaggagggtagaagaatgtttatatttgttttaggatggttttaggtagggtaatagggtgtagggaggttttgtttttggagatgtatttttgtttttgttttgtattttttttagtttagagtatttaaaattttatttttatttttttttttaaatttagttttttgaggtggtattttaggtattttttttggttttaagtgttatattgtgtgttggtttttttttaattattatattgtttttagtattaataatttagttattttagatgttatagttttagtttttagtgataagtttttttattttgtattggtttagagaggaaaagtaatttggttaaggttatatagtaaaggtggagtatagttgggttttttgatatttagtttaggatttttttaagggtttttggagatggttaattttatttgtttttgggtattttgttattgttttttagtttttagggtgttttttttatttagtttttgtttgttgagtagaggaaagtattagttttttagttaggagtattagggagtttgtagtgtatgtggggggggtgtgtggaattagggattaggaaagtggggggtattgggttttaggggttttattttggagggtgttttagtttgggtaatattttggggtatgggtagggaatttaggttagtttgggtttttggttttttgttgtttttgttgttttggttttttatgtttgtagtttttggtagtttggatttttttggttttggttttagttttattgtttttgggaattagtgatgttattagttattttaatttgttgagaatttaaaggtataggtttttattttttagtttggaagaggttgaagtaaggtggttattttttgggaattttttaaattggttgttgaggttggaatagttatggagtggggaggggagagtgtatttatttgtttggtttaggttttaattggtagtaggaaggaggttgtttgtttatttttatttttttgttgtaggtttggttagttttttgttttagggaggggtattaatatatttgttttaaggtaggataggtggtttagaggtttgtattttttttagggttttagagataattgagtttttgttttgattttgtgatttttttggttttttgttagtttagagtttgttttggtttttatttttgttttatttttaggttttggtgttattttttttatttttattgttagttttaggttttattttttttaatttagaattagatatttaggttttagttattgtagtttttttttattttaggttttagtattagtttttttttttttgtagatatttagttgtttttagatgtttttatagttaggtttaatttagtttggtttttgttagtttttttttttttagtatttattgggtgtggtttgggaggggaatttgtttaaggttatttggtgaattgagaaggttttttgtgttttagtgagaaaatttagtgatttaggatgagtataagttttttgagttatttgggggaagggaatttgggtggagaagggtttagtagtggggtaatagattgataagagagttataaataggtttgagaattgttatagttaggatttagtttaggatatggtttttaataggtttatgggagtgtttgttgaatgaataaatgaattagaagagtgaatgggtgatgagggttagattgggttgggatggttgtgggatttgttttttatggtttagagaggagtgattttatttattttaggtagaaagtgtttagagttgtgtgtgtagagttttttgttaattaatatggagtatttgtatgggtttgtgtagttttttatatgaaggtagatgttttattttttttttttgaaggtattttttatttttgtttgattgttagtaggtttagtttgt

SEQ ID NO: 2186 - DNA, 2497 bp, Artificial Sequence
  chemically treated genomic DNA (Homo sapiens)
aatttttatggttaagtgttgagataagagttttggggtttaaggttttttaggtagggtgtggtgagggtttgttggaggaagggtttttttttgtttattttggttgggtgttgtgtgggattgtaggagtttgagttggggtaaaaggaattttaggggagatagttagatttaaggttaattgtttagtttagtttaggattttagttttttgtaataagatgggttaggttttttgttggagtttgtttagtaaggggtttgtgggtttttgggtaagtattagttgggttttatttttagtttggggtttttttttagttttttttttggtgtagtttagttagagtttgtttattttttgggggtttttgttttttttttttttggttttgtattgtgtgagggtgtattttttagaattagttttttagagtttgttgagattaggagatttggaggttattttagggatattttgtttttgtgttttagataggtgttttttttattatgggtgatgaatgttgaggagttgttattataattagtgtggaatgtgttgttttttttagggaggaaaattttattttggaaatatattttagatgtaagttgaattttatttatggggttataaaattatttttttaattatttggtgttgttgggggttggtattattaattttggagatgttatttagagttaagatattatttggggaaaaaaattaggtttgtattttatgaggaatttttttttatgttttgtagaggttttaggagatggatgagattgtttgggtattaggtagggaggggtagggatgtagttatttttatagttatttttatggtttaggagttatgttttattttattagtttttgttagattttttttattagagatggttttattggtataagggaagattgaggttagagaggaatggaggaattggagggttggaatagttggtgggttggatggtttagttttatttgttttgtttgtttttagtagatattgtttttttttttatttttaaagtttttatttggtttagatttttttttgagattagtattatttaatagttttttataaaaaattgtttttttgattattgagggtaataatgaaaatatgtaattgaatttttaagaaattattatttttataatttgtgtttagtttttgagataaattaaatgttttttttgtatggtgagttgtttattgtgtattagagaggggttgatattgttttttattattgatgtgggatttattaagaagaatgttttatattgttttttgggaggtttttggtatttttagtttatggttttgagtgggtagagttggttagttggaggtgttgggtgggtggttaggtgggtttttttttgattatttttggttttgttattggttagttgtgtggtggtgtgggtggtaagtgggagggttagttagaattttagtttagatttttaagaaaattaggtttgtgtgtagttgggtagtgatagttttttgagaagtgtaattttggagttagagtggggaaaaggtagggaagttgggtaggaggaaggaagtggagatggtagagagggaggatttatttatttgttttttatttgttggttaaagttgattttatttaattgtgttagtgtttagaggatttaagatattataaggttaggtagtagagtggttttgggggaggtgaggttttgttgaggtaaggtattgtttggtatagggtttgggagtaggtgggggtagtagggtggttatatttatttaaggagttgttgggttggttagtagaggggtggggaggtggggttagttattgggatgggttgtttatttgtgagtagttggtagtgggttttttgttggtagttgttagtggttggatttttatggttttttggttggttggaggttgtttgggttgtggggaagtagaagtttttagtttgtggattgagttttttgaaaatgtttgtaggttgtatttagtagagttaattttaagtaaaggatttgagtgatattatttatgtgtaaattattgttttttttagtgtggttgtttgtttgagggtttagagttattttttggggaatattgtttagttagaaatttggtagtggtggttgtatagtgaggaggggtgttgttaggggatagaggatttgttttttgggaatgggagaattgaggtttaaagagtggttttttatttgatttaggtaaatttagggttaagggtaataggttgaggttattaggagtttaaaggttggttttgaaggtgagatttttttttgaggaagtaagtggttttaagtagtattttttggtagttggtttagaggattggagtggggtgggttgggaggaatattgtttgggatggggtgggtgtttatatttataattgtgtttttgtttttttttttttttt

SEQ ID NO: 2187 - DNA, 2497 bp, Artificial Sequence
  chemically treated genomic DNA (Homo sapiens)
agggagggagagaaggtaggagtatagttgtgggtgtaggtatttattttgttttgaatgatgttttttttggtttattttattttagttttttgggttggttgttagagggtgttgtttgaggttatttgtttttttagaagaaggttttatttttagagttagtttttgagtttttggtgattttagtttgttgtttttgattttgagtttgtttagattaagtgggaggttattttttgggttttagtttttttgtttttagggagtaggttttttgttttttgatagtatttttttttgttgtgtagttattattgttaggtttttgattaggtagtgttttttagggggtggttttgggtttttaggtaaatagttatgttgggaggggtggtggtttgtatgtgaatagtgttatttgggttttttgtttgaagttggttttgttgagtgtagtttgtagatatttttaggaaatttagtttataggttggaggtttttgtttttttataatttaaatggtttttagttagttagagagttatgagaatttagttattagtaattgttagtaggaaatttattattagttgtttatagatggatagtttattttggtagttggttttatttttttgtttttttgttgattaatttagtagttttttgggtgggtgtggttattttgttgtttttatttgtttttggattttgtgttaggtggtgttttgttttagtggggttttgttttttttagagttgttttgttgtttgattttgtgatattttgggttttttgggtattggtgtaattgggtggggttagttttggttagtaagtggggggtaggtgggtaaattttttttttttgttatttttatttttttttttttatttggtttttttgttttttttttattttggttttagggttgtattttttagaaagttgttgttgtttggttgtgtataggtttgatttttttgggagtttgggttaagattttgattggtttttttatttattatttatattattatgtagttagttagtaatagggttaggagtgattaggagggggtttatttgattatttgtttggtgtttttagttggttaattttgtttgtttagggttatgagttggaggtgttaggagttttttgggaggtagtgtgaggtattttttttagtaagttttgtattgatgataaagggtagtattagtttttttttgatgtgtagtgagtggtttattatataggggaggtgtttaatttattttgggaattgggtgtaagttataaaaatggtaattttttggagatttaattatgtgtttttattgttatttttggtaattaaggaaataattttttataaaaggttgttggatgatattgattttaggagaggatttgggttgggtgggggttttgggaatgaagaggagggtagtgtttgttgggggtaggtagggtaagtggagttgagttgtttagtttattagttgttttagttttttaatttttttatttttttttggttttagtttttttttatgttgatggggttatttttggtagggagggtttggtaggagttgatgaagtgaggtatggtttttgggttgtgagggtggttgtgagggtagttgtgtttttgtttttttttgtttggtgtttgagtagttttgtttattttttgaggtttttgtagggtatagagaggggttttttatggagtgtggatttgatttttttttttaagtgatgttttggttttaaataatatttttaggattaatggtgttagtttttaatagtattaggtgattgaaaaaatggttttatggttttgtgggtgaaatttaatttgtatttgaggtgtatttttaagatgggatttttttttttgggagaggtggtatattttatattaattataatggtagttttttgatatttattatttatagtgggggggatatttgtttggggtataggggtagggtgtttttggggtaatttttaggttttttaattttagtagattttggggggttggttttaggagatgtgtttttatgtagtgtagggttaggggagggggaggtgggagtttttaggaaatgaataaattttagttgggttgtgttagggaggaggttggaaggaggttttaggttgagggtaggatttggttagtgtttgtttagggatttataggttttttgttgagtagattttagtgaggggtttggtttattttgttgtaagaggttggagttttgggttgagttgggtagttgattttggatttgattgttttttttgaaattttttttattttaatttaggtttttgtagttttgtatagtgtttagttaggatgggtaggaggaagttttttttttgatgggtttttattgtattttgtttgaggggttttgagttttagggtttttgttttagtatttggttgtggagatt

SEQ ID NO: 2188 - DNA, 2349 bp, Artificial Sequence
  chemically treated genomic DNA (Homo sapiens)
ttggtttttattttagttttgatataaatgttatgagggtttttagattagttatttttttttttgtgggatttttagagttttaaagttggaaaagagaagttaagttgtagtttttgttgggtaattttaaatgttaggtagtttatttataaatatatggaaaggttttttttaggggaattggagtttgtttttagagtttttaagtttatgttttaaataaaattttaaaattatgaatgtgtgtatgatggaatggtaaataggtagggtgtaattttttttattggtataaggaggtgttgttaggatgttaatttattttgatttaggtgttaagtttttttttaattttgtatataaatgtatagatatttgtattgatagtgtaagaaatttatttatgtttattattatttaaaaaatagtattttttattaagtattttttatatgtttggtattttttatatttaggtttatagttagttttgaaagggaggtattatttttattttataggtgaggaaataagtttagagaggggaagtgatttgtttagtttgtatgtgttgagttgggatttgaatttaggttttttgttttagtatttattttattgggtattttgtgtttataaagtttttttttgggtaatggttttttggtttagttgattttggatttttttttagtttgtttagttttttggatggtatttaatgaggatttttaggtttgaataagattttttttaattgtgattttatttaagtattttatgatgagatttgtgattgtttttattttatagataaggaaattgaggtttattatggttaagttatttttttagggatatatagtttaggagagtaagggttggggttgaagaaattttgtttttttgattggattttttagtttatatattttttatggtttatttagttttgaggagtttttagtagaatttttaattttatattatagtgtgttaggtatggtttattttttttttttttgttggtgttttttattagggattttattttgttttgttgtttgtttttttttggtttttgttggattttttttaagtgtttggtatgttttttattgattttgaagagtggttagtgttttttgtagtttgggtttgggggtgtggatgaaggagttttaggtagttttatgagtatagagagtattgtaggttgtggtgagttttggtttatttttttagttatatgattgtagttttttatgtgtattttagtgggtatggattagggttagtttttgagtatttttggttaggaagtttaggtattttagtgggttgttagggatggttttggttaagtggtaggaggttttgtattagtggagggtaggggagttttttagggttatttttaggaagtttagtattttaaatagttttgtttgaatttttattttgtattggtttagtttagttagataaagtttttgggatgtttgtttttggtggttttattaggtggtagttgagtagtggaatggaagtggagtttagtaggtttggtgtggtgggattaatgaatggagttgtgggaggaggaggaaagaggttggagtatggggtgattttgggtttgtaattgaatttattagttgggtaggatgttgattggttgaggagtgtatttgttagggtttatgtttttattttgtttgtttttttagtattatttagttatttgttgttagttttgtttagattgggattatgggagttaaagttttaagttgtgggatggggattaggttggggtttttatatttttttgaagggaaggaaaagggtttaggagtttggaggagttttttagaatttattttttttatttttattatagtggtggttgttatatttatttttattaggttggtagggggttatgggtttttgttagggttgggtgaaggaagggttggggttttgaagttattattttgggagtttttaaggtttttgggaaagggagtgttatttggggtgtttttttgttaagttttggtttttagaaaggtttttggtatatttaggggatagagttttagggttttttgttttttaggattttaagtatgggtttggttttgtagtaatttttttggtttgataattgggggagatgtagtgggaataggttttgagagttatatagggtagggttgatgttttggatttgaaagaattatggtttttagagtggtagagagtggtttagggtgtatgtttgtggttatttttatttttggttatttggggggatatagtaggtattatgtgtgtttt

SEQ ID NO: 2189 - DNA, 2349 bp, Artificial Sequence
  chemically treated genomic DNA (Homo sapiens)
gaggtatatatgatgtttgttgtgtttttttaggtggttagggatggaggtggttatagatatatattttgggttattttttgttattttagggattatagtttttttaaatttagagtattagttttgttttgtgtggtttttaaggtttgtttttgttgtgttttttttagttattagattaggagggttgttgtaaggttaggtttatgtttggagttttaggaagtggggagttttggggttttgttttttgagtatgttgagagtttttttaagaattaggatttggtaggggagtattttaggtggtatttttttttttagaagttttgggaatttttagggtggtagttttagagttttagttttttttttatttagttttggtagaggtttatggttttttgttagtttgatggaggtggatgtggtagttattgttgtggtaagggtgagaagggtgggttttaagggatttttttaagtttttgaatttttttttttttttttaaggagatgtgaaagttttagtttggtttttattttatagtttagggttttggtttttatagttttaatttaggtagggttggtagtaggtgattggatggtgttgagaaggtaggtagaatgggggtgtgggttttggtaagtgtattttttagttaattagtgttttgtttggttggtggatttggttataagtttaagattattttatattttagtttttttttttttttttttgtagttttatttattggttttgttgtattgggtttgttgggttttgtttttgttttattgtttagttgttgtttggtggggttattaagggtaggtattttaggggttttgtttgattggattgggttagtgtagaatgggggtttaggtagggttgtttgggatgttgggttttttgggggtggttttggggggtttttttgttttttgttggtataggattttttgttatttgattaaggttgtttttggtaatttattggggtatttgagttttttggttaaggatgtttagggattggttttgatttatgtttgttgggatgtgtataggaggttgtagttatgtagttgggaggatgagttggagtttattgtagtttatggtgttttttgtgtttatgagattgtttggggtttttttatttatatttttggatttgagttgtagagagtattggttattttttagagttagtgggaggtatgttgagtgtttgaggagagtttagtaggggttaggaagaagtgagtagtagggtagagtggagtttttggtggagggtattagtgagagaagagaggatggattatgtttggtatattgtggtgtggagttggagattttgttgggaattttttggagttgggtgagttatgaggggtgtgtgggttggggggtttgattggggaagtaaggtttttttagttttagtttttatttttttaggttgtgtgtttttgggggagtgatttgattatggtgaattttaatttttttatttgtaaagtgggggtaattatgaattttattatggggtgtttaaatgaggttatggttggggaaagttttatttaaatttgggagtttttattaaatgttatttgagggattgggtaggttgggggaggatttagggttaattgagttaaaaagttattatttaggaggaggttttgtgggtatggggtgtttagtggaatggatgttgagatgaaaggtttgggtttaaattttaatttagtatatataagttgagtaagttattttttttttttggatttatttttttatttgtaaaatgaaggtgatattttttttttagggttggttgtgaatttggatgtgggaagtgttaggtatgtgggaaatgtttagtaaagagtgttattttttagatggtaataaatatagatgaattttttgtattattagtatagatgtttgtgtgtttgtgtgtagggttgggggagggtttggtatttgagttagagtaggttggtattttggtgatatttttttgtgttagtgagaaaggttgtattttgtttgtttgttattttattatatatatatttataattttggagttttatttggggtgtgggtttgggaattttggaggtagattttaatttttttgaggaagatttttttatgtatttatgggtgggttatttggtatttagagttgtttaatagaggttgtagtttggttttttttttttagttttgaaattttgagagttttatagaagggagagtgattggtttgaggatttttatggtgtttgtgttagggttggggtgagaattag

SEQ ID NO: 2190 - DNA, 2355 bp, Artificial Sequence
  chemically treated genomic DNA (Homo sapiens)
atgtttttttggtaggaagagggtagagatttggtttttattttagttttgatataaatgttatgagggtttttagattagttatttttttttttgtgggatttttagagttttaaagttggaaaagagaagttaagttgtagtttttgttgggtaattttaaatgttaggtagtttatttataaatatatggaaaggttttttttaggggaattggagtttgtttttagagtttttaagtttatgttttaaataaaattttaaaattatgaatgtgtgtatgatggaatggtaaataggtagggtgtaattttttttattggtataaggaggtgttgttaggatgttaatttattttgatttaggtgttaagtttttttttaattttgtatataaatgtatagatatttgtattgatagtgtaagaaatttatttatgtttattattatttaaaaaatagtattttttattaagtattttttatatgtttggtattttttatatttaggtttatagttagttttgaaagggaggtattatttttattttataggtgaggaaataagtttagagaggggaagtgatttgtttagtttgtatgtgttgagttgggatttgaatttaggttttttgttttagtatttattttattgggtattttgtgtttataaagtttttttttgggtaatggttttttggtttagttgattttggatttttttttagtttgtttagttttttggatggtatttaatgaggatttttaggtttgaataagattttttttaattgtgattttatttaagtattttatgatgagatttgtgattgtttttattttatagataaggaaattgaggtttattatggttaagttatttttttagggatatatagtttaggagagtaagggttggggttgaagaaattttgtttttttgattggattttttagtttatatattttttatggtttatttagttttgaggagtttttagtagaatttttaattttatattatagtgtgttaggtatggtttattttttttttttttgttggtgttttttattagggattttattttgttttgttgtttgtttttttttggtttttgttggattttttttaagtgtttggtatgttttttattgattttgaagagtggttagtgttttttgtagtttgggtttgggggtgtggatgaaggagttttaggtagttttatgagtatagagagtattgtaggttgtggtgagttttggtttatttttttagttatatgattgtagttttttatgtgtattttagtgggtatggattagggttagtttttgagtatttttggttaggaagtttaggtattttagtgggttgttagggatggttttggttaagtggtaggaggttttgtattagtggagggtaggggagttttttagggttatttttaggaagtttagtattttaaatagttttgtttgaatttttattttgtattggtttagtttagttagataaagtttttgggatgtttgtttttggtggttttattaggtggtagttgagtagtggaatggaagtggagtttagtaggtttggtgtggtgggattaatgaatggagttgtgggaggaggaggaaagaggttggagtatggggtgattttgggtttgtaattgaatttattagttgggtaggatgttgattggttgaggagtgtatttgttagggtttatgtttttattttgtttgtttttttagtattatttagttatttgttgttagttttgtttagattgggattatgggagttaaagttttaagttgtgggatggggattaggttggggtttttatatttttttgaagggaaggaaaagggtttaggagtttggaggagttttttagaatttattttttttatttttattatagtggtggttgttatatttatttttattaggttggtagggggttatgggtttttgttagggttgggtgaaggaagggttggggttttgaagttattattttgggagtttttaaggtttttgggaaagggagtgttatttggggtgtttttttgttaagttttggtttttagaaaggtttttggtatatttaggggatagagttttagggttttttgttttttaggattttaagtatgggtttggttttgtagtaatttttttggtttgataattgggggagatgtagtgggaataggttttgagagttatatagggtagggttgatgttttggatttgaaagaattatggtttttagagtggtagagagtggtttagggtgtatgtttgtggttatttttatttttggttatttgggggga

SEQ ID NO: 2191 - DNA, 2355 bp, Artificial Sequence
  chemically treated genomic DNA (Homo sapiens)
tttttttaggtggttagggatggaggtggttatagatatatattttgggttattttttgttattttagggattatagtttttttaaatttagagtattagttttgttttgtgtggtttttaaggtttgtttttgttgtgttttttttagttattagattaggagggttgttgtaaggttaggtttatgtttggagttttaggaagtggggagttttggggttttgttttttgagtatgttgagagtttttttaagaattaggatttggtaggggagtattttaggtggtatttttttttttagaagttttgggaatttttagggtggtagttttagagttttagttttttttttatttagttttggtagaggtttatggttttttgttagtttgatggaggtggatgtggtagttattgttgtggtaagggtgagaagggtgggttttaagggatttttttaagtttttgaatttttttttttttttttaaggagatgtgaaagttttagtttggtttttattttatagtttagggttttggtttttatagttttaatttaggtagggttggtagtaggtgattggatggtgttgagaaggtaggtagaatgggggtgtgggttttggtaagtgtattttttagttaattagtgttttgtttggttggtggatttggttataagtttaagattattttatattttagtttttttttttttttttttgtagttttatttattggttttgttgtattgggtttgttgggttttgtttttgttttattgtttagttgttgtttggtggggttattaagggtaggtattttaggggttttgtttgattggattgggttagtgtagaatgggggtttaggtagggttgtttgggatgttgggttttttgggggtggttttggggggtttttttgttttttgttggtataggattttttgttatttgattaaggttgtttttggtaatttattggggtatttgagttttttggttaaggatgtttagggattggttttgatttatgtttgttgggatgtgtataggaggttgtagttatgtagttgggaggatgagttggagtttattgtagtttatggtgttttttgtgtttatgagattgtttggggtttttttatttatatttttggatttgagttgtagagagtattggttattttttagagttagtgggaggtatgttgagtgtttgaggagagtttagtaggggttaggaagaagtgagtagtagggtagagtggagtttttggtggagggtattagtgagagaagagaggatggattatgtttggtatattgtggtgtggagttggagattttgttgggaattttttggagttgggtgagttatgaggggtgtgtgggttggggggtttgattggggaagtaaggtttttttagttttagtttttatttttttaggttgtgtgtttttgggggagtgatttgattatggtgaattttaatttttttatttgtaaagtgggggtaattatgaattttattatggggtgtttaaatgaggttatggttggggaaagttttatttaaatttgggagtttttattaaatgttatttgagggattgggtaggttgggggaggatttagggttaattgagttaaaaagttattatttaggaggaggttttgtgggtatggggtgtttagtggaatggatgttgagatgaaaggtttgggtttaaattttaatttagtatatataagttgagtaagttattttttttttttggatttatttttttatttgtaaaatgaaggtgatattttttttttagggttggttgtgaatttggatgtgggaagtgttaggtatgtgggaaatgtttagtaaagagtgttattttttagatggtaataaatatagatgaattttttgtattattagtatagatgtttgtgtgtttgtgtgtagggttgggggagggtttggtatttgagttagagtaggttggtattttggtgatatttttttgtgttagtgagaaaggttgtattttgtttgtttgttattttattatatatatatttataattttggagttttatttggggtgtgggtttgggaattttggaggtagattttaatttttttgaggaagatttttttatgtatttatgggtgggttatttggtatttagagttgtttaatagaggttgtagtttggttttttttttttagttttgaaattttgagagttttatagaagggagagtgattggtttgaggatttttatggtgtttgtgttagggttggggtgagaattaggtttttgttttttttttattaggggggtat

SEQ ID NO: 2192 - DNA, 2475 bp, Artificial Sequence
  chemically treated genomic DNA (Homo sapiens)
ttaggatattggtttttaaaattatataattatagttttattgttgtatttaagaaaatgaattttttataagtttttatttattttttgaattgttttgtggaagattttataagttttttaatttaggatattataagggtttttgtgttatatttggttttatgtttttttaatttttttaagtttagaattatttatgatgttgagttgtattaagggttagttattttgtagtagaagaattattgttattgttattatttgttttgtgattattatttaaatttgttaatagagtttttgaatttatttaattgggtataagtaggtagtggtatatggttatttttgtggagttttgggatgttgtggggttttttgtatgttgagttatataaatagggagttttatgttagttgtagttgttagtattaatatatgtgtttaatttttttttaaattttaggtttatttttttgtttgaggttttaatggagttattgagttgtatttggttattaaagtttatttaggatttttgttatttttatattaagtatgaggtttttagtttttaattttgaatgtgttgttattttatttagaattatgttttttttttaattattagtgttaggaggataagttattaggataattatgttttatgaggtaaattttgattttggggtttggaaatttagaagttattgattagttaatagtaatttaaataatgtatttataaagttagggaatgtaaatgtggttggggtttttaggagggtattggtggttatgagaatagggtggtatttgttttgagtaggattgggatagtaggtgtggttttagtttgttgggttttgtagtttttatttttgtttttgttttgttttagtagttaggtatggttttgtttttgtggggtttttttttttttagggaagttggttatttaggttttgattttttttaattttgtttttaggtttattattttttatttattttttttagagatatttaagatattaatagtaggattgggatgtgtttatgaaaagaatttaaattttagtttaagttataggtataaagtatagtttaatagatagggaaggggtagggtaagggagtgtgattttggtggtagttggagaaggtattgttggagtatgtttaggaggagtttgttagtgttagggtaatgggataggaagggtaagttaagtttgagtttagggaatgtaaaggaaatagtagttatgttttttttatgttgttttggtatttttaagtagttttgtataaaatttttgtgtatatatatatatgtatgtttattttttttttttttttttttttttttttatttgtttgatagttttttttaggtttggattttatgtttgatttttgttttggtaagtttgtttttttttttagtttgttaggggtatattttgtatgtttatttttatattttaaggtttttaattttaaaaggaggtgggggataatttagaaagttggttaaagtgagatgtaatagagggttttagagatagttattgtttaatgtagggtttgatttgtaggttgtattggttttatgattgtagttttttttgtaattggggtttatttattttttgtatagtatttttatgggttaggtagtattgggtaagagggaggaggggaggttttgaattagggtgattttgtttagttttaaatatttttatatattagaagggtttatttttgaatgttattttttagtgattttttaaggagtggttttggttagtgataatatattgatagttaatttataatttgtagggtatagagatagagatagagattttagtggtaggagggatgtaattattaatgattgtgtgttttttgttttttgagatagagttttgttttgttattaggatggagtgtagtggtgtgattttggtttattgtaatttgattttttggtttaagtaatttttttgttttagttttttgagtaggtgggattataggtataggttattatgtttagttaatttttgtatttttttttttttttttagtagagatggggttttattatattggttaggatggttttgattttttgattttatgatttatttgttttggttttttaaagtgttgggattgttttttaatagttatattgatttttataatattgagtttttaatatgagatatttatgttagaatgtattaaaatttaaaataagaaagtttatagggtaggaaaagttttattttagggaatttttgttaagattgtttttatgagttaaattggtaaagtttttataatttaagtaagaataattttatttttggtagatatgaaattttatgaatataatttggtgattatgttaaaattataggatagggtattttataggggagatttttatggta

SEQ ID NO: 2193 - DNA, 2475 bp, Artificial Sequence
  chemically treated genomic DNA (Homo sapiens)
tgttatgaaaattttttttgtggagtgttttgttttatggttttagtatagttattgagttgtatttatggggttttatgtttattaagaataagattgtttttgtttaaattgtgaaagttttattggtttagtttatagaaatagttttggtaagagttttttgagataaaattttttttgttttgtgaatttttttgttttgaattttaatgtattttaatatgagtgttttatgttagaagtttagtgttgtggaggttagtatagttattaaaaaataattttagtattttgggaagttgaggtgggtgggttatgaggttaggagattgagattattttggttaatatggtgaaattttgtttttattaaaaaaaaaaaaaaaaatataaaaattagttgggtgtggtggtttgtgtttgtaattttatttatttgggaggttgaggtaggagaattgtttgaattaggaagttaagttgtagtgagttgagattgtattattgtattttattttggtgatagagtgagattttgttttaaaaaataaaaaatatatagttattgatggttgtattttttttgttgttgagatttttgtttttgtttttgtgttttgtaggttgtgggttggttattagtatgttattattggttggaattgttttttggaaggttgttgggaggtggtatttaaaggtgagtttttttggtgtgtgggagtgtttgaagttgggtagagttattttgatttggggttttttttttttttttttatttagtgttgtttggtttgtaggggtgttgtgtagggagtgggtgagttttagttgtagggagggttgtggttatggggttagtgtagtttgtagattaggttttgtattgggtggtggttgtttttggaattttttgttgtattttattttggttagttttttagattgttttttgtttttttttgaagttaaagattttggagtataaaaatgagtatgtagagtgtgtttttggtaggttggaggggaggataagtttgttaggataaaggttagatgtagaatttagatttgaaggaaattattaggtagatagagagagagagagagagagagagagagtgagtatgtatgtgtgtgtgtgtgtaaagattttatgtggagttgtttggaaatattaagatgatgtaaaggaaatatggttgttgttttttttatattttttgggtttggatttggtttgttttttttgttttattgttttggtattggtgagttttttttggatatattttagtagtgttttttttagttgttgttagggttatatttttttgttttgttttttttttgtttgttgggttgtattttgtgtttgtggtttgagttaggatttgggttttttttgtaaatatattttagttttgttgttgatgttttaagtatttttaagaaggataaatgaggagtgatgggtttggggatagggttgaaaagggttaaggtttgggtggttggtttttttggagaaaagagggttttatagaggtggggttatgtttggttgttgggatagggtaggagtagaggtgggggttgtagagtttagtagattggggttatatttgttgttttgattttgtttaggatagatgttattttgtttttatgattattagtgtttttttgagagttttagttatatttgtattttttggttttatgagtgtattgtttagattgttattgattaattaatggtttttgggtttttaggttttagagttaaagtttgttttatagagtataattattttggtagtttgtttttttgatattggtggttgaagagaagatatgattttgagtgggatgatagtatatttagagttggggattgggggttttatgtttggtgtgagaatggtaagggttttgggtgggttttaatggttaagtgtagtttagtgattttattggagttttaggtaggagagtgaatttaaaatttagaaaaagattgaatatgtatgttggtgttggtagttgtagttggtatagagttttttatttgtgtggtttaatgtgtaaggggttttatagtattttggagttttatggaggtgattatgtgttattgtttgtttgtgtttagttaaatggatttgggaattttgttagtggatttaaatagtggttataaaataaatagtaataataataataatttttttgttgtaggataattggtttttgatgtagtttagtattatgagtggttttgggtttaaagagattaaagaaatataaaattaaatgtggtataagaatttttatggtgttttaggttgggaggtttataaaattttttataggataatttaagaaatgagtggggatttgtggaagatttatttttttaggtgtagtaataggattgtggttgtgtggttttaggagttagtattttgg

SEQ ID NO: 2194 - DNA, 2223 bp, Artificial Sequence
  chemically treated genomic DNA (Homo sapiens)
aattaggtttaaaaagattgttttaaaagagtgaattttggtaatttattataaaataattgtaatgtagattgtgtatggaaatgattggagatattttaaggttatagtgtttttataaattgagttgaaagggaattgttaggatgattttgtttaattttttttttttatataggaagaattattttaaatttgagaggttaagtgatttggttaaagttatatagttattattagttaatttgtatatattgatttttttgtggggttgggtagatgaggaattttttgtttttttttttgtttgtagagattttttttgaggttattttttgagttttggtaagtatttttgtttttggtagttttgtgttttgatttaattttattttttttattttattttatttttgagatagggttttattttgttatttaagttggagtgtagtggtgtaattttggtttattgtagtttttattttttgggtttaagtgatttttttgttttagttttttaagtagttgggattatagatgtttgttattatgttaggttaatttatggttttttgtatgtgttttttgtgtttttgtagagatagtgtttttttatgttgtttaggttggtttttaatttttgagtttaagtgatttgtttgttttagttttttaaagtgttaggattataggtgtgagttattgtgtttggatttaattttattttttaatttgttttgttttgttttttttaggaggtttttagtttttttggattggttgagaaaagtggtttggttggtttggggttagtggtatttattttttttttaattgtttaattttttttttttattgaattgtttaattttttttttttaattgtttaatttttttatttttataatttttttttgttataattgagggaggtggtgttgaaaaatagttgattttagtaatgttgtttatgtgattattgtagttgtagtttttgttttattttttgttttgggttaggtgggtattattaggggtttttttggtaaggagtattgggtaggtatttggttttgttaatttattattggaatagttggggggatagtagataggtatggttggatagatttgatagattaggtattaggttttttgtgttggttttgggttttttaagtaggaatgtgaatggttttaagatgttttatatggttttattagttttttttttttttttgttttttatttttaggagggttgttttgttttttttttttttgttttttggttttatgttttttgttattatagatttttttttgttttatttttttgtagatttagttgtgtattgtaggtatggaggattaattagtgataggaagttgtgttttttggagtggtgattagttgtggttaggagagttttagtagggttagttttaggagttttttttgatttttgtttattgtttatttatttgttgttgttatgaggtattttggggttttttttttttttttgggggttttgggggtttttattgagatgtgtggtgagtaatttgtttttattttgtgtttttttttttttgggtttttagtggggtggttagggtataggatgagggaatttatttgtttttttaagtttttatagtagtttgggtttagttggattttagtatttaatatattttattgtgattgattatatgtttgattttttattagataagatttttgttaatttagttatttgtttatatatttatttagtgtatattgagttttttttgtgttaggtttagtgttagtttttggggaatgtgtaaagtatgagataagtttaatttttgttattttagagtttatgttttagggaagggggatagataaaagaaatggttaggtgtttttatttgaaattttagtattttggaaggttgaggtgggaggggaggattgtttgagtttaatagtttaaggttagtttgggtaatatagggagattttatttttataaaaaataaaaaaaattaaaaaatagttgggtatggggaagattttttgaagattaagaggatatatgggagttgaaatttgaaggaagaaaaggagttggtaggaaaggagtgggggatatatattttaggtagtaggaagtgagtttttggaggttttgtttgttttagttttgtgttttaaggggttttt

SEQ ID NO: 2195 - DNA, 2223 bp, Artificial Sequence
  chemically treated genomic DNA (Homo sapiens)
agagattttttggggtatagagttggagtaggtaggatttttgaaggtttattttttgttgtttagaatgtgtgttttttattttttttttgttagttttttttttttttttgagttttagtttttatgtgtttttttggtttttagaaagttttttttatgtttagttattttttaattttttttattttttgtagagatggggtttttttatgttgtttaggttgattttgaattgttgagtttaagtgattttttttttttgttttagttttttaaaatgttgagattttaggtgggagtatttaattattttttttgtttgttttttttttttagaatataagttttaggatggtagggattagatttgttttatgttttgtatgttttttaaaggttaatattgggtttgatatagaaaaggtttagtatgtgttgaatgaatgtgtgaatgaatgattgaattaatggagattttgtttggtgaggagttaaatatataattaattataataggatgtgttaaatgttgaggtttagttaagtttaaattgttatgggagtttagaagggtaggtaagtttttttattttatgttttagttattttattaaggatttaggaggaaagaggtataggatagaggtgagttatttattatatattttagtgagggtttttaggatttttagaaggaagaggaaggttttaaggtgttttatggtagtagtaggtgggtgagtagtgagtaagaattgggaaagatttttggggttggttttgttgaggtttttttgattatagttggttattgttttgagagatgtagttttttgttattgattaattttttatgtttgtaatgtatggttaagtttgtagaggggtggggtgggggaaggtttgtggtggtggggaatataaggttaaagaatagaggaaggaagggtagagtagtttttttggaggtagggaataaagggaggaggagggttagtgggattatgtgagatattttgaggttatttatgtttttgtttaaagagtttgggattagtgtagagggtttgatgtttgatttgttaagtttgtttgattgtgtttgtttgttgtttttttagttgttttagtggtggattggtaggattgggtgtttatttggtattttttattaaaggagtttttggtagtgtttatttagtttaggataaggagtggaatgggagttgtagttgtagtggttatgtgagtagtattgttggagttagttgttttttagtattgttttttttagttgtggtgggaggggattgtgggggtgggggagttgggtagttggggagggggagttgggtagtttggtggggggggggagttgggtaattgaggggagggtgggtgttgttggttttagattagttaggttattttttttaattaatttgaaagggttgggagttttttggagaggataaaataaaataagttaaagaatgggattaagtttgggtatggtggtttatatttgtaattttagtattttgaaaggttgaggtgggtagattatttgagtttaggagttggagattagtttgggtaatatggggaaatattgtttttataaaaatataaaaaatatatataaaaaattataaattagtttggtgtggtggtagatgtttgtaattttagttatttggggggttgaggtaggaggattgtttgaatttaagaggtggaggttatagtgagttaagattatattattgtattttagtttgggtgataaagtgagattttgttttaaaaataaaataaaataaaaagaatgagattgaattgagatataaagttattagaagtaggggtatttgttagaatttggaaagtaattttaaaaaaaatttttgtaaatagggaagagaataaaagattttttatttgtttagttttataggagaattaatgtatatgagttaattagtggtggttgtgtgattttggttaggttatttaattttttgagtttaaaatagttttttttgtgtgagaagagagggttaggtaagattattttaatagtttttttttagtttaatttgtgaagatattatgattttaaaatatttttaattatttttatgtataatttgtattgtaattattttatggtaaattgttaaggtttatttttttaagataatttttttgagtttgatt

SEQ ID NO: 2196 - DNA, 2448 bp, Artificial Sequence
  chemically treated genomic DNA (Homo sapiens)
ggtgtttatagggtatttaagtagatataggttgaggaggtagaatatatgtgaatttggagttaagaagagaggtaagggttggaaatagggatttaagatttttggatagttgtgagtgtgtataatgagggttagatgtagagaaaattaggagattatagagagtagaatttagggtggggatttgggagttagtagttgggtatgggtttggtagaaagggaagttaaggaggaggagagggggtagttttagatattaaggaggggagagtgattagaaagaaaatttttttgtagagatataggggatggggaagaattgtagattgaattggggtaaaggattgttggttttaattagagagatttgagggagagatgaggttgagagttaggggattttgttatgttttagtataaaaatagtatttgatatagatgggtgtttgggagttgttgttggatgaatgagtggatagatgtatggatggatggatggatggaaggatgatagattgatggataaatagatgaatagatgaatagttggatggataattggatggatgggtagatagaatgattttagagattagaaaaagttttatgtattaagtgggattgaattgtgtttttatgggtagaaagtagaggaatttttatttgagttaggaatgatttagtgtttttaatttagggagaaagttagtttggttttattggggatatttgtgtgggggatttagaggttttttaaatgaggttagatgaggttggataggtttaagttaatttagtatttttttgttatattgtataggaggggatgtgttatttagggagttgttgggatttatgggttttagtgttgttattagtattgatagttttagagaggaaagatatatattggggtaattttaaggttgtgtgtggtatttgttttggatagtagataggtatagggatatttttagggggttggttatttttttgttttatgtttaggttttagttttgtttattgtaattttgtgtttgttatgtttagtaggtttttgttttagtttagtttttagagagtagattttaggtgttggttttgggggttttggtttgagttttagttattgtgttatgtttttggaattgggattaaggttattgttttaggtaagtggtttttaattttttttagtttgttttattttttgttgtttttggaaaatttgttttttttttttggggtttttttttttttgtttttttagttttaagtattgatttttatttttttttatggggtttggaggaggtgtattagtttttgggtaattggtaggaagggtttttatagtgggagtagttggatgtagtttggttttggggtttgagttgggattgggtagggttagggtttttttttttttttagggtagatgtttgagtgagggatagaggttggttttgatgaggggttttgtagtgtttttagggatattgtttagtgatttttggggttaaggatagaggttgttggggtgggtttgggagttgttgagttttatagtttaggggagtagttttaagaatagttgagggtttaggttgaggattggatgttaatttagtttgggagggttatatggtttggtgatatagaggttattttaaggggagattaatggagggtatagagagggttttgggtttaggttgtagttttgtggtttgtgttgggttatgaggatatggggatatagagggatgggtgagattgggtgaggtgttagaatttaatttttttaggatagttattagaaaggagatagttttttagggtagagatgtgtttgtttttggagttttgttatttttggggtttagtgtttttttgtttatggattggttttttgttttttttaaagggtatgttagatttaggaaatgattagaggggagtgaatgaggggtgtagagaattttatggttattaggtgaagtttggggttattataggttgttggggtgggtttgggggttgttgagttttatagtttgtgggagtagttttaggaatagttgaggtgaagggttttgtggttgggtttgtggagataggaaatattttagagttttagaggagttttgaggtttgtttaggtggagtttattttttgttaggagagttaagtgggttgggttggggtagagtttggtgtttgtgagggataggaagttttagtttaaagtaggtttgggtttttttatatattgtttgttaggatagttttataggatgagtaggggatttatagtttatggaggaggttttaggttttggaagaataaagtgggtgatggaggggggtatagggatggaaatgagggatttaggggttaaggttagattttaaatttagattttagagattagagaaga

SEQ ID NO: 2197 - DNA, 2448 bp, Artificial Sequence
  chemically treated genomic DNA (Homo sapiens)
ttttttttgatttttggagtttgagtttagaatttggttttgatttttggattttttatttttatttttatatttttttttattatttattttatttttttaggatttagagttttttttgtgaattgtgggttttttgtttattttgtaggattgttttggtaggtagtgtgtggggagatttaagtttgttttgaattggagttttttattttttataggtattgggttttgttttagtttagtttatttggtttttttggtaaggagtgggttttatttagataagttttagggtttttttgaggttttgagatgttttttgtttttataagtttgattatagaattttttattttagttgtttttggggttgtttttatagattatgagatttagtagtttttaggtttattttagtagtttgtgatgattttaaattttatttggtagttatggagttttttgtattttttatttatttttttttggttattttttgagtttaatatgttttttgaggaaggtaggaggttgatttgtgaatagagagatattgggttttagaggtgatggggttttagggatagatatatttttgttttaagagattgttttttttttggtgattgttttgggagggttggattttggtattttatttagttttatttgtttttttgtgtttttatgtttttatgatttagtataggttatagagttgtagtttagatttagagttttttttgtgttttttattggtttttttttggggtgatttttgtgttattaggttgtgtggtttttttaggttggattggtatttagtttttagtttagatttttagttgtttttggggttgtttttttagattatgagatttagtagtttttaggtttattttagtagtttttgtttttgattttaggagttattgggtaatgtttttaaggatattgtagggttttttattagaattagtttttgttttttatttagatatttgttttggaagagaggaggagttttgattttgtttaattttagtttaggttttgggattaggttgtatttggttgtttttattgtggaggttttttttgttggttatttggagattaatgtattttttttaggttttatggagaaaggtaagggttagtgtttaaggttgggaggatagaggggaggaagttttagagagagaaaatagattttttagggatagtagagggtgagataggttgggaaaggttgagagttatttatttaggatggtgattttggttttagttttgaagatataatatagtgattgaggtttagattaaaatttttggggttagtatttggggtttgttttttgggggttgggttggagtaggagtttgttgggtatgatgggtatagggttgtagtgggtggggttgggatttagatatgaggtaggggggtggttagttttttagaggtgtttttgtgtttgtttgttgtttaaggtaagtgttatatatagttttggagttattttagtgtgtgttttttttttttgaggttgttggtgttgatgataatattgggatttataggttttagtaattttttgagtgatatatttttttttgtgtagtgtggtagaggagtgttgagttggtttggatttgtttaattttgtttggttttatttaaagggtttttgagttttttatataagtgtttttagtgaagttaggttggttttttttttggattgagagtattgggttatttttgatttaagtggagatttttttgttttttatttatggagatgtggtttagttttatttagtgtatgaagttttttttgatttttgagattattttgtttatttatttatttagttgtttatttagttatttatttgtttatttgtttgtttattaatttattatttttttatttatttgtttatttatgtatttgtttatttatttatttgataatagtttttaagtatttatttgtgttaggtattgtttttatgttgggatatggtaggattttttggtttttagttttattttttttttaaatttttttggttaaggttaatagttttttgttttagtttagtttgtagtttttttttattttttatgtttttgtaagaaggttttttttttagttatttttttttttttggtgtttgagattgttttttttttttttttttggtttttttttttattaggtttatgtttaattgttgatttttagatttttattttgggttttgttttttgtagttttttaattttttttgtatttgatttttattgtgtatatttataattgtttaggggttttagatttttatttttagtttttatttttttttttggttttagatttatatatattttgtttttttaatttatgtttgtttggatgttttgtagatatt

SEQ ID NO: 2198 - DNA, 2383 bp, Artificial Sequence
  chemically treated genomic DNA (Homo sapiens)
agagagttgggtatatgggtaggtgtttattaaggaagaaagtagagtgttgaggttgtttttttaagttataggtaagaagaaattgttgagttagttttagtatttattaatagttattgattttttgggaaggtttgagggagatgaataagtagtagttgtgattttattaagtttaatttaaaattttggtggaggaaggtatggaaattagtgttgttggttttaggagaatgttggagttgaatatttttgtatttagatgtgggttttatttaggagtaagaaagtttgtgtaattagatttaatgataaagaggttttatattttttttagttttggggtattgggttgtagttgatagttttaattagatattttgtagtttttaaggttagtattttagagaagggatgtagggattttttttagagtagaaggtttttagggattttagtatatgtgttttaagtagatatttttttagttttgaggggtagggttgtggataagtagttggaagtttatttggttagttttgatttagaagatgatttttgggtgatttttggtgaaggttggtattagtggttgtagagatgagggggttttttttatattttaagagttaatttaattagatggttggttattaggtagagatggggttgtttaaggagatttatagtatattttataagatatatatttggttttggttttgtgtttttttgtttgtttttttagttatttattgtttgttgtttattattaggtttttagagtaggtttagttggtgttaagggtttagttgttggggatgttgagatagagtgagggttaagttttttttggtttttagaaggttttggttaggatgtataggtggttgtaggtgttagttttggaggtggttgtaggtagtgggggtgtaggtggtagatttttggtatgaatttaaattattttagttttttagttagttagaaaatagttttaattttattttgttggtttagaagtaggatgaggggagagataaagttaaatttttgattagttttttttgttttggttaggaagttagagtgtgagagtgtgtggggtttggtatttggttttatttggttatttgtgttgaataggatgttttgaaggatgataaggttgttttggattttgatgttatgtttgttttaaatttttgatggggagaaatgtggggtgttatgtggtatttttaggttattggtttttattttgggatttaggtgagaagttagggttttggggttttttgtgattttttggtttttgtttatggagggtagttgtttgattaaaataggattttttttttttaaggtatatttttaagttgttttttatttgtttaagatattttttattttaaatggaatgtagttaagaagtaatgtatggttattatgtatgtggttgttttttttttttgggtttgggtattttgggggtgttttaggaagaggtttttatattatggaggtgagtgaggggttttggttggtttgagggggttgggatggtgaggatggttagattgggtggttgttgggttttggggtttggtgggtttttttttggtggtttgatttgtttgtttttgagtaatgatttggtgggtagtagagttttatttgtaattagtttgtatagtgtagttttataggaatttgtttaggtaaaggttttaattattaagatatttttattttaagtagagtttaatattttaagtttattttgtgtttatgttttagaaaaaaaattttttagtaagaatgtaataaataagattgagagttttattaggagtttgtgagttttatattattagatgtgttgtagttttttgtgatgattgttttttttttgagttttgtatatggtgtgggttatatggaaaaggtattgtagttttttgtgatgtttttttttttttggagttttgtatatggtgtgggttatatggaaaaggtattgtagttttttatgatgattgttttttttttgagtattgtatatggtatgggttatatggaaaaggtattgagtgtggtttataggagaggtggggatggaattaggattttaatgtataggttgggggatgtattttggttattttttgtggtgggatggtttttttaattggagattttagtagggtttatgttggtggttttgtttgtttttggtatggattattttttatttgtggatgatatttttattttaggtttgtttgtaggatttaggtttttttttaggtgtttttttggtatttagggattttttagtagtatatggagttggggttgtatggaggtgtgtggggg

SEQ ID NO: 2199 - DNA, 2383 bp, Artificial Sequence
  chemically treated genomic DNA (Homo sapiens)
tttttatatatttttatgtaattttagttttatgtgttgttggaaagtttttgagtattaggggggtatttggggaggggtttgagttttgtagatagatttgggatgggggtgttatttataggtgaggagtggtttgtgttagggataggtagagttgttagtatgggttttgttgggatttttgattgggaaaattattttgttatgggaggtggttaaggtgtgttttttagtttatgtattggggttttggttttatttttgttttttttgtgggttgtatttagtgttttttttatgtaatttgtgttgtgtgtggtgtttagaggaggagtgattgttatggggagttgtagtgttttttttatgtaatttgtgttgtgtgtggggttttgaggaggagaggatgttatggggagttgtggtgttttttttatgtaatttgtgttgtgtgtggggtttggaggaggagtggttattatggggagttgtagtgtgtttggtgatgtggggtttataggtttttaatgaggtttttagttttgtttattgtgtttttgttggaagattttttttttgaaatgtaggtatagaatgaatttgaaatattgagttttgtttgaaataaaaatgttttgataattagaatttttgtttgaatagatttttgtggggttgtgttgtgtaggttggttatgggtggggttttgttgtttattgagttattgtttaaaggtaaatgggttaagttattgaggagggatttattgggttttgagatttggtagttgtttaatttggttatttttgttattttagtttttttgggttggttagagttttttgtttatttttatggtgtgggggtttttttttggggtatttttagggtgtttaggtttaggagagaggagtagttatgtgtatggtggttgtatattgttttttgattgtgttttatttaaagtaaaaagtattttgaataagtgagaaatggtttggaaatgtgttttgggagagaaaggttttgttttagttaaatgattgttttttatgggtaaaggttaagaggttataggggattttgagattttggttttttatttgaattttagagtgggaattggtgatttggaggtgttgtgtggtgttttgtgtttttttttgttaaggatttgaaataagtgtggtattaggatttgaggtagttttgttgttttttagggtattttgtttagtatggatggttgagtggggttggatgttgagttttgtatatttttatattttggttttttgattagggtagggggagttggttaagggtttggttttgtttttttttttgttttatttttgggttagtaggatgggattggaattgttttttggttggttgaagggttgaaatgatttaaatttatattgaggatttgttgtttgtatttttattgtttgtggttatttttaagattgatgtttgtggttatttgtatattttggttagggttttttgagaattagagggaatttgatttttgttttattttagtatttttgatagttgggtttttagtgttagttgagtttgttttggaggtttggtggtgggtagtgggtagtgggtggttagaggggtagataggagggtatagggttagggttgagtgtgtgttttatgggatgtgttgtggatttttttgggtagttttgtttttgtttggtggttgattatttggttgaattgatttttggggtgtgagaagggtttttttgtttttgtagttattgatgttggtttttattaggggttatttaggggttattttttggattaaggttggttgggtgggtttttagttgtttgtttatggttttgttttttgggattagggagatgtttgtttggagtatatgtgttgagatttttgaagattttttgttttgaagaagatttttatattttttttttggggtgttggttttgggaattgtgaggtgtttggttggagttgttggttgtagtttggtgttttgggattgagggaggtgtggagtttttttgttattaggtttaattatataggtttttttatttttaggtaaagtttgtatttgaatgtagagatatttaattttagtatttttttgggattagtagtattggtttttatgtttttttttattaggattttaaattaagtttgatggaattgtagttgttgtttatttattttttttgggtttttttgggaaattggtggttgttaatgaatgttgaagttgatttagtaatttttttttatttgtggtttaaaaaaatagttttaatattttgtttttttttttgataagtgtttgtttatatgtttgatttttt

SEQ ID NO: 2200 - DNA, 2293 bp, Artificial Sequence
  chemically treated genomic DNA (Homo sapiens)
ttttttgtattattttatggtgttattaaaagttgaattatgggttggtttaattttgtagagaagagattatttaatttatttgtggaaatttattttttagtgatattgatgttttttaagaaatttaattttgggtttgagtgatggttggtgtaaaaaataaatttaagattttagtgttttttagaagtttggatttttagggattttgttgtgagttataggatgttattggtttttttttttttgtgggttgagtgtgggggttatgtggatttttttatgagtagatgttattagggttattggttttagtttttttttttatagttgtagtgggggttggggttggggtattttagggagggtttttgtatgagtttgtgttatagtgtgtggtatttggtggagggattaagttgattgttttaggtgagtttttttttttttttttttttttgtttttgggataatttttgttgtttttgtttgtttttgtattttgttttaatttgtggttagtttttttttttgtattttaggtttgagtaaggatttttgttttttttgtttagatttttgtttgttttagtaggttattataattattttatttttgattataggggtaggggattagatagaatgatttattgagttttgtttgtttgtttgtttgtttgtttttttgtttgtttttttgtttttttgtttgtttttttgattgtttgataggtgtaggttgggtttttaagttttgttttgttttggtttttttagtttgggtttttgttggaatagttttgtttttgggttatttgggttttattttttggggaattgggaataaggggtttgagggaggtattttttgggagattttagaaggatttagtgtttttggggttgatgtttgggaattatagagttgggatttagagttaggatttagatttagaatgaggtaggaggtggaggggttgttttgggtgtttgggggttgttagggattgagttttgagttagtttgagatttaggaaattttgttaggagggagaagggagaagtagattttggatattagaaagttaggggaagggttataaaaggagtggatgtgatggaagggtgggtttttgggtttttttagaatatattttttgtgtttagggggattagaggggtagagtttattgtgtgaaagttttattgttatgattaggtagttgggatgtggggtggatgttagaaaagattttatggaataagagagagtttaggatagtaggtaggttttttgatttttttaggtttttgttttatatatgggttttagaatatatatttggttggaatagtttgagggattaaaaggttttagtattttatagagttgaggagttaggttagaaaagtaattttagagtttgttgtgtaggggagatatagagttttttttatttgttaggatggtaggaggggatagggttagggtgttgagggttagatgttggtgttgggggttaaggttttgagagattttaggataggtggttaggtgtttaaggtaaaatagttttttgtgtagattagggtatagtggaaaatattttgatttttttgtttggtatagatttttagatatagagtttttgaataagggtattttaatattttattatatattgaggttaggggttttttaggtggatattaggattttgattttttgttttttatttattttgtaggttagtttaaggttgtttttttggttattttgtttttgtttttttttgaggagttttaagttaataaggttatattggtgtgttttataagtgatttttatttgggagttgtgatagtggtttggaaggtagatagtagttttgttaaggtgggagtggagattattatattttttaaataaagtaataataagtatgtggttagtagttatttgagtttgatgtttgagtagtggaagttttatagaagttatagttgttaggttatgtatgaagggagtattgtggagaagatagtggtttttatagaatgtttataggtttttaatttttattttttattatgggagattagagttgtaggattttaggggaggggtttttttttttattttaaggtattaagtttttttttttgtatttaataaatttttaataaatatttttattgttaattagaaattttgttttattttattttttttttttttatatataatttttagttttttttgggtttttaatttgtggtggaaag

SEQ ID NO: 2201 - DNA, 2293 bp, Artificial Sequence
  chemically treated genomic DNA (Homo sapiens)
ttttttattataaattgagaatttaggaaaggttaggaattatatgtgagaaaagaaaaaatgagataaaataagatttttgattgataatgagaatatttattgagggtttattgagtgtagggagaagggtttgatgttttggggtgggaggagagattttttttttgggattttgtagttttagttttttgtggtggggggtgagggttgagaatttatgaatattttgtaggggttattgttttttttatggtgttttttttatgtgtgatttggtagttgtagtttttgtgggatttttattgtttaggtgttaggtttagatagttgttggttgtgtatttgttgttgttttgtttggagggtgtggtggtttttatttttgttttgatggggttgttatttgttttttaggttattgttatggtttttgggtagaagttatttatgagatatattagtgtggttttgttggtttgaagttttttagaggagggtgggaatagagtgattgagggggtagttttgggttgatttgtggggtggatgaggggtagggggttagagttttggtgtttatttggggagtttttgattttagtatatgatgaggtgttggggtgtttttgtttaggggttttgtgtttgaaggtttatgttaggtagaggggttagggtgttttttattatgttttgatttgtatggggagttgttttattttagatatttgattatttgttttgagattttttggggttttggtttttaatattgatatttgatttttagtgttttgattttgtttttttttgttattttgatagataaagagagttttgtgttttttttgtatagtgaattttggggttatttttttggtttggttttttagttttgtgggatattggggttttttggttttttaggttgttttagttaaatgtgtgttttggagtttgtgtatggggtaagggtttggggggattggagagtttgtttgttgttttgggtttttttttattttgtggagttttttttggtatttattttatgttttggttatttggttatagtagtggggtttttatgtagtggattttgtttttttgatttttttgggtataggggatatgttttgaagagatttaggagtttgtttttttgttatatttattttttttgtgattttttttttggttttttggtgtttagagtttgtttttttttttttttttttgatggggttttttgagttttaggttggtttagggtttagtttttggtagtttttagatgtttagggtagtttttttattttttattttattttgggtttggattttggttttgggttttagttttgtgatttttgagtattagttttgagggtattgggtttttttaaagttttttaggaggtgttttttttagattttttgtttttaattttttaggagatggaatttaggtaatttaaggataaagttgttttgataagaatttagattgaggaggttagaatagaataaggtttagagatttagtttgtgtttgttagatagttagagagataaatagagagatagagagataaatagagagatagatagatagatagatagatgaggtttagtaggttattttatttagttttttgtttttgtggttagaggtgaagtggttgtagtgatttgttgaggtaagtaagggtttgaatagggagggtagaggtttttgtttaggtttgggatgtagggagaaaggttgattataagttgagataagatatagaaataaataaaaatagtagaaattgttttaagagtggggaaggagaggggagaagagatttatttaggatggttagtttggtttttttgttgaatattatatattgtgatataggtttatataaaaattttttttgggatgttttagttttagtttttattgtagttgtgaaggaggaagttggggttagtggttttggtggtatttgtttatgagggagtttatatggtttttatatttaatttataaagagaaggggattggtgatgttttgtgatttatagtaggatttttggaaatttaggtttttggaggatattgggattttgaatttgttttttgtattaattattatttaggtttaggattgaattttttagggagtattagtattgttaaggagtgaatttttatagatgggttaggtggttttttttttgtaaagttgaattaatttatggtttaatttttggtaatattatggggtggtgtagaggg

SEQ ID NO: 2202 - DNA, 2388 bp, Artificial Sequence
  chemically treated genomic DNA (Homo sapiens)
gtttttattgtttgatgttgtagatattgtagtttttgatgtagggtttggttttatggggtttagtgggtgttttttttgtgtgtggagatgagaaattgtaaaaagtaaagatataagataaagagataaagtgaaaatagttgggtttgggggattattattattaagatatggagatgggtagtggttttaaatggttgtgtgtattgttatttattgtatataagataaggggggtagggtaaggagggtgagttgtttaagtgattgataaggttgagtaagttatgtgattataggatagggggttttttttttataggtagttgaagtagagagggaaggtagtatatgttagtgtttttttttatgtatttattagaaagattaaagattttaagatttttattattttttttattgttattttttgagaattttaaagagggattaggagtataggaggaaagtggataaggagtgtgattattgaagtatagtattatagggaggggtttaggtttttggatggttgtaggtaggtttggatattatttagttttttataagaagttggtggagttgagtgttttttgatttttttaagaaaagggagatttttttttgtggtttgttaagtaatgatgtttttttaggtattggtgttattgtttgattaaggagttttttagtagtttttatgtgggtgtgatagagggtttattttttgtatttttggttattttttataatagttttttagtatttgattttatatttattggttattttttggttatattagtaatataataaagagtaatattaaaagttaatgattaataatatttatattaatgattgataatgtttatgattatttttgtatttaatttgtattataattatttttattgtaagtatattttttattatattgaaatagtttgtgtttttagttttttgttttagtatttaggtaattttttgtttatatttttgaggggttgaattgttttttattttttggaagttgggaggttggaagaggggatgtgtgtgatggatttagtatatagttgggaatttgaggtatatttaagtttttgtttgtgttgtgtggagtttatatttttttttttattggggttttaaaatttttttttatttaatagggtggtgttgtttaaagttttgggtatatattagggttggggagggggtggtggagagggggttttagtttgtttaattattaggtaatggggtatttgttttttttttagttgggtttggatttgtgttttaggtttaggttgtaatgttttttttttttttttttttttttttttgtagttttgttgggttttgtttaggatagataaagatagagtagtttgtttttattggaggtttttttgttagtaggaggggtttggagaaaattagaaagagggttagagttagagaaatatgaagtattttggggttttttatattagtgtttgagtaggaatggggaggggttatgatttataaggttttgggaggttattttaaagagggttgtttaattgtaaggatgttgtaagtaggaagagaagttatagtgttttagaaaagagtgggatagggataagtatatttaagaggttgaatatgaatttatagattaggtatttttgtatgttttgtttgttaggttttttttgttattttttgttaggtggttttgttgggttttagttttggtttttttttgttttagttttatttttgggtttttttttttttggtttttttgttgtttttatttttagttaagttttttgttttgttgtgtggttttatgattgttgtttttgaatgggttattttttttatttgttttagtttagtttgtttgttgagatttttttttgaaaattatgtttgggttggtgttttttgttttgggagggtgttttttttgtgtgttttttattatttttgggagttttggaattgggagaattgaattaaaggatgatttgagtaattaggtattttgtttttagtgttttggtgtaatttttgtaagatttattttgttttaatataaagttttaggagagggtgtgggggagggaatggtttttgtattagaaaataagttattttttttaaagatgtttttattgtgagtagagtaggatgtatatgattttagatataggttttttttttgtgagtattgtttattttttagaatgatatttgtaatatggagtgtaggaaaaaatatgatgattaggagaaatgtttttattttaggttaggtatggtggtttatgtttgtaattttagtattttgggaggttgaggtgggtgggttatttgtggtta

SEQ ID NO: 2203 - DNA, 2388 bp, Artificial Sequence
  chemically treated genomic DNA (Homo sapiens)
tgattataagtgatttgtttgttttagttttttaaagtgttaggattataggtataagttattgtgtttggtttaaaataagagtattttttttgattattatatttttttttatattttatgttgtaggtgttattttgaaaggtgaatggtgtttatagaggaggagtttgtgtttggggttgtgtgtattttattttgtttatagtggaggtatttttggaagaagtgatttattttttggtatagagattatttttttttttatatttttttttaagattttgtattgaaataaagtaaattttatagaaattgtattaaagtgttgagaataaaatgtttgattgtttaaattattttttggtttaatttttttagttttagagtttttaggaatagtgggaagtatatagaggaagtatttttttagggtgggaagtattagtttgggtatgatttttgggggagagttttagtaggtggattgggttggggtaagtggggaaggtggtttatttagaagtagtagttgtgggattatatagtagggtaaggagtttggttgggagtgggggtagtgggggaattaggggggagggagtttagaggtggggttggggtagggggaggttagggttgaggtttagtaggattgtttggtaggaagtggtaggaggggtttggtggataaagtgtgtagaggtatttgatttgtggatttatgtttagttttttagatatgtttgtttttgttttatttttttttgaagtgttgtggtttttttttttgtttatagtgtttttgtagttgagtagttttttttaaagtgattttttagggttttgtgaattatggtttttttttatttttgtttaggtattggtgtgggaggttttggggtgttttatgtttttttggttttggttttttttttggttttttttgggttttttttattggtagaggaatttttgataaagataggttgttttgtttttatttgttttgggtaggatttaatggaattgtaaaaagaagagaaagagaaagagaaaggtattgtagtttgagtttgggatgtgggtttagatttagttgagagaggggtaggtgttttgttgtttggtggttgggtaggttggagttttttttttattattttttttttagttttaatgtgtgtttagagttttgagtagtattattttgttgagtgaggggaggttttgagattttagtggggaaggaagtgtggattttgtatagtataagtgaaggtttaggtgtgttttgagtttttagttgtgtgttgagtttattgtatgtatttttttttttaattttttagtttttagaaggtggggggtagtttagttttttagagatgtgggtggaggattatttaggtgttgaggtaagagattgaaggtataaattgttttagtataataaagaatatatttataataagaatagttataatataaattagatatagagatgattatggatattattaattattagtgtagatattattaattattagtttttaatattattttttattgtattattaatataattaagaaataattggtgggtatagggttaggtgttgaagggttgttgtgagaagtgattgagaatgtaagaggtgagttttttgttatatttgtataagggttattggagggttttttggttaggtggtaatgttagtgtttaggaaggtattgttatttagtggattatgaaagggagtttttttttttttggaggagttagggaatgtttagttttattagttttttgtgggaggttggatagtatttaggtttgtttgtagttatttggaggtttaaatttttttttgtgatgttgtgttttaatggttatgttttttgtttattttttttttgtatttttggtttttttttgaagtttttagaagatagtggtagaagaaatagtgaaagttttaaagtttttgatttttttgataggtgtatagaagaaaatgttgatgtatattgttttttttttttgttttggttatttataagggaagggttttttgttttatgattatgtgatttgtttgattttattaattatttggatgatttattttttttattttgttttttttgttttgtatgtaataaataatagtgtatgtaattatttggggttattatttatttttgtgttttgatggtagtggttttttgggtttagttgtttttgttttatttttttgttttgtgtttttattttttatgattttttatttttatatatggggagaatatttattaagttttatagggttagattttatattagggattgtgatgtttgtgatattaagtggtggaagt

SEQ ID NO: 2204 - DNA, 2267 bp, Artificial Sequence
  chemically treated genomic DNA (Homo sapiens)
ttttatttgttttttttaattatatttatttttttttttatttttgtttttttttatttttttttttttttttttttttttttttttttttttttttatttttgtttttatttttatggttttgttttttgatttttatggtattgttatttttgtttttttttttttgtttttttttttttttttttttttttttagtttttagttgggttgtgggtttttttttatttggggatttgttattttttgttggaggataggtaggtgggtaggtgttatgggtgattagagtttgattttttattttatagtttggtagatattaggttttatagtttgtggtataaaggggaagttggtttagtaggtttgggtagggagtgggggattggggttttgattttgtttggattattgtagatagtagtatttttttttgtgagattagtatatatagtagaaattttggttatagtagttttattttttaattttattttgattttttttttaataattttagttagggatgggtttttaaaagggtttttgttggttgttaatatggggtagggaaaaggggagattttgggaggtaggagattagagtttgaattttgatttagttattgtgtgttgtgtggtttttggtaggtttttatttttaggggggtttttgtgtttgtaattataaggtgggtatgtgtttttgttggatgttatatagaaaagaaggtgataatgagtatagaagtgttttgtaaaggtagatgtgggtttgatatggatagttttttttatggagtgtttattgtgtgttgaatttgtgttattttggttagtttttgggataatttgttttatttggtatttttattatgtttattttatagaagaggaaagtgaaggtatagagaggttagagttagtttaggttagttagttttgggtttgtgtgttttttttttttgttgtttagttttgattttggtttgaggttttttggtttgattttttttttgtaggttggggtgggaatgggagagttgtattgtgtttagttgggttggatattggagatttgggttttttttttttttttatattgggttttatttttttttgatttattgatagtgattttttttgttattttagttttttgtttttatttaggttatgttatttgatttggaggatagtgttggtggttagaaatatgattgtttgttttagagttttttgttttggtaagttttagatgtttattatattttgtttattattggttttagtatttagttgggtttggttaggtagagtttggtatattatgggtttttagttaataattggtgatttaatggtggttttaatggattggaatagaaggtagggtatggaggagatagggaaattaaggtaaggagagagaagtaaggaggtagatagaagtaatagataaagagagaggtggagatagagatatagagaggtataggggatatggatagtgaaggagtgagagatggagagatagaggttaagttggggtgattaagttttaggatggaggaatagatgttagaaattatagggtttaatttttttattttataaatggagaaattgaggtttaggtggaataaatgattttaatatagttatatggtgggaatttatagtatagttggggttagaaggagtttggggagttgtttagttaggttatttgtagttggttttttagttttaggtagggtatattgtgggggtatttggataggtttttgtttttttttttttggggttttaggttttttgtggagtttagttttgttttgaattttttttggtttggagttagttttgtttttgtttttttattatttagtatttttttgttttttagtttttttttggttttttattttgggttaagatttggtgggtggggtgtgggtaggaattgtaagatggggtagttattggaattggggttaagatgtttgtggtgagggtttatttattagtttaggttttaaagttaggttatttggggtagttttgtgttttttttaaagttttaggaatgggttgtttgttagagggtgggggtagagaagggggatggtttattatgttggtggttttattttgagtatttattattattattgtattttttattatattttttttttttttgttttgttttatggagttaatttattttttttttttttttttttttttttttttttttt

SEQ ID NO: 2205 - DNA, 2267 bp, Artificial Sequence
  chemically treated genomic DNA (Homo sapiens)
aaaaaaaaaaaagaaaagaaaaaaagaaaagaaaataaattggttttataagatagggtaaaaaagaaaaagatataatgaaggatataataataataataaatgtttagagtggagttattaatatggtgggttattttttttttttgtttttattttttggtagatagtttatttttggggttttagggggggtatggaattgttttagatgatttggttttgaagtttagattggtgggtgggtttttattataggtgttttggttttagttttagtggttattttattttgtagtttttgtttatattttatttattaagttttggtttaggatgaaaggttaaggagaggttaggaagtgagggggtgttgggtggtggagggatagaggtaaagttggttttaggttagggagagtttaagatagagttgggttttatggggagtttagaattttgaaaaagaagagataggagtttatttagatgtttttgtaatatattttgtttgggattggggagttgattgtaggtgatttagttgagtagttttttaggttttttttgattttagttgtattgtgagtttttgttatgtgattatgttgaagttatttgttttatttgggttttggtttttttatttgtgaaatgggaggattgggttttgtgatttttggtgtttgtttttttgttttgaggtttgattattttaatttgatttttgtttttttgttttttgtttttttattgtttatgttttttgtgtttttttgtgtttttgtttttatttttttttttgtttgttatttttatttgtttttttatttttttttttttgttttggtttttttattttttttgtattttattttttgttttgatttattggaattattattgagttattagttattgattgagaatttatgatgtgttaagttttatttagttaggtttagttaggtgttggggttagtggtgaataagatgtggtgggtatttggggtttgttagggtaggaggttttgggataggtagttatatttttggttattagtattgttttttaggttagataatgtggtttgggtagaggtggggaattggggtggtgagagggattattgttgataggttaggaaaggatggggtttaatgtggggaaaagaaaaagatttaggtttttgatatttaatttagttgagtatagtgtgatttttttatttttattttaatttataaagaggaagttaggttagggggttttaggttaaggttaaggttggatagtaggagaagaaagtatataggtttagagttggttggtttgggttggttttgatttttttgtgtttttattttttttttttgtgaaatgggtataatgaaagtattaaataaggtagattgttttggggattgattgagataatatgggtttggtatatagtaagtattttgtaaaaaaggttgtttatattaaatttatatttgtttttataaaatgtttttgtgtttattgttatttttttttttatatggtatttaatagggatatgtgtttattttataattgtagatatagaggtttttttaggggtagagatttattaaaagttatatagtgtgtagtggttgagttaggatttaaattttggttttttgttttttagggtttttttttttttttgttttatgttggtagttagtagggatttttttgggggtttatttttggttggggttgttgagaaaggagttagggtagggttggaaggtgaagttgttgtggttagggtttttgttgtgtgtgttggttttataaaggaaagtgttgttgtttgtagtgatttaggtgaggttagggttttagttttttattttttgtttaggtttgttgagttagttttttttttgtgttatagattatagggtttgatgtttgttagattataaaatggggggttggattttagttatttatagtatttgtttgtttgtttgttttttagtaggaagtagtaagtttttaggtaagagggaatttatagtttagttgagagttgaaggggaggggaagagaaaagggagatagagagagggaggtagagatagtagtgttatgagagttagagagtagggttatggagataaagatggaagtggagagaggaagaaagggagggagagggagaggggagagagtgagaaaagatagaaatagagagagaagtaaatataattaaaaaggatagatagag

SEQ ID NO: 2206 - DNA, 2408 bp, Artificial Sequence
  chemically treated genomic DNA (Homo sapiens)
attataggtgtttgtgttatttttggttaatttttgtgtttttagtagagatggggttttattatgttggttagtttggttttgaatttttgattttaggtgatttatttattttggttttttaaagtgttgagattataggtgtgagttattgtgtttagtttaaagttatgtgtttgatagagttgtattttatttttttaaaaggaaattggtgtggttattttataggttatgagtaggatttaggtgttttttaggttatatggatggtaagaaagaagtagggttggattttattttagatgatttggtttttagttatgttgtttttttatgtttgttatatttattttatatataagtatgtatgtatgagggattttttaggttttttatatgttaatttagagggtagggttttgggataagaggtatatagtaaattgtataagttttggatatttggtaagtgtgttatagtttgtaaagtatgtttgtaattaatagtttttttatgttgtttatagtgttatttggatttatttttaggttttgtggatttagtaggttttggtttagttttttttttttgttttatttttttttaggttttttgagttttaggttaattgggttattagtttttttttgtatatgtgttttaagtttttatttttgaatttttttttagaatgtttttttttttattttattttgtatatattttttttattttttagagtttagtttaaatgttttttttaatggtaagtttatttggattgttttaattggaagagaaaggggaaagagagaaggaaaggaataggtattttttgaatgtttattttgtattaggtatgttatgtaattttataataattttgtgatatggtttgtttttgttttattttataggtagaaattgaggggaaatgatttgttggagtttatatagttaggaaggatgtttttggattttttatttagtgtttatttttttgttttagttaggaattttgtggggttgatgagggttaatattttatttttttttttttttgtggttgatttttgggggtggtgatttggttttttttttttttgttaaagttagagttgttgatggtttgttattggttttttagttagggttggtttttgtttttgtggtttagttgttgagttggggttttgttttttaggggttttttttttttttttgtttataagagtttgattttggttggttttagatttgatatgttttttgggtttattttggtaagttttaggtttggaggaggggtgggattagagttttgagtgagtattttgggaggtgaggaatttaggtttttagttttagggatgttattgtgttattttgaatgttatttttattttaattaaggatgagttttaattattaagattagtatttgttttttttatttaaaaataaattatttttgtagttttattgtttaaatttttattattagagttatttttttgagttaggtgttgtttttggaagggtttttttatgttgagtattttagtatttgttggggtgatgtatttatttattagtagttataaaaatttttttataataagtagataagagaatatagagtggggtttagagttaatgagatttagtaagggtgagttttgagatggggataggatggaagatggtattggtgatagatggaaaggataggagagggataggttaaagttatgtattgtttttagtttagttatttttggattttttatgtggattttgattaggtttaagttagttatttgtataaagaggagagtagagggttagggtggaagattataatgttttttttttttgtaggaaggggttataatgattttgtaatgtataaagttagtgggattttggaaggtaggaagaggtatggggagggggtgtttagggggtatggggagggtttaggtttttatgaattttaggaggggggtattataaatgtttattttatagaggtgtaattaaggtttagagttgagaagggatttgtatgttatatatagggaggttgaatgtgaatttgggttttttggtttttaaagttgatttgttatattttttggtagaggttgtagtttttgggtatgatttttttgattatttttgtgtgtgtttgtttgttttataaagtttttggatttattattagtttttaaaagtttggaagaattatataaaagtttagatttagtgattgttttgagaaattggaaggtttggtttgtatttttatttggtaattattggtggtattgggaagaggttatttatttatttggtatttgtgttgtttagtgttttatatttattattgtttttgtttttt

SEQ ID NO: 2207 - DNA, 2408 bp, Artificial Sequence
  chemically treated genomic DNA (Homo sapiens)
ggaaggtaagagtagtgataaatgtgagatattagatagtataggtgttaggtaaatgggtggtttttttttagtgttattaatggttgttaagtgggaatgtaggttagattttttaattttttaagataattattagatttggatttttatgtggtttttttaggtttttaaaggttgatgataaatttaaaagttttataaaataaataaatatatatagagatggttaaagaaattatgtttaaagattgtaatttttgttaaagagtgtaataggttaattttgggaattagaagatttaaatttatatttaatttttttgtatgtgatatataagtttttttttaattttgagttttgattgtatttttgtgaaataggtatttataatgttttttttttaggatttatggggatttgaattttttttatattttttgaatattttttttttatgtttttttttattttttagggttttgttgattttgtgtattgtagggttattgtggtttttttttgtagaagagaagaatattataattttttattttgattttttgtttttttttttatgtagatggttggtttggatttggttaggatttatatagggagtttaggagtgattgggttaggggtaatgtatggttttggtttgttttttttttgttttttttatttgttattaatgttattttttattttatttttattttaaaatttatttttgttgggttttattgattttgagttttattttgtatttttttatttgtttgttatgggaaaatttttgtggttgttggtgggtgggtgtattattttagtgagtgttgaaatgtttagtataagagagtttttttaaagatagtatttagtttaaagaggtagttttgatggtggaaatttaggtaatagggttataggaataatttgtttttaaatgagggaagtaggtgttggttttgatggttggggtttatttttggttaggatgaggatggtatttaggatgatatagtgatatttttaggattggggatttgggttttttgttttttagaatgtttatttagaattttgattttattttttttttaaatttgggatttattgagataggtttagggaatatgttagatttgagattagttgaggttgggtttttataggtagggagggaagaggggtttttgggagataaagttttgatttagtaattgggttatagaaataaaagttagttttggttgaagagttaatggtaagttgttagtagttttggttttagtagggagggaaaggattagattattatttttagggattagttatgaagaaggagagaggtggaatattggtttttattagttttataaggtttttgattagagtaggagaatgagtattagatgaggagtttagaagtattttttttagttatgtgagttttagtgagttatttttttttaatttttgtttataaaatggggtagaaataaattatattatagagttgttgtgaggttatataatatgtttggtatagagtaaatatttaggaaatgtttatttttttttttttttttttttttttttttttttagttgaagtaatttagataggtttgttgttagaggaggtatttgaattagattttgaaggatgaggaagatatgtatagagtgagatggaaggagaggtattttaagaaaaagtttagaggtgggaatttggggtatatgtataagaaagagttggtagtttaattggtttggagtttaggggatttgaagggaagtgaggtaggagaagagggttaggttagggtttgttgggtttataaagtttgaagatgaatttggatggtattgtgggtagtatagaggagttgttagttgtaaatatgttttgtaaattgtggtatatttgttaaatatttaggatttgtataatttgttgtgtgttttttgttttgaaattttgttttttgaattggtgtatgagggatttaagaggttttttatatatatatatttgtgtgtaaaatgggtgtaataagtataggaaaatagtatgattggaaattagattatttgagatgaaatttagttttgttttttttttattatttgtgtgatttggaggatatttgagttttgtttatgatttgtaaagtggttatattagtttttttttaagagggtgaaatgtagttttattaaatgtatgattttaggttgggtgtaatggtttatgtttgtaattttagtattttgggaggttgaggtgggtggattatttgaggttaggagtttaagattaggttggttaatatggtgaaattttgtttttattaaaaatataaaaattagttgggagtagtgtgggtgtttgtaat

SEQ ID NO: 2208 - DNA, 2432 bp, Artificial Sequence
  chemically treated genomic DNA (Homo sapiens)
ttggtttagtatttgagtgtttatttataggatatttatttgtagaggtgttttgagtgttattgtgggttaagggatttttttttttttggagatagtttttgagaagttgaaggttttgggggttttttattaaatgtttttgggaggtgggaaaatattaaatgtgggtgtggtttttttggaatagttttgtgtggggatttaggagttaagttttttagtatatgtttttaatatttttagtaggggttatttttttggagttatgggtggttgttaatattttgtggtttttagtaggtattatttaggtaagagagagaataggttggggaataatgggttggtttggttgtaagtgttggggtagattatagattggatggtttaagtttatgttttggggttatttttgattttttgtaagtgtggtaagggttttttttggatattttgagaagttgtagttgggagaggattatttgtttgtttggatgtttagtttaggtgttagggtttaaatgattagttttaggttgtagtttttattatttgttttggttgtaggggtttttagaagttattaagggtttggtttggttttgtttatttgtatttgagttttagtttttttatttgtttaagaagggaggtgaatattgattaaattatgtaaatttttagtggtaggattaggtgtggttgggatagttaaggttttttagggtggtggtatttttggagtttggggatgggttttgttttttttttgggttttttgttgggtttgggtattttttttttttttttttttttttttttttagaggggatttttgtagagttgtttttgttttagggtttagtttgtgtttgatttaaatagtttttgtttttttttgaggatgagttgggtgtattttttttttgtaggaagatgagggttagagatggaggtttatgttagggttatagagtttggaattttttttggagttaaaatagttttgttttatttattttgtgtattttattttttgttttagttttgttgggtttgttttgtatgtaaggtggggttgggatttagggtttgagttttgttttttggatatttggtttattgtttgttaaaggttttgtggttggaggttttggtttttttatttttttatagggttttagggttgatttaggtttgtgggttaggaatgtgttaatggggtaatttgggttttgttggtttatgtaggtatttgtggattttgagaggggattgggtggggaggggtggggaggggtggggtggggtggtgttgtagagtgtagggtgggtggggttaggttagtagggagtgagtttgtttggttgttttgttttggagttattgtattgttggttgtagatataggttgtattatgaagttagtttttttgttttgggttttgttgttgttggtgatagtttttggtttgggttttggatttatagtaggtatgtttttttgtttttttgtgtttttgtttgtttgtttatttgtttgtagttaggtttgggttgatatttttttgggtttagtttttgtttatttgttaggttatttgtggttgtgttaggggtgatgggaagaaattttgagggtttatgtggaggggtagtttatggggatgggaggtttgagttgggtttattttaaatttgttggtagttaggagggaggtgggggagattagtagaggtttttgtttgtgtttttagttttgatagggtgggattatggagggggagttaggattgtgggtttttattagggtggggttgaatttaggaaagtttagggaaagttttgaattttagaattaggatattggttttaggttgttttttgttttttattttattttttattgatttttttgttatttattttatttgtaagtattttttggtttttttttttgatttttgtgtgttattaaatttttggttagtatatatttattgttgtttttaagtgttaggtattgtatttggtgaagtggggttagtggggtggtttaggtttaggtttggtttttgattggttttttttgatgggggatggggaagggttagggaagtgtaattttagtttgggtgtatgtatttgttttagtttttttttgtaattttttttttatgttagtttttggaaatatggttttgtttattggttttatggtttataggagaagttttgggtttggtgtttatagttttttgtggtgtgtatttttatttttttttttttattgttgggatttttgtttgaaatgttttttttttttttagaaaggaggggagtggttttggttttttgttttgagtatggagttttttttggggttttaattgtagtttttgggagagtgagaagtgttatgtttag

SEQ ID NO: 2209 - DNA, 2432 bp, Artificial Sequence
  chemically treated genomic DNA (Homo sapiens)
ttgaatgtgatattttttgtttttttaggggttgtaattgagattttaaagagagttttgtgtttagggtagaaggttagggttgttttttttttttttggggagaggagggatattttaagtaggggttttagtagtggggaaagggaagtgggggtgtatattataaggggttgtgggtgttgggtttaaaattttttttatgggttataagattggtgggtaaggttatatttttaggggttggtatgaaggaagggttgtagggagggattggggtaggtgtatgtatttaggttggaattgtatttttttggtttttttttattttttattaaaagaggttagttgagggttaggtttgggtttgagttattttgttggttttattttattaagtgtagtgtttggtatttaaaagtaataataaatatgtattggttaaggatttggtggtgtataggggttgggggaggaggttgagagatgtttgtaagtgagataagtggtaagagggttgatgggaaatggggtgggggatggggggtagtttgggattagtgttttggttttggagtttggggttttttttagatttttttggatttagttttattttgatgaggatttataattttggttttttttttgtgattttgttttgttagggttggggatataggtggaggtttttgttggttttttttgttttttttttagttattagtaggtttagggtgggtttggtttagattttttatttttatgggttgtttttttatatggatttttagaatttttttttattatttttagtatagttatagatggtttgatagatggatagaggttgagtttagagggatgttagtttaggtttggttgtagatagatggatagatagatggggatatagaagggtagggaggtatatttgttgtgggtttggggtttgggttgagggttgttgttagtagtagtagggtttagggtaggagggttggttttatggtgtagtttgtgtttgtagttagtagtgtagtggttttgaggtgaggtggttagataagtttattttttgttggtttggttttgtttgttttgtattttgtggtattgttttgttttgtttttttttgtttttttttatttagtttttttttaaagtttataggtgtttgtgtggattagtaaggtttaagttgttttgttagtatatttttggtttgtaggtttggattggttttgggattttgtgggagggtgaggaggttggagtttttagttataggatttttggtaggtgatgagttggatgtttagagggtgaagtttagattttgggttttagttttgttttgtatgtagggtgagtttggtggggttgaagtagaggatgggatgtgtagggtgaataaggtagggttgttttagttttagggaggattttagattttgtggttttgatatagatttttatttttagtttttatttttttgtaggaaggaggtgtatttaatttatttttagggggaggtaggagttgtttgggttagatataggttgagttttggggtggaggtagttttgtaggggttttttttggagggaggaaggaggaaggggagagaaggtatttaagtttagtggggggtttggaagggagatagggtttatttttgggttttagagatgttattattttggggagttttggttgttttagttatatttaattttgttgttaagagtttgtataatttaattagtatttatttttttttttgagtagatgaggaaattgaagtttagatgtggataggtaaggttgagttaggtttttggtggtttttgggagtttttgtagttagggtgggtggtaagggttgtggtttgggattggttatttggattttgatatttgggttggatatttagataggtgggtggtttttttttagttgtagttttttaaggtgtttaaaagggatttttgttatatttgtagggagttagaggtggttttagggtatgagtttaggttatttggtttgtgatttgttttagtgtttgtggttaggttagtttattgttttttggtttgtttttttttttgtttgggtggtgtttgttgggaattatagggtgttggtagttatttgtggttttagagaggtggtttttattgaaagtgttagaggtgtgtgttgggggatttggtttttgagtttttatatagagttgttttagggaagttatatttgtatttgatgtttttttattttttaaagatatttggtgagaggtttttaagatttttagttttttagggattgtttttagaggggagaaagttttttaatttataatggtgtttagggtatttttgtaggtgagtgttttgtaagtggatgtttaggtgttgagttag

SEQ ID NO: 2210 - DNA, 2359 bp, Artificial Sequence
  chemically treated genomic DNA (Homo sapiens)
aggatggatattttggatttttttttgtatttagtgttgtagggagtaattttagttttgggtttgggatgaatgtttttgttagtttggggttaggagataggttttttttggtttagtatttgagtgtttatttataggatatttatttgtagaggtgttttgagtgttattgtgggttaagggatttttttttttttggagatagtttttgagaagttgaaggttttgggggttttttattaaatgtttttgggaggtgggaaaatattaaatgtgggtgtggtttttttggaatagttttgtgtggggatttaggagttaagttttttagtatatgtttttaatatttttagtaggggttatttttttggagttatgggtggttgttaatattttgtggtttttagtaggtattatttaggtaagagagagaataggttggggaataatgggttggtttggttgtaagtgttggggtagattatagattggatggtttaagtttatgttttggggttatttttgattttttgtaagtgtggtaagggttttttttggatattttgagaagttgtagttgggagaggattatttgtttgtttggatgtttagtttaggtgttagggtttaaatgattagttttaggttgtagtttttattatttgttttggttgtaggggtttttagaagttattaagggtttggtttggttttgtttatttgtatttgagttttagtttttttatttgtttaagaagggaggtgaatattgattaaattatgtaaatttttagtggtaggattaggtgtggttgggatagttaaggttttttagggtggtggtatttttggagtttggggatgggttttgttttttttttgggttttttgttgggtttgggtattttttttttttttttttttttttttttttagaggggatttttgtagagttgtttttgttttagggtttagtttgtgtttgatttaaatagtttttgtttttttttgaggatgagttgggtgtattttttttttgtaggaagatgagggttagagatggaggtttatgttagggttatagagtttggaattttttttggagttaaaatagttttgttttatttattttgtgtattttattttttgttttagttttgttgggtttgttttgtatgtaaggtggggttgggatttagggtttgagttttgttttttggatatttggtttattgtttgttaaaggttttgtggttggaggttttggtttttttatttttttatagggttttagggttgatttaggtttgtgggttaggaatgtgttaatggggtaatttgggttttgttggtttatgtaggtatttgtggattttgagaggggattgggtggggaggggtggggaggggtggggtggggtggtgttgtagagtgtagggtgggtggggttaggttagtagggagtgagtttgtttggttgttttgttttggagttattgtattgttggttgtagatataggttgtattatgaagttagtttttttgttttgggttttgttgttgttggtgatagtttttggtttgggttttggatttatagtaggtatgtttttttgtttttttgtgtttttgtttgtttgtttatttgtttgtagttaggtttgggttgatatttttttgggtttagtttttgtttatttgttaggttatttgtggttgtgttaggggtgatgggaagaaattttgagggtttatgtggaggggtagtttatggggatgggaggtttgagttgggtttattttaaatttgttggtagttaggagggaggtgggggagattagtagaggtttttgtttgtgtttttagttttgatagggtgggattatggagggggagttaggattgtgggtttttattagggtggggttgaatttaggaaagtttagggaaagttttgaattttagaattaggatattggttttaggttgttttttgttttttattttattttttattgatttttttgttatttattttatttgtaagtattttttggtttttttttttgatttttgtgtgttattaaatttttggttagtatatatttattgttgtttttaagtgttaggtattgtatttggtgaagtggggttagtggggtggtttaggtttaggtttggtttttgattggttttttttgatgggggatggggaagggttagggaagtgtaattttagtttgggtgtatgtatttgttttagtttttttttgtaattttttttttatgttagtttttggaaatatggttttgtttattggttttatggtttataggagaagttttgggtttg

SEQ ID NO: 2211 - DNA, 2359 bp, Artificial Sequence
  chemically treated genomic DNA (Homo sapiens)
tgggtttaaaattttttttatgggttataagattggtgggtaaggttatatttttaggggttggtatgaaggaagggttgtagggagggattggggtaggtgtatgtatttaggttggaattgtatttttttggtttttttttattttttattaaaagaggttagttgagggttaggtttgggtttgagttattttgttggttttattttattaagtgtagtgtttggtatttaaaagtaataataaatatgtattggttaaggatttggtggtgtataggggttgggggaggaggttgagagatgtttgtaagtgagataagtggtaagagggttgatgggaaatggggtgggggatggggggtagtttgggattagtgttttggttttggagtttggggttttttttagatttttttggatttagttttattttgatgaggatttataattttggttttttttttgtgattttgttttgttagggttggggatataggtggaggtttttgttggttttttttgttttttttttagttattagtaggtttagggtgggtttggtttagattttttatttttatgggttgtttttttatatggatttttagaatttttttttattatttttagtatagttatagatggtttgatagatggatagaggttgagtttagagggatgttagtttaggtttggttgtagatagatggatagatagatggggatatagaagggtagggaggtatatttgttgtgggtttggggtttgggttgagggttgttgttagtagtagtagggtttagggtaggagggttggttttatggtgtagtttgtgtttgtagttagtagtgtagtggttttgaggtgaggtggttagataagtttattttttgttggtttggttttgtttgttttgtattttgtggtattgttttgttttgtttttttttgtttttttttatttagtttttttttaaagtttataggtgtttgtgtggattagtaaggtttaagttgttttgttagtatatttttggtttgtaggtttggattggttttgggattttgtgggagggtgaggaggttggagtttttagttataggatttttggtaggtgatgagttggatgtttagagggtgaagtttagattttgggttttagttttgttttgtatgtagggtgagtttggtggggttgaagtagaggatgggatgtgtagggtgaataaggtagggttgttttagttttagggaggattttagattttgtggttttgatatagatttttatttttagtttttatttttttgtaggaaggaggtgtatttaatttatttttagggggaggtaggagttgtttgggttagatataggttgagttttggggtggaggtagttttgtaggggttttttttggagggaggaaggaggaaggggagagaaggtatttaagtttagtggggggtttggaagggagatagggtttatttttgggttttagagatgttattattttggggagttttggttgttttagttatatttaattttgttgttaagagtttgtataatttaattagtatttatttttttttttgagtagatgaggaaattgaagtttagatgtggataggtaaggttgagttaggtttttggtggtttttgggagtttttgtagttagggtgggtggtaagggttgtggtttgggattggttatttggattttgatatttgggttggatatttagataggtgggtggtttttttttagttgtagttttttaaggtgtttaaaagggatttttgttatatttgtagggagttagaggtggttttagggtatgagtttaggttatttggtttgtgatttgttttagtgtttgtggttaggttagtttattgttttttggtttgtttttttttttgtttgggtggtgtttgttgggaattatagggtgttggtagttatttgtggttttagagaggtggtttttattgaaagtgttagaggtgtgtgttgggggatttggtttttgagtttttatatagagttgttttagggaagttatatttgtatttgatgtttttttattttttaaagatatttggtgagaggtttttaagatttttagttttttagggattgtttttagaggggagaaagttttttaatttataatggtgtttagggtatttttgtaggtgagtgttttgtaagtggatgtttaggtgttgagttagggagagtttgttttttggttttaggttggtgagggtatttattttaggtttagggttgaagttgttttttatagtattgggtgtaggggagggtttgaggtgtttgtttt

SEQ ID NO: 2212 - DNA, 2436 bp, Artificial Sequence
  chemically treated genomic DNA (Homo sapiens)
tattgggtgggtattattaaaggattatttttaaataaaggtaaaattatgatttttgtgtaattatagaatgaatatttattagagattttatttaaagtattaattaatgatagaataaggaaaatggtataattggtttaaaggagaatttaagtattatatatagatatgtaggtaaatataaatgttggtatttatttataagtagatatgaaattggttaataatttgaggataataattaattgtattttattggatataatttatttgtatttttatggtattaagtatttgtattattattggttttttttttaagttttgagagttaggaaatagtttaaagatgatgaaaggtatagatattttggagagttatgttagatagaatatttagtaatttttatagattttttggtttatattaatattttttataattttttttgatagtatagtgtagttattattattttagagaagaagtgaggggttatgttgtgttttttggatttttgttttttaatttgtaaaatgggtatgataagagtttttgataatttagagatatgaggttttgttgggataagtattgtgggaaatgtgaagtgttaagggatagtgttttaaattttagtgtggtttttttttttgatttagtttatatttttgttttattttggaagatttatttttttttttttatattaattttgatttgataatatttttgaaattagagaatgaggtgttgattttgtatgttttttttttttaatatatatgaatatagataaaaagttattgagataagaaaggtaagtttatttttgtattaattaatttagtgttttgtgggaagtataggattaggaagaaattaaatgatagtttataaatatatatatatatatatatatatatatatatatattttattaattattattattattattgttgttattattaatgtattttgtaaatttatatataatttgtaaatttttttttgaaataagagagagagggtaattgaaattatttaaggtagtatttggaatatgtaggttaaagattgagttagggagggattgttattatatgggttgtggggaggtagagtttttttgtgtttttgagagtatttttttttggggttttattagtttttaatttgttttttgaatttttatttttttttttgttttgtgtttttggaaatttagatagtggttttatttttgtgatttatttagtaggaatgtgggagtttttgaattgttttagttaaagttttttaatttttttttggtgatgaatgggtgaggtttttaaatgaaatgtggaggtttttagttttagtttgtggttttttttttttttggtgtaattatttttgtgtagaatatgttaagtgttttgttttttgggaatttgttttgtatgtaaatatttggtgattaagtgaggtttatttaattaagtattttgtaatgatttttaaattaaagaatagtggattaggagtttagtttgtgttggtgatgggaaaggtagttttatattataaggaggtagatagtgatttggtgtggggaggtggttgggttaagtggggtagagtaggtgttttgggaattttgttagaattatttatttatttatttaattaatttatttttggagtattttttggagttagagtagttggtgaataataataataataataatagggttaggtattgtgttaataagtttgttgaataataagagtgaggaggagttagagatagttattgagagttgattttattaggtatgaattgttagtagtagtgatggtaataataagtatttttattgtagtagtaaatttttgaataggattttgttgtggttttgtgtgttttgaaattgttgggtttttgttatggatttggtttttggaaatagtttttatttttgttgttgttttattgatttattggttttttatttattagtggtttattttttatatttgtgtaatgggtagttggatttagattttttttaagatgtttttgggttttaggagtttagggtgttttttttgtttttgggggttataggaatggtggtgttattttgggggttttagttgtaatattgtagaaggttttagagtttagttttatatagttttaggatagagtaagggtgatttttagtttagatttttataaattgtgggatttttattaggtagtttgttttttttgatggataagttttttattttttaattgaaataatttttttatttgtttttagggtttttgtaagggaattatatagatttatggatatagatgttttttgaaaattatttatttggtggtagaagttattatgttttaaatttggatttatgaatatatttta

SEQ ID NO: 2213 - DNA, 2436 bp, Artificial Sequence
  chemically treated genomic DNA (Homo sapiens)
tggggtgtgtttgtgggtttaagtttgagatatgatggtttttgttattaggtagatggtttttaaagggtatttatgtttatgagtttgtgtgatttttttataggagttttggaagtagatggaagggttattttaattgagaggtgaaggatttgtttgttagagaggataagttatttggtgaaggttttataatttatgaaggtttgagttgagagttatttttgttttgttttggagttgtgtagggttgggttttgaagttttttgtaatattgtagttgaggtttttaaagtggtgttattatttttgtggtttttagaagtagaggagatattttaggtttttaagatttaaaagtattttagagaagatttagatttaattatttattatatagatgtgggaagtgagttattggtgggtgagaagttagtgagttagtaagatagtaataaagatgggggttgtttttaaaggttaagtttatggtagaaatttagtagttttagggtatgtagggttatagtaaaattttatttaaggatttgttgttgtaatgaaaatgtttattattgttgttattattattagtagtttatgtttagtagagttagtttttaataattatttttggtttttttttatttttgttatttagtagatttattagtatagtgtttggttttattattattattattattgtttattagttattttggttttaagaagtgttttaaaaataaattgattgaatgaatgaatgagtgattttagtagagtttttagagtgtttattttgttttgtttggtttggttgtttttttatattagattattgtttgtttttttgtgatatgaagttgttttttttattattagtatgaattggatttttaatttattgttttttggtttaagagttattataaagtgtttaattaagtaagttttgtttaattattaaatgtttgtatgtgaaataagtttttgggaagtagggtatttgatatgttttgtatagaaataattatgttgaggagggggagggttgtgggttgggattgggagtttttatattttatttgagggttttatttatttattattgaaggggaattaaaaggttttagttggagtaatttgagaatttttatatttttgttggatgaattatgggagtggggttgttgtttgggtttttaaaggtgtagagtaaggggagaggtgggaatttgagaggtgagttgggggttggtggggttttggggaggggtgtttttggggatataggggagttttgtttttttatagtttatgtgataataatttttttttggtttagtttttggtttgtgtgttttaagtgttgttttagatagttttaattgtttttttttttttattttaggaggaggtttgtaaattgtatatgaatttgtagaatatattggtggtggtggtggtggtggtggtggtggttagtggagtgtgtgtgtgtgtgtgtgtgtgtgtgtgtgtgtgtttgtaggttattatttaatttttttttaattttgtattttttatagagtattggattagttggtataagaatgaatttattttttttattttaatggttttttgtttatatttatatgtattagaaaaaaaaaatatatagaattagtattttattttttgattttaagggtattattaaattaaagttggtataaaggaaaaaaaataaattttttaaggtagaataaggatgtgaattaaattaggaaggagggttatattgaggtttgggatattgttttttagtattttatgttttttatggtatttgttttagtaggattttatgtttttggattgttaaaggtttttattatgtttattttgtagattaagaaatagaggtttaggaaatataatatagttttttattttttttttgggatggtggtggttgtattgtattgttagaaaaaattataaaagatgttgatatgggttaaaaaatttataaagattgttgaatgttttgtttagtataattttttaggatatttatgttttttattatttttgagttattttttaatttttgaagtttaagaaaaaaattaatagtaatataaatgtttggtgttatagaaatgtaaatgaattgtgtttagtggaatgtaattgattattatttttaagttattgattgattttgtatttatttgtaaatgaatgttagtatttgtgtttgtttgtatgtttatgtgtggtgtttaaatttttttttgaattagttgtgttattttttttgttttgttattaattaatgttttaaataaaatttttgatgggtgtttattttgtaattgtatgagagttgtgattttgtttttatttaaaaatgattttttaatggtatttatttaata

SEQ ID NO: 2214 - DNA, 2391 bp, Artificial Sequence
  chemically treated genomic DNA (Homo sapiens)
ttatttttggtatttttagggttgtttatgttgtatttttgttttgtttgtttttattatgagtagttgtattgttgagggttatttgggggaataagttggttggtggttaggtattttttatttgagaatatggtggtttaaaatttaattatgatgtttatgtttttatgtagttgtttttttttttgagtaggaaattttgggggatagttttaaataattataagaggataatggttgagtgtttggagttagggattagaggttagttatataaagtagtgagaaggtgatgtagataattttttaatgataaaaggttagtttaaagttagttattagtaaggatgatttggtttatttttatgggaaggtgtggtggtttgggagtttttttatgttttttttttttattgtttatagtagtttttatagttttttattgaagttgtatttgtggtagattagggtaaggaagttgtatttatataatagtatagtttatgggtgtagagttttaggtagtgggtgtttgtaattttttgtgtaataagtttttatattaatagggaaattaaatggatgtatttaattttttaaattagttgaattgagggaaaatttgtttatattttgttgggaggttagttttaagtatatgggatatatgtatagggttgaaaggtatttaaatttatagggttagggatattgaaggaggaggttggtgagtataattgggtaattgtgtatttttgtgagtgattttttgggggtttggggtgatggagtatttggaggggttgggttgtttttggatgttgtatagtatattttgggggagtatttgaagtagttaaaggtagtggagtagatttttttgtgaagtatattgtggatggttgtatttggaattatattggtatgtaggagggatagttttagggttagtagtttgtgagggagttttggatttggttagagtaggagtttggtttggggttaagtttattttatggatttttttttttgtttttttaggagtagtttattgaaatgtgttttttgtttatagaagtattgtgatatatagatgttttatgatatattgtatatattaggggttttgtgttttttaggaagagggtttttatttgaagtggggtttgatggttgttatgtgttggtttatgttttttttggttttgttgatgtttagggatatggagtgttgtagtaggttggagaagatttttatttggttagagttgtagtatttggtgattttaaattgttgtattaggaattgagtgaaaagaggaagatgttgtggtggtggggttgagttgggttaattttggggttggtagagatagttgaggaggggttttgggttgattggttgagtttgttgaaggttttgggtttggttatttttattttaggaatagttttggttttttaggtggagtattttatagtttttgtgggggaataggtatgtatgttgatttagatgtagtggggggttattttggggggatagggtttgggttgatttgtttttgaggtagttagggggtttgttttttttattttagtagaaaataggttaaatttttgttttattgttatgtgttagtttttgttattttttgtatgaattataggtatagaaggaatgttagtttttttgtgaaatataaaaaggggttattgttaagttttttttaattaaaaaaaggaatatgtgtttattgaataagatttagaaattaagaaaagtatgaagaaaaaattgaagattgtttatagttttatattttagggttatttgtgttagtgtttggtgtattttttttagttttttgaggttgtattttgtttaatttggtttattgtgtggatattgtaggtgtgaggtggtagtatttgggatgtatttgatgttttgataggtattgggtaggtgatttttttttataattttgataattttttgtggttgtgagtgggaagatttttttgtgggttgttgagttggtaagggtagaagagggttttggatttagggtttggttttttttttttattttatatagattttatttgatatttttattttgttaattagattaggaaggtttatggagttgaggtgagtttgtagttattatggttaggtttgggagtttagggttaggttgtttttatggtttagttatgtttagttaggtttttattttgtgggggggtatgaggggtgtttagagggagtagtatggtgtttgggagatatttgggtgttgtagagagtaagaggtgtagtttatatatggaaagtttttatgatttttgggtgtttttataaggagattaataaatagt

SEQ ID NO: 2215 - DNA, 2391 bp, Artificial Sequence
  chemically treated genomic DNA (Homo sapiens)
gttgtttgttggtttttttgtaaaaatatttagaaattatgggggttttttatgtgtgagttgtattttttattttttgtagtatttaggtgttttttgggtattatgttgttttttttgggtattttttatgtttttttatggaatggggatttggttgagtatgattgggttatgggagtagtttgattttgggtttttaggtttggttatggtggttgtaggtttgttttggttttatgggtttttttaatttggttagtgggatgaaggtattgggtagggtttgtgtggggtggagaggaggagttaggttttggatttagaatttttttttgtttttgttagtttagtagtttatagaggggtttttttgtttatagttatagagggttattagggttatagagaagagttatttatttagtgtttgttagggtattaggtatattttgggtgttgttattttatatttgtaatgtttatatggtgaattgggttgaatagaatgtagttttgagaggttggagaaaatatattaagtattgatatagatgattttgggatgtgggattataggtgatttttaattttttttttatattttttttggtttttaaattttatttagtgagtatgtgtttttttttttaattagagaaaatttgatagtagtttttttttgtgttttatagaggagttaatattttttttgtatttgtagtttatgtgggagatggtaggggttggtatatgatagtggagtagaaatttggtttgttttttgttgagataaaggaagtagattttttggttgttttggaagtaagttaatttaaattttgtttttttgaagtgattttttattatatttggattgatgtatgtgtttgtttttttatgaaggttgtggggtgttttatttggggggttaggattgtttttggggtgggggtagttgagtttaaggtttttggtaagtttggttagttagtttagaatttttttttagttgtttttgttggttttagggttagtttggtttagttttattattatagtgtttttttttttttgtttagtttttggtgtagtggtttgagattgttaagtattgtagttttgattaagtggagattttttttagtttgttgtagtgttttatgtttttgaatattggtagggttaaggggagtatgaattggtatgtggtggttattgggttttgttttaagtgagggttttttttttggggagtatagggtttttggtgtgtatagtgtgttatggggtgtttgtgtattatggtatttttgtagatggggaatatattttagtgagttgtttttggaagggtagggaagagagtttataaggtgaatttggttttaggttaggtttttgttttgattgggtttggggtttttttataggttgttgattttggggttgttttttttgtatgttgatgtggttttaaatgtaattatttgtaatgtgttttgtgagaagatttattttattgtttttgattattttaggtatttttttaagatgtgttgtgtagtatttagggatggtttagtttttttaagtgttttattgttttagatttttaggaagttatttataggaatatatagttgtttagttgtgtttattaatttttttttttagtatttttggttttgtggatttaaatattttttagttttgtgtatgtgttttgtgtatttagagttagttttttagtgagatgtaggtaaatttttttttagtttaattgatttaggagattaagtgtgtttatttaatttttttgttaatgtgaaggtttattgtatgaagaattgtaaatatttattgtttggggttttgtatttataggttgtgttgttgtgtgagtgtagtttttttgttttgatttgttataagtgtagttttagtggaaagttgtaggggttgttgtgggtagtgagggaggagggtataagagggtttttgagttattatatttttttatgggaatgggttagattatttttgttaatgattggttttgggttgattttttgttattaagaaattgtttgtattatttttttattgttttgtgtgattggtttttagtttttgattttagatatttagttgttgtttttttatggttgtttgaagttgttttttaaagttttttatttaaggagagaagtggttgtgtgaagatataagtattatgattaaattttggattgttatgtttttagataagaagtatttgattgttagttagtttgtttttttaggtaatttttaatagtgtagttgtttatggtggaggtaggtaggataggggtgtaatgtgggtagttttgagggtgttagaggtag

SEQ ID NO: 2216 - DNA, 2258 bp, Artificial Sequence
  chemically treated genomic DNA (Homo sapiens)
ggttgaagtgtaatgatatgattatagtttattgtaattttgaatttttgggtttaagtgatttttttgatttagttttttaaagtgttaggattataggtatgagttattgtatttggtatgtggatatttttgatttattttaattagggaaggtatttaataaatgttaatttttttttttttttttttaattatttgattttagtattttaggaaatgaggattgggatattggatggtttgggagaggaggaaagaggtgtttagggaaaaggaagaaattgggaaatagaagattatggataaataaaagaggaggggttaatttagaatagggaagatgggttaggtgtaggggtttatatttgtaattttagtattttgggaagttgagataggtggattatgaggttaggagtttgagattagttttgttaatatggtgaaattttgtttttattaaaaatataaaaattatttgggtgtggtggtatttaattgtagttttagttgtttaggaggttgaggtagaagaattgtttgaatttgggaggtggaggttgtagtgagttgagattgtgttattgtattttagtttgggtaatagagtaagattttattttaaaaataaaaaaaaagaaaagaaaagaatagagaagatgattttaattattagagttttttaataaaggtaggttttggttgtttgggggaggttgagagttttttgttattagaggtatgtaagtagaggttgagggattgtgagttatatagatgtgtttgtgaggatttgtaatggttaggaggtagatttttttatttagtaaattttgggagagggttgtttttgtttggttttgtaatggggtagggaagttaaggtgaataggatattatttttggttttagggagtgtttagtttaggaaataagtaaattgttgagatttttttattttgtagttttgtgttttgaagtatttaagttttggagggagttggttggggatttttagtgtgtgttttttggtattgatttattgaagttggagttggttggggaatggtaggaggatgttgtagtgttattagtgtggaggatatgttgtaatttgttagtgttattttggttgtagttggttaggaattattttgttgttaatgtttttttttttagtagttatggagtatataatttgtatagtatttgttagtgtttttatttttttttgtaggagggagagtgtggatatttattttttttttgtatttttttagtatgagtttttgtttttaattatattaatttatttagtgttttttaatatattttgggtatttttatttttgtatttttagttattagaattttttattagtggtggttatttttgtttatttatttatttatttgtttatttatttaattatttatttatttatttatttatttatttaattatttatttatttatttgttatttatttatttttttatttatttatttaattatttatttatttatttatttatttatttatttattttttatttatttaattttgtaatttgttttagtttaatttaatttaatttatttttatttaatttataaggttattgggttttgttatgtattatatatatgtgataagtgaggtatgtttttgtttttaaggagtttatgggaagaattttttttattttttatggttagttttgtattttatttttgttaattttttgttatgttttttagtagaagtaatggattttgaagggttgttttgtgaggagagtttagttttggtttttatgaattgtagaggatagagtttagataaggagagaggtaaagggtggggaggaggtgagagtgagatgagttagtgggatggggattttggttttgtggagggagttgtttttagttagttgtgagtatttagtagtgtattgggggatgaagggaaagagaagggggtaaggaaattattattggagaagtgggttagtgtggtggtgaggaggtgagttttgtagttaatggattatttggtttattgttttagttttattatatttttgttgtgtgaatttgggtatatattttaatatttttgagtttttatgtttttatttgtaaaatgaggataataagatttattttataatgttgtttttagtattaatatatgtagtgtttaaattaatgtgtggtataaagggagagtttaatagattttagtttt

SEQ ID NO: 2217 - DNA, 2258 bp, Artificial Sequence
  chemically treated genomic DNA (Homo sapiens)
aaagttggaatttattaagttttttttttgtgttatgtattaatttaagtattgtatgtgttaatgttaaaggtaatattgtgagataggttttattatttttattttataaatgaggatatggaggtttagagatgttaagatatgtgtttaggtttatatagtaggaatatggtggagttgagataataagttaggtagtttattggttgtagagtttatttttttattgttatattaatttatttttttaatagtggtttttttgtttttttttttttttttttattttttaatatattgttgagtatttatagttaattggaagtagttttttttataaagttaaaatttttgttttattagtttattttatttttattttttttttattttttgtttttttttttgtttgagttttgttttttgtaatttatgaaagttagaattgaattttttttataggatagttttttagagtttgttgtttttgttgaagggtatggtaaaggattaatagaggtgagatgtaaagttggttatggagaatggggaggattttttttatgggttttttgagggtagaggtatgttttatttattatatgtgtgtggtatatggtaaagtttagtaattttatgagttgaataaaggtgaattgaattgaattgaattgaagtggattgtaaagttgaatggatggaaggtgggtgggtggatggatgaatggatggatggatgattgaatggatgaatggggggatggatggatgatggatgaatggatggatgattgaatggataggtgggtggatggatggatgattggatggatggataggtggatggatgaatggataggagtgattattgttggtagggaattttggtaattgaaggtatagaggtaggaatgtttaaggtgtgttggaaaatattgaataaattagtgtgattggagatgaggatttatgttagggagatgtagaaaaagaataaatatttatatttttttttttataaggagaggtggaggtattggtaggtgttgtataagttgtgtgttttatggttgttgggaagggaggtgttaatagtaggatggtttttggttagttgtaattggggtgatattgatagattatagtgtgttttttgtattaataatattgtggtgtttttttgttattttttagttagttttaattttagtggattaatattaaaaggtgtatattgaaaatttttagttaattttttttaaggtttggatgttttaaagtatagaattgtagagtaaaaggattttagtgatttgtttattttttgggttgggtgttttttggggttagggatggtgttttatttattttggtttttttgttttattataggattaggtaaggatagtttttttttaaagtttgttgagtgaaggaatttattttttggttattgtgagtttttataaatatatttgtgtggtttataattttttagtttttatttgtatatttttaatgataggaggtttttaattttttttaagtagttagagtttgtttttattggaaagttttgatgattaaaattattttttttattttttttttttttttttttttatttttgagatggagttttgttttgttgtttaggttggagtgtagtgatatgattttagtttattgtaatttttgttttttaggtttaagtgatttttttgttttagttttttgagtagttgggattatagttgagtgttattatgtttaggtaatttttgtatttttagtagagatggggttttattatattggtaaggttggttttgaatttttgattttgtgatttgtttgttttggttttttaaagtgttgggattataggtgtgagtttttgtgtttggtttgttttttttattttgaattaatttttttttttttatttgtttgtggttttttattttttaattttttttttttttttggatattttttttttttttttttaaattatttaatattttagtttttattttttggggtattgaagttaaataattaaggggaggaagaagggaattagtatttattgagtattttttttagttgagataagttagaaatgtttatgtgttagatgtagtggtttatgtttgtaattttagtattttgagaggttgagttgggaggattatttgaatttaggagtttaaggttgtaatgagttatgattatgttattgtattttagtt

SEQ ID NO: 2218 - DNA, 2486 bp, Artificial Sequence
  chemically treated genomic DNA (Homo sapiens)
agaataatagtaagatagtttgaatttgttttttttttttataataatttaaaaattaatatgattttatttatatgaaatatttagaaatatatttgtatatgtggatatttttattgtatattttttatttaggttgttttaaagtggtattttttttttttttgtttatgttttttttttttttttattttttttgttgatatgtggtttttttttgtttttttttttagtagttttagtagattaggtttaattagttaataagtttttggatttggggaataaaagtatatttttttggatttttgaggatttgttttgttagggtgttttttttaatttaattttttttttttggtagtttattttttttagattttgtaatttatttaattttatttatttgtatttattttgtggatttttttatatttttatttgaatattaggaatttttaggttatgtttatatgtttttggtttttttgtagtttttttttttttttttttttgtgatgttattaagttgaagtttttttttagattttggagtgtagtagggatttttttggtttttgttttagggattaagggggtggaagagtggatttttgtgttttttttatgtttgtgtttttattagggttagttgtaaaaggtagggattaggttgtttaggtagggattatggtattaggtagggattatggtatttttagagttgagttttatgtttagtaaaagatatgtgtttagtaattatttgatagagatttattttttattatatgggatatattatattggatttaggatggggttgaattgggagaggtagttgtggatttgttttttgttttgtttttattttaagagttgatggggtatttattaggaagagtatttttgggtagggagagggttatgagtagttttgttttgtatgtgagatatagtttagtttggttataagatttagatgattatgattgtaatttaggggaagtagagaatgaagattgattagaataattttttgggaatgtgttttgggttttttagagggaagagttttttttttatttagtgttgtaggatttatagaggaaggagagttttggttattagggaggagttatatgagaggatttggtgtttttataaatgggaatgtgagtttatgaaagttggtttttgttttgggtttgattgtgatttatgaggatattgtgtagttattatttgagttttttataataaatagtgagagtgttatggatagatttatttttgaggagtttagtaaagtgggaggattgaggttatagggagaagatataggtattatttggtttggttttgatagggggtagtggatagaatagtgtggaggtagtggggtttttagaggttttggttattttgttatattatggtttgttttggtttggatattagagggtatttggggattatttttgagaagattgaggttgattagagtagaattagttatttgttttgtttagtgttttttgtttagggtttatagttgtgttttttatatttgtgggattatatagttttatttttgttattttttgatatttttaggtatagggatttgatttagggtttagggtgggattagaaagttgggggtttgatttgtatggatggatttttttatttttagagtatgaagaggggtagggagagatttggggaggttttgttttagttgtgggtataagaggtagtatttaggataatttttagtatggtttggtttttttttttttttattttttttgtttattgtataggtgattggatataggtttaggggaggggttttgggaagtttatggatttttgtttttttttgttgtttttagaagttgaataatgatgtttgtgttttttttatttttagggttttgggtttagtttgtgttgatgtagttgtttttagtgtttggggttttagggtagagggttattattttttgtattgggagtagttttaatattggggtaggttatgatgtatattggtattagtagtttttaggaatagtttttaaattttttatttatggtaatagtaattggtttttaggggtttttgattgattttttggttttaagtttggtattttagtttttttggttattattgggttttaggttgaggatgaggttgattattattgttagttttatgatagtagtttgagtggttttatagtgttttaggtttggggggaattgagataagaatttatttttttttttgttaggagggtgagttttggtagttgttgtttaggtttggtttgtggtttttgtggttgttgttttttttatggttttaggggtatttagggttttgtttgggagtggaggttttttttttttttttgtttttagagttaggaatagggaatttaggaagtagaatattttttttttttaatttg

SEQ ID NO: 2219 - DNA, 2486 bp, Artificial Sequence
  chemically treated genomic DNA (Homo sapiens)
taagttaagggagagggatattttgttttttggattttttgtttttgattttgaggatagaaggggaggaggagtttttatttttaggtagggttttggatgtttttgggattatgagggaagtagtagttgtagaagttataggttaggtttgagtagtagttgttggggtttatttttttggtagaggaggaagtgggtttttgttttagttttttttgggtttggagtattgtggaattatttaggttgttgttataggattggtagtaataattagttttatttttagtttggagtttagtgatggttagggaggttgaggtgttagatttggagttagagaattggttagggatttttgagggttgattgttgttattatagatgaggagtttgggggttgtttttggaagttgttggtattagtgtatattataatttgttttgatgttggagttgtttttagtgtaggagatggtgattttttgttttggggttttagatattgagggtggttgtgttagtatagattgggtttaggattttggaagtgggagagatataggtattattatttggtttttagagataataggagaaagtaagaatttataggttttttagggttttttttttggatttgtatttagttatttgtgtagtgagtgaggagagtgaggaggagaggagattaggttatgttggagattgttttgagtgttgttttttgtgtttatagttgaagtagagtttttttaaatttttttttgtttttttttatattttgagagtgggagggtttatttatgtaaattagatttttagttttttaattttattttgggttttgggttaggtttttatgtttgaggatgttagggggtggtaggggtggggttgtgtggttttatgggtgtaaaggatgtagttgtgagttttgagtagaggatattaggtaggataggtggttggttttgttttgattaattttagtttttttaggaatgatttttaagtgttttttagtgtttagattgagataaattatggtatgataaggtgattagagtttttagagattttattgtttttgtattgttttgtttattgttttttgttagggttaggttaggtggtgtttgtgttttttttttgtgattttagtttttttattttattgggttttttgggagtgaatttgtttgtggtgtttttattgtttattgtagaggatttaggtggtgattatataatgtttttataggttataattaaatttagagtagggattgatttttatggatttatgtttttatttgtggggatattgggtttttttatgtggtttttttttggtggttagggtttttttttttttgtggattttgtagtgttgaatagaagggaagtttttttttttaggaggtttagggtatatttttagagggttattttggttaatttttattttttattttttttgaattgtagttatagttatttggattttgtgattgggttgagttgtgttttatatataggataaggttgtttatggttttttttttgtttaggaatgttttttttggtggatgttttattagtttttagggtgagggtagagtgaggagtaggtttatagttattttttttagtttagttttattttgggtttagtataatgtgttttatgtgataagaggtaggtttttgttaagtagttgttgagtatgtattttttgttgggtatagagtttagttttggaaatgttataatttttatttaatgttataatttttatttagatagtttaatttttattttttgtagttaattttgatgaaaatataggtataggaagggtataggagtttatttttttatttttttaatttttggggtagagattagagaagtttttgttgtattttagggtttgagaagagattttgatttggtggtattataggggaagaaggaagaagggattataggagaattaagggtatatgggtatgatttgaagatttttggtgtttaggtgaagatgtaaggaagtttatgaagtagatatagatgaataagattagataaattataggatttaggagaagtggattgttgggaaggagagattggattgagaaagatattttggtagggtaagtttttagaaatttaagaagatgtatttttgttttttaagtttaggagtttgttgattggttgggtttgatttgttggggttattggagaggaaggtagggaggagttatgtgttagtaggagaggtgaggagagggggagaatatgagtagaagaagaggagatgttattttaggatagtttggatgggaggtgtgtgatgggaatgtttatatgtatagatatatttttagatattttatataaatgggattatgttaatttttagattgttgtgagagaagaagataaatttaaattattttgttattatttt

SEQ ID NO: 2220 - DNA, 2411 bp, Artificial Sequence
  chemically treated genomic DNA (Homo sapiens)
tgtggatatttttattgtatattttttatttaggttgttttaaagtggtattttttttttttttgtttatgttttttttttttttttattttttttgttgatatgtggtttttttttgtttttttttttagtagttttagtagattaggtttaattagttaataagtttttggatttggggaataaaagtatatttttttggatttttgaggatttgttttgttagggtgttttttttaatttaattttttttttttggtagtttattttttttagattttgtaatttatttaattttatttatttgtatttattttgtggatttttttatatttttatttgaatattaggaatttttaggttatgtttatatgtttttggtttttttgtagtttttttttttttttttttttgtgatgttattaagttgaagtttttttttagattttggagtgtagtagggatttttttggtttttgttttagggattaagggggtggaagagtggatttttgtgttttttttatgtttgtgtttttattagggttagttgtaaaaggtagggattaggttgtttaggtagggattatggtattaggtagggattatggtatttttagagttgagttttatgtttagtaaaagatatgtgtttagtaattatttgatagagatttattttttattatatgggatatattatattggatttaggatggggttgaattgggagaggtagttgtggatttgttttttgttttgtttttattttaagagttgatggggtatttattaggaagagtatttttgggtagggagagggttatgagtagttttgttttgtatgtgagatatagtttagtttggttataagatttagatgattatgattgtaatttaggggaagtagagaatgaagattgattagaataattttttgggaatgtgttttgggttttttagagggaagagttttttttttatttagtgttgtaggatttatagaggaaggagagttttggttattagggaggagttatatgagaggatttggtgtttttataaatgggaatgtgagtttatgaaagttggtttttgttttgggtttgattgtgatttatgaggatattgtgtagttattatttgagttttttataataaatagtgagagtgttatggatagatttatttttgaggagtttagtaaagtgggaggattgaggttatagggagaagatataggtattatttggtttggttttgatagggggtagtggatagaatagtgtggaggtagtggggtttttagaggttttggttattttgttatattatggtttgttttggtttggatattagagggtatttggggattatttttgagaagattgaggttgattagagtagaattagttatttgttttgtttagtgttttttgtttagggtttatagttgtgttttttatatttgtgggattatatagttttatttttgttattttttgatatttttaggtatagggatttgatttagggtttagggtgggattagaaagttgggggtttgatttgtatggatggatttttttatttttagagtatgaagaggggtagggagagatttggggaggttttgttttagttgtgggtataagaggtagtatttaggataatttttagtatggtttggtttttttttttttttattttttttgtttattgtataggtgattggatataggtttaggggaggggttttgggaagtttatggatttttgtttttttttgttgtttttagaagttgaataatgatgtttgtgttttttttatttttagggttttgggtttagtttgtgttgatgtagttgtttttagtgtttggggttttagggtagagggttattattttttgtattgggagtagttttaatattggggtaggttatgatgtatattggtattagtagtttttaggaatagtttttaaattttttatttatggtaatagtaattggtttttaggggtttttgattgattttttggttttaagtttggtattttagtttttttggttattattgggttttaggttgaggatgaggttgattattattgttagttttatgatagtagtttgagtggttttatagtgttttaggtttggggggaattgagataagaatttatttttttttttgttaggagggtgagttttggtagttgttgtttaggtttggtttgtggtttttgtggttgttgttttttttatggttttaggggtatttagggttttgtttgggagtggaggttttttttttttttttgtttttagagttaggaatagggaatttaggaagtagaatattttttttttttaatttgggatataaagtttttatattgaagttt

SEQ ID NO: 2221 - DNA, 2411 bp, Artificial Sequence
  chemically treated genomic DNA (Homo sapiens)
gaattttagtgtagagattttgtgttttaagttaagggagagggatattttgttttttggattttttgtttttgattttgaggatagaaggggaggaggagtttttatttttaggtagggttttggatgtttttgggattatgagggaagtagtagttgtagaagttataggttaggtttgagtagtagttgttggggtttatttttttggtagaggaggaagtgggtttttgttttagttttttttgggtttggagtattgtggaattatttaggttgttgttataggattggtagtaataattagttttatttttagtttggagtttagtgatggttagggaggttgaggtgttagatttggagttagagaattggttagggatttttgagggttgattgttgttattatagatgaggagtttgggggttgtttttggaagttgttggtattagtgtatattataatttgttttgatgttggagttgtttttagtgtaggagatggtgattttttgttttggggttttagatattgagggtggttgtgttagtatagattgggtttaggattttggaagtgggagagatataggtattattatttggtttttagagataataggagaaagtaagaatttataggttttttagggttttttttttggatttgtatttagttatttgtgtagtgagtgaggagagtgaggaggagaggagattaggttatgttggagattgttttgagtgttgttttttgtgtttatagttgaagtagagtttttttaaatttttttttgtttttttttatattttgagagtgggagggtttatttatgtaaattagatttttagttttttaattttattttgggttttgggttaggtttttatgtttgaggatgttagggggtggtaggggtggggttgtgtggttttatgggtgtaaaggatgtagttgtgagttttgagtagaggatattaggtaggataggtggttggttttgttttgattaattttagtttttttaggaatgatttttaagtgttttttagtgtttagattgagataaattatggtatgataaggtgattagagtttttagagattttattgtttttgtattgttttgtttattgttttttgttagggttaggttaggtggtgtttgtgttttttttttgtgattttagtttttttattttattgggttttttgggagtgaatttgtttgtggtgtttttattgtttattgtagaggatttaggtggtgattatataatgtttttataggttataattaaatttagagtagggattgatttttatggatttatgtttttatttgtggggatattgggtttttttatgtggtttttttttggtggttagggtttttttttttttgtggattttgtagtgttgaatagaagggaagtttttttttttaggaggtttagggtatatttttagagggttattttggttaatttttattttttattttttttgaattgtagttatagttatttggattttgtgattgggttgagttgtgttttatatataggataaggttgtttatggttttttttttgtttaggaatgttttttttggtggatgttttattagtttttagggtgagggtagagtgaggagtaggtttatagttattttttttagtttagttttattttgggtttagtataatgtgttttatgtgataagaggtaggtttttgttaagtagttgttgagtatgtattttttgttgggtatagagtttagttttggaaatgttataatttttatttaatgttataatttttatttagatagtttaatttttattttttgtagttaattttgatgaaaatataggtataggaagggtataggagtttatttttttatttttttaatttttggggtagagattagagaagtttttgttgtattttagggtttgagaagagattttgatttggtggtattataggggaagaaggaagaagggattataggagaattaagggtatatgggtatgatttgaagatttttggtgtttaggtgaagatgtaaggaagtttatgaagtagatatagatgaataagattagataaattataggatttaggagaagtggattgttgggaaggagagattggattgagaaagatattttggtagggtaagtttttagaaatttaagaagatgtatttttgttttttaagtttaggagtttgttgattggttgggtttgatttgttggggttattggagaggaaggtagggaggagttatgtgttagtaggagaggtgaggagagggggagaatatgagtagaagaagaggagatgttattttaggatagtttggatgggaggtgtgtgatgggaatgtttata

SEQ ID NO: 2222 - DNA, 2386 bp, Artificial Sequence
  chemically treated genomic DNA (Homo sapiens)
ttgatggagaaattttatttgaaattttaaagtagggtagggatatttttattagatatttttgtagtttttgttttgtgggatgaagtaagggatgatgatatatttgtttgtttatttggaagtgagttttaggttattgtattagaagggtgataatttaatataagttattgttaagtaatttttgtgtgtttagtatttatatttttttgttttattttgattattatattgtataggagttattatttttattttttgtttttatttatagatgaggatattgagatttagagagttttttgttttgttttgttttttgagatggagttttgttttgttatttaggttggagtgtaatggtatgattttagtttattgtaatttttgttttttgggtttaagagatttttttgttttagttttttgagtagttgggattataggtatttgttattatatttagttaattttgtattagagatggggttttattatgttggttaggttggtttttaatttttgattttgtgatttatttgttttagttttttaaagtgttgggattataggtatgagttattgtgtttggtttgttttattttttgttttgtttgtttgttttgttttgtttttagagatagggtttggttttgttttttaggttagggtgtagtggtgtgattatagtttattgtagttttaaatttttgggtttaagtaatttttttgttttagtttattaggaattggaattataaatgtatgttattatttttagttaatattttttttttttggaaaaatgaagttttattatgttgtttaggttggttttaaatttttgggtttaagtgatttttttgtagtgttgggattataggtatgagttattttgtttggttaattttagagagttttgatgaagttataaaattttgattatggagttagaatttaaatttaggtatgtgaggtttgagtttaggtttttattagggttattgtgttgtaattgttattattttttggtattttaagtgatatttgagtattatttaagggaaatggtttatattttggtaatttttttatttgttttatttttttttttgaattagggattttggtagagatagagttttagtagtttttatttgtttttttgtgttggttttgtttatttatggatgagttagttggaatgtttggatattttagtttagtggttgtggtattaggagttgttaggaggtgggaatgtagagaatgtggtttattgtgtttttgtttgtttaggttgaatttgtagagaggtttggaaggtgaatgatataatgtttgttaagggtttgggatgataggtgtatgtgaagatgaggataaagattgattttttttttggggttgttagtatagttttgtattttttttatatatgtttgtattttaggtttagatattttgtgttttgggtttttatgaagggtaagaaattattgattaggaagtaagaagaagaaaaagaaatgttttaggtttttaaaagaaagagtgtttgatttttttatttaaatgttattttgaaatatagtttttttgttttttgtttttttttttttttagagatagggttttgttttgttatttaggttggagtgtagtggtatgtttatagtttattgtagtttttaatttttgggtttaagtgatttttttgttttagttttttaaagtattgggattataggtgtgagttattgtattaggttttgaaatattgttttgattttgttttttttttatttagatgtttttgtgtaggttgataattttttttggtgttttttttgtgtggggttgtgtttgggtattgagtagatagtagtgaagaagatgatgatagtttttttttagggagttttttttttggagagaggtttagataattaaaaagtgagtgtgtttatgtttgtaattttagtattttgggaggttaaggtggatggattataaggttaggagtttgagattagtttggttaatatggtgaaattttgtttttattaaaaatataaaaattagttagttatgatggtgggtatttgtaattttagttatttaggaggttgagataggagaattgtttgaatttgagaggtggaggttgtagtgagttgagattgtgttattgtattttagtttggatgatagagtgagattttgttttaaaaaagaaaagtgagtgtgtgattatagatgagtagtgtgggggaggaaataaattaggtttatgatggaaattaggggaatggggtttttttaaaatgaaattaaattttgagagttgtgtgttgtttaaatgtgttattttattgtttat

SEQ ID NO: 2223 - DNA, 2386 bp, Artificial Sequence
  chemically treated genomic DNA (Homo sapiens)
gtgggtagtgaggtgatatatttaggtagtatgtagtttttggagtttgattttattttaaaggaattttatttttttaatttttattatagatttagtttgtttttttttttatattgtttatttgtaattatatatttattttttttttttgagatagagttttgttttgttgtttaggttggagtgtaatggtgtaattttggtttattgtaatttttgttttttgagtttaagtgatttttttgttttagttttttgagtagttgggattataggtgtttattattatggttggttaatttttgtatttttagtagagatggggttttattatattggttaggttggttttgaatttttgattttgtgatttatttgttttggttttttaaagtgttgggattataggtgtgagtgtatttattttttaattatttgaatttttttttagaaaggaaattttttggggaaggattattattattttttttattattgtttatttagtgtttagatatagttttgtatagagaagatattagaaaagattgttggtttgtataaaggtatttgagtaggagagagatagaattaaagtagtgttttagggtttggtgtagtggtttatgtttgtaattttagtgttttgggaggttgaggtgggaggattgtttgagtttaggagttggaagttgtagtgagttgtgagtgtgttattgtattttagtttgggtgatagagtaagattttgtttttaaaagaaaaaaaaaatgaaaaataaaaaagttgtgttttaggatggtatttgggtaaagaggttaaatatttttttttttaagagtttgggatattttttttttttttttttgttttttaattagtggttttttgttttttataggagtttagggtatggagtgtttgggtttggaatgtggatatgtgtgggagggatgtgaaattgtgttggtagttttaagaaaagaattagtttttgtttttatttttatatgtatttgttgttttaaatttttgataaatattgtgttatttattttttaaatttttttgtggatttagtttgggtgggtgggagtatagtgagttatattttttgtatttttgttttttgatagtttttggtattatagttgttgagttgggatgtttaaatattttaattgatttatttgtgggtgagtaaggttgatatgaggggatgggtggaggttgttggggttttgtttttgttgaagtttttaatttagagaagaaagtggggtgggtgggggaattgttgggatatgggttattttttttgaatgatgtttgggtgttatttgaggtgttaggaagtggtggtagttgtagtatagtggttttggtggaagtttgggtttagattttatatatttagatttgagttttggttttatggttagaattttgtaattttattaaaattttttgagattggttgggtagagtggtttatgtttgtaattttagtattgtaggaggattatttgagtttaggagtttgagattagtttgggtaatatagtgagattttatttttttaaaaaggaaaaatattagttggggatggtggtatgtatttgtagttttagtttttggtaggttgaggtgagaggattgtttgagtttaggagtttgaggttatagtgagttatggttgtattattgtattttaatttggaaaataaagttagattttatttttgaaaataaaataaaataaataaataaaataaaaaataaaataggttaggtgtggtggtttatgtttgtaattttagtattttgggaggttgaggtaggtggattatgaggttaggagttggagattagtttggttaatatggtgaaattttatttttaatataaaattagttgggtgtggtggtaggtgtttgtagttttagttatttaggaggttgaggtaagggaattttttgaatttaggaggtagaggttgtagtgagttgagattgtgttattgtattttagtttgggtgatagagtaagattttattttaaaaaataaaataaaataaaaaattttttgggttttggtgtttttatttgtaaatggaggtggggggtgagaataatggtttttgtgtagtgtagtggttagaatgaagtaagaaaatgtgaatattgagtatgtgagagttgtttagtaatgatttgtgttaggttgttatttttttgatgtaatgatttgagatttatttttgggtgggtaggtgagtgtgttattattttttgttttgttttataggataaaggttgtaaaagtatttggtgggaatgtttttgttttgttttgggattttgggtaggatttttttattag

SEQ ID NO: 2224 - DNA, 2500 bp, Artificial Sequence
  chemically treated genomic DNA (Homo sapiens)
tttgaatgaggttattgaatgtgtatgggaggtttagtgttgttttattttagtttgatggagaaattttatttgaaattttaaagtagggtagggatatttttattagatatttttgtagtttttgttttgtgggatgaagtaagggatgatgatatatttgtttgtttatttggaagtgagttttaggttattgtattagaagggtgataatttaatataagttattgttaagtaatttttgtgtgtttagtatttatatttttttgttttattttgattattatattgtataggagttattatttttattttttgtttttatttatagatgaggatattgagatttagagagttttttgttttgttttgttttttgagatggagttttgttttgttatttaggttggagtgtaatggtatgattttagtttattgtaatttttgttttttgggtttaagagatttttttgttttagttttttgagtagttgggattataggtatttgttattatatttagttaattttgtattagagatggggttttattatgttggttaggttggtttttaatttttgattttgtgatttatttgttttagttttttaaagtgttgggattataggtatgagttattgtgtttggtttgttttattttttgttttgtttgtttgttttgttttgtttttagagatagggtttggttttgttttttaggttagggtgtagtggtgtgattatagtttattgtagttttaaatttttgggtttaagtaatttttttgttttagtttattaggaattggaattataaatgtatgttattatttttagttaatattttttttttttggaaaaatgaagttttattatgttgtttaggttggttttaaatttttgggtttaagtgatttttttgtagtgttgggattataggtatgagttattttgtttggttaattttagagagttttgatgaagttataaaattttgattatggagttagaatttaaatttaggtatgtgaggtttgagtttaggtttttattagggttattgtgttgtaattgttattattttttggtattttaagtgatatttgagtattatttaagggaaatggtttatattttggtaatttttttatttgttttatttttttttttgaattagggattttggtagagatagagttttagtagtttttatttgtttttttgtgttggttttgtttatttatggatgagttagttggaatgtttggatattttagtttagtggttgtggtattaggagttgttaggaggtgggaatgtagagaatgtggtttattgtgtttttgtttgtttaggttgaatttgtagagaggtttggaaggtgaatgatataatgtttgttaagggtttgggatgataggtgtatgtgaagatgaggataaagattgattttttttttggggttgttagtatagttttgtattttttttatatatgtttgtattttaggtttagatattttgtgttttgggtttttatgaagggtaagaaattattgattaggaagtaagaagaagaaaaagaaatgttttaggtttttaaaagaaagagtgtttgatttttttatttaaatgttattttgaaatatagtttttttgttttttgtttttttttttttttagagatagggttttgttttgttatttaggttggagtgtagtggtatgtttatagtttattgtagtttttaatttttgggtttaagtgatttttttgttttagttttttaaagtattgggattataggtgtgagttattgtattaggttttgaaatattgttttgattttgttttttttttatttagatgtttttgtgtaggttgataattttttttggtgttttttttgtgtggggttgtgtttgggtattgagtagatagtagtgaagaagatgatgatagtttttttttagggagttttttttttggagagaggtttagataattaaaaagtgagtgtgtttatgtttgtaattttagtattttgggaggttaaggtggatggattataaggttaggagtttgagattagtttggttaatatggtgaaattttgtttttattaaaaatataaaaattagttagttatgatggtgggtatttgtaattttagttatttaggaggttgagataggagaattgtttgaatttgagaggtggaggttgtagtgagttgagattgtgttattgtattttagtttggatgatagagtgagattttgttttaaaaaagaaaagtgagtgtgtgattatagatgagtagtgtgggggaggaaataaattaggtttatgatggaaattaggggaatggggtttttttaaaatgaaattaaattttgagagttgtgtgttgtttaaatgtgttattttattgtttattgaatatattatatttttttgttttattgttttagtttttgtaatttttttatttgggtt

SEQ ID NO: 2225 - DNA, 2500 bp, Artificial Sequence
  chemically treated genomic DNA (Homo sapiens)
aatttggatggggagattataggaattgaggtagtgaggtagaaaaatatggtgtgtttagtgggtagtgaggtgatatatttaggtagtatgtagtttttggagtttgattttattttaaaggaattttatttttttaatttttattatagatttagtttgtttttttttttatattgtttatttgtaattatatatttattttttttttttgagatagagttttgttttgttgtttaggttggagtgtaatggtgtaattttggtttattgtaatttttgttttttgagtttaagtgatttttttgttttagttttttgagtagttgggattataggtgtttattattatggttggttaatttttgtatttttagtagagatggggttttattatattggttaggttggttttgaatttttgattttgtgatttatttgttttggttttttaaagtgttgggattataggtgtgagtgtatttattttttaattatttgaatttttttttagaaaggaaattttttggggaaggattattattattttttttattattgtttatttagtgtttagatatagttttgtatagagaagatattagaaaagattgttggtttgtataaaggtatttgagtaggagagagatagaattaaagtagtgttttagggtttggtgtagtggtttatgtttgtaattttagtgttttgggaggttgaggtgggaggattgtttgagtttaggagttggaagttgtagtgagttgtgagtgtgttattgtattttagtttgggtgatagagtaagattttgtttttaaaagaaaaaaaaaatgaaaaataaaaaagttgtgttttaggatggtatttgggtaaagaggttaaatatttttttttttaagagtttgggatattttttttttttttttttgttttttaattagtggttttttgttttttataggagtttagggtatggagtgtttgggtttggaatgtggatatgtgtgggagggatgtgaaattgtgttggtagttttaagaaaagaattagtttttgtttttatttttatatgtatttgttgttttaaatttttgataaatattgtgttatttattttttaaatttttttgtggatttagtttgggtgggtgggagtatagtgagttatattttttgtatttttgttttttgatagtttttggtattatagttgttgagttgggatgtttaaatattttaattgatttatttgtgggtgagtaaggttgatatgaggggatgggtggaggttgttggggttttgtttttgttgaagtttttaatttagagaagaaagtggggtgggtgggggaattgttgggatatgggttattttttttgaatgatgtttgggtgttatttgaggtgttaggaagtggtggtagttgtagtatagtggttttggtggaagtttgggtttagattttatatatttagatttgagttttggttttatggttagaattttgtaattttattaaaattttttgagattggttgggtagagtggtttatgtttgtaattttagtattgtaggaggattatttgagtttaggagtttgagattagtttgggtaatatagtgagattttatttttttaaaaaggaaaaatattagttggggatggtggtatgtatttgtagttttagtttttggtaggttgaggtgagaggattgtttgagtttaggagtttgaggttatagtgagttatggttgtattattgtattttaatttggaaaataaagttagattttatttttgaaaataaaataaaataaataaataaaataaaaaataaaataggttaggtgtggtggtttatgtttgtaattttagtattttgggaggttgaggtaggtggattatgaggttaggagttggagattagtttggttaatatggtgaaattttatttttaatataaaattagttgggtgtggtggtaggtgtttgtagttttagttatttaggaggttgaggtaagggaattttttgaatttaggaggtagaggttgtagtgagttgagattgtgttattgtattttagtttgggtgatagagtaagattttattttaaaaaataaaataaaataaaaaattttttgggttttggtgtttttatttgtaaatggaggtggggggtgagaataatggtttttgtgtagtgtagtggttagaatgaagtaagaaaatgtgaatattgagtatgtgagagttgtttagtaatgatttgtgttaggttgttatttttttgatgtaatgatttgagatttatttttgggtgggtaggtgagtgtgttattattttttgttttgttttataggataaaggttgtaaaagtatttggtgggaatgtttttgttttgttttgggattttgggtaggatttttttattaggttggagtggggtagtgttgagttttttgtgtatatttagtgattttatttagg

SEQ ID NO: 2226 - DNA, 2340 bp, Artificial Sequence
  chemically treated genomic DNA (Homo sapiens)
gttttattaagttttttagaggggaaaaattttaggttgggaggggaggtgatttgtttagagttatatagtttttggagggtagaggggaggttaatatttgtttttgtgattttgatattgaagtaaaaatgggtgattttaataatttaatagtgtttaggtttgattttgtttttataaatatagagatttaagtttttatttttgtagttatatttataattttatagtgtggtttttgaattttatgattgtaaagttggtattatgttataggtattattttgtaatgtgatttttttatttttttgttttagttatgttttttattagggatatagtatagtttgttttttttttattagtttagaggtttgaatagagggatagaggtgagggttagagatgtgaagttttatgatttgtttgtttagttttttgatatgggattttggtaagttattttttttttagggttttagtttttttatagggtttggtataagtaggtgtttagatttagggtgagtgagataatttttgagttttttgtgttttaaaagaaatttgttgtttttattgggttttagtagtagtattttggggttagtttgggtgtggtttggttataaggatatgttgggttttaggttatttttttttttttattttttttgatttttttaaattttttaaagagatgggtatttttaatatttattttttttttggggttagttggttgtgtttgagggtgttagaattagagttgagtttggggagttttgtgaatttatttaagttgttttttttatttttttttatagtttatttgtttagtaggagggagggagtaattagatttaagtttgggtgtaaattttggttttgttattgtttttttgtttgatttgaattagttatttaatttttttgagtttatttataaaagttgaatgattttttttttatagagttattgtaagaataaggatatgggggtagattatattatttttaatttattaagggatttttttttgatagagattgagtaagatttaattgttttgagttgtgtggattttatgtttagttgtgtatttgtgtaataattagatatgttttttggttttttagatatattttggaatttgaaagggaaagtgaaagttataattttttagtagtttatgattaagtatagtaaatatgttgttttttagtattatttgtagtttaggtttagtttttttgttgttgtatttagaggagtagttgtagattagatatttgggttttttttatttaatttatttgttttatatttttaggatttaaggtttgttgtgttagttgtttatgttttaggtagttagaattagagttgagtttggggagttttttgaatttatttgagttgtttgttttttaatttttgttttgatttttgtagtttaagggtatagtaggtgggggagagaagttagatttaagttttagtgtaattttaggttttgtttttgttttattgtttgatttgaattagttatttaatttttttgagtttaagaaagatttgttattgattgattgtggggttttttagattattttttgtttttttgtttttttatattttttagatgtttgttttatttttatatatgttattagtattagtatagttttttatatatgttgggtggatgtttattgtatatttattgtaatgtttttgaggttatgttttttgttatgtttttgatatagagttttgttttgtagtttaggttggagagtagtggtataattatagttattttaagtggtataattaagttatttttttattttagtttttgagtagttgggattataggtgtttgttattatatttagttaattttttgtaattttagtagagatggggttttattattttggttaggttggttttgaatttttgattttaagtgatttatttgttttggttttttaaagtgttgggattataggtgtgagttatggtgtttagtttattgtattttttttgtgattttgtgtttttatagtttagtttttattaataaatgagaatatataatatttggttttttatttttgagttattttatttagaataatggtgtttaattttatttagattgttatggatgttattattttttttttttttatagttgagtaatattttatggtatatatatatataggggtgtgtgtgtgtgtgtgtgtgtgtgtatatatatatatattttttttatttatttgttggttgatgagtatttaggttggttttatatttttttggtt

SEQ ID NO: 2227 - DNA, 2340 bp, Artificial Sequence
  chemically treated genomic DNA (Homo sapiens)
aattgaaaaaatatggaattaatttaaatgtttattagttaataagtggatgaagaaaatgtgtgtgtatatatatatatatatatatatatatatatttttatatatgtatatgttatggaatattatttagttgtaaaaaggaagggaataatggtatttgtaataatttggatgaagttggatattattattttgagtgaagtaatttaggaatggaaaattaaatattgtatgtttttatttattagtaggagttaagttatgaagatataaagttataagaaggatataatgggttgggtgttgtggtttatatttgtaattttagtattttgggaggttaaggtaggtggattatttgaggttaggagtttaagattagtttggttaagatggtgaaattttatttttattaaaattataaaaaattagttgggtgtagtggtaggtatttgtaattttagttatttggaagttgagatgggaggatggtttgattgtgttatttgaagtagttatgattgtgttattgttttttagtttgggttatagagtaagattttatattaaaaatataatagaaaatataattttagaagtattataataaatatgtaataagtatttatttagtatgtgtgggggattgtgttgatgttgatggtatgtgtgggagtaaggtaggtatttgaggaatgtgggggaatggaaggatggggagtaatttggagagttttatggttagttagtggtaggttttttttgagtttagaaaggttaggtaattagtttagattagatagtaaaataggggtagagtttggaattgtattgaggtttgagtttgattttttttttttatttgttgtgtttttaaattgtagagattggggtgggggttggggggtaagtggtttagatgggtttaaaaaattttttaggtttaattttggttttgattgtttgagatatgggtagttgatatagtagattttgaattttgaggatgtgaggtaggtgggttggatgagagggatttggatgtttggtttgtggttgtttttttaagtgtagtagtaaggaggttgggtttggattgtaggtggtgttggggagtagtgtgtttattgtgtttggttatgagttgttgggaagttgtgatttttatttttttttttgaattttagggtatatttgggaggttggaggatgtgtttggttattatatagatgtatagttggatgtgggatttatatagtttagaatagttggattttgtttagtttttgttagaggaagattttttggtaagttggggatagtgtgatttatttttatgtttttatttttgtaatagttttataagggaaggattatttagtttttgtagataagtttagagaggttaggtagttggtttagattagataggaaagtagtggtagagttgggatttgtatttaggtttgagtttgattgtttttttttttttgttgggtgggtaaattgtagagagaggtggggaaaatagtttagatgggtttataaagttttttgggtttagttttggttttgatatttttagatatggttagttgattttagaagaaaggtaggtgttgggggtgtttatttttttgggaaatttgaaggaattaaagaaggtggaggaggggaggtgatttggagtttggtatgtttttgtggttgggttatatttaggttggttttagggtgttgttgttgaagtttaatgggaataatagattttttttgagatataaggaatttagaggttgttttatttattttgagtttgagtatttatttgtgttaggttttgtggggaaattgaggttttgggaggggaatgatttgttagggttttgtgttaggaggttgagtaggtagattataggattttatgtttttggtttttatttttgtttttttgtttagatttttgagttgatagagaagaaataggttgtgttgtgtttttaatgggaaatatggttgagataggggagtgagaaggttgtattgtagaatggtatttgtggtatgatgttagttttgtaattatgagatttaaaagttatattgtggaattgtgagtataattataggagtgagagtttaggtttttgtgtttgtagaagtagaattaaatttggatattgttggattattaaaattatttatttttgttttaatattagagttataagggtagatgttggttttttttttgttttttaagagttgtgtgattttgggtaagttatttttttttttagtttaagattttttttttttaaaaaatttgatagagt

SEQ ID NO: 2228 - DNA, 2495 bp, Artificial Sequence
  chemically treated genomic DNA (Homo sapiens)
ggttttatgattagttttgttttatatgggaggaaattgaggtttagaaaagtgatttggttagtttttttgtttttgtttaatggtttagtgaggatttgttgattgtgagaatgattttagtttagagtatgtttttaggttgtggtgaggttttggtttagggtaggtttggaagtagtttgtttttagattgatatgatgttagtttttaggtggtaggagtataatggtattttttagaaaggagggaggtatttagtttgggtttttgagtttttttttgtttgtttgtttaaatagagataagttttgttttgttgtttaggttggagtttggagtgtagtggaatgattatggtttattgtagtttttattttttgggttaaagtgatttttttattttagttttttgagtagttgggattataggtatatattattatgtttggttaattttttaattatttttggtagagatagggttttgttatgttgtttgggttggttttgaatttttggttttaagtgattgttttattttggttttttaaagtgttaggatgatagattattttttttgtttagttggtttttttgtttttagtttgtgttaggtatggttttttttttattgttgggttgttttttggtttttaggagttttttttttgttgtttattggattattgtttgttttggagttttttttgggttttaggttttagtttttgtgttggagttggtggtttttttagagtttgtggtgaaggttgtgttttagggtaggttagggaggggatttatggggatagattgttgaagtgataagtatttataatgtagggattattgttgggtttttagataagttttagaggattagtttttggtagtggttatattgttatgtgttttagagtttattttgggagattttttttttggagaattttaggaagtttttagagtttttgtttgttagtttttgagaggtttagagggggtagagatttatttgaggttattgagttgttttgaatttttttttgtattattgggtttaaagatttatttttttatgttgtttggaattgttggtttagtttggaggtgtagtgtagggataggttgtttttgtttggtaggagtttttttttatggtttgtaggtttggtagttgggatagggttgaatgggaggtattgttggtagattaggtaagttaggtttttttaggttgaggtgaagaaggggtgggtggtgggtgggagtagtggttggagttatagggttttttgtttgttttagttgaggattgaggttttggtttgaatttttgggttagtttgatagggagggggtattagtagttggtttgggagttagtagttttgggtttttttttgttatgtgggttgtttttttagaggttgttttttagtttttgaaaaatatattttattaataagtagttttgaggttatagtgggggtttaggtttgtatttggtatatagtgggtgttttagaataggtgattttttttttttgtttgtgtttatatattgatataaatagtttaatattggatatataggattttagatatttattttttttatttaattttagattattgggagttatttaaattgatttttttgaattttattattttgtggtatatagtattttattgtgtaaatgtattatattgatttagttatttattttggatattggttatttttaattttttgttatttataaataatattgtaaagaatatttaaatatgtatttttttaagtttgtgtttgttttttaaataatatatttagattatggttaatgtttatgtattttgattttttagatttttgtttttgatggaattgtattttttattgtttgtttttttaattggaaataggggttaggtatagtggtttatgtttgtaattttagtattttgggaggttgaggtgggaggattatttgagtttaggagtttgagattagtttgggtaatatagattttgttttaagagaaaaaaaaaaggttgggtgtggtggtttatgtttgtaattttagtattttgggaggtggaggtgggtggattatgaggttgagattaagattattttggttaatatagtgaaattttatttttattaaaagtataaaaaattagttgggtgtggtggtaggtgtttgtagttttagttatttgggaggttgaggtaggtaaatggtatgaatgtgagagttgagatggtgttattgtattttagtttgggtaatagagtgaaattgttttaaaaaagaaaaaaaatatatatatatatatatatatatatatatatatatatatatatatatatatatatatgtatgtgtgtgtgtatatatttatgtgtgtatatatttatatataataaaaatataaatgtatatgtttatatatatttatatatgttaaataatgaat

SEQ ID NO: 2229 - DNA, 2495 bp, Artificial Sequence
  chemically treated genomic DNA (Homo sapiens)
gtttattgtttaatatatataaatatatataaatatatatatttatatttttattatatataaatatatatatatataagtgtatatatatatatatatatatatatatatatatatatatatatatatatatatatatatatatatatgtatatatttttttttttttttgagatagttttattttgttgtttaggttagagtgtagtggtgttattttggtttttgtgtttatgttatttgtttgttttagttttttaagtagttgggattataggtgtttgttattatatttggttaattttttgtatttttagtagagatagggttttattgtgttagttaggatggttttgattttgattttgtgatttatttgtttttgttttttaaagtgttgggattataggtgtgagttattgtgtttggtttttttttttttttttgagatagagtttgtgttgtttaggttggttttaaatttttgggtttaagtgatttttttattttagttttttaaagtgttgggattataggtatgagttattgtgtttgatttttgtttttaattaaaggaataaatagtagaagatgtaattttattagaagtaggaatttgaaaaattaagatatatgaatattggttatggtttggatgtattatttaaaaaataaatatgagtttgggaagatgtgtatttggatattttttgtaatattgtttgtaaatagtaaaaaattggaggtagttaatgtttaagatgaatggttaagttaatgtgatatatttatataatggaatattatatattatagaataatgagatttggaagagttaatttggataatttttagtaatttgaggttaagtgaaaaaaatgagtgtttagaattttgtgtgtttagtattaaattatttatgttaatgtgtaagtataaatggaaggaaagggttatttgttttgaagtatttattgtgtgttaggtgtgggtttgaatttttattgtgattttagagttatttattaatgggatgtgttttttagagattaggaagtagtttttgggagggtagtttatatggtaggagggagtttaggattgttgatttttgggttagttgttggtgttttttttttgttgggttggtttaaggatttaggttggggttttagtttttggttggggtaggtaggaggttttgtaattttagttgttgtttttgtttgttgtttgttttttttttattttagtttggggaagtttggtttgtttggtttgttgataatgttttttatttagttttgttttagttgttaggtttgtgggttgtggaggggggtttttgttaggtggggatagtttgtttttgtgttgtgtttttaggttggattagtagttttaggtggtatggaggggtgagtttttgggtttgatggtgtaaggggggatttagagtagtttagtggttttaggtaagtttttgttttttttgggttttttagaggttggtgggtaggggttttggggattttttggggttttttaggaagggggttttttaaggtgggttttgagatatgtggtaatgtggttattgttaggaattggttttttggggtttgtttgagagtttagtagtggtttttgtattatgaatgtttgttgttttagtgatttgtttttatgggttttttttttggtttgttttgaggtatagtttttattataggttttggagaagttattaattttaatgtaggggttggagtttgggatttaaaggagattttaaaatagatgatagtttagtgagtagtgagggggaggtttttgggggttggggaatagtttagtgatgggggagaggttatgtttgatataggttgagaatagaggggttagttgggtaggggaggtgatttattattttagtgttttgggaggttaaggtgggataattatttgaggttaggagtttaagattagtttgggtaatatagtgagattttgtttttattagaagtaattaaaaaattagttaggtgtggtggtgtgtgtttgtagttttagttatttaagaggttgaggtgagaggattattttagtttaggaggtgaaggttgtagtaagttatagttattttattgtattttagattttagtttgggtaatagagtaaggtttgtttttatttaaataaataaataaaaaaagatttaaggatttggattggatgttttttttttttttggggggtattattatgtttttgttatttgggagttggtattatattagtttgaggataggttgtttttgagtttattttggattagagttttattatagtttgagaatatgttttgaattggagttatttttatagttagtaagtttttattgagttattgggtagaggtaaagggattaattaggttatttttttgagttttggtttttttttatgtaaaataggattaattataggatt

SEQ ID NO: 2230 - DNA, 2492 bp, Artificial Sequence
  chemically treated genomic DNA (Homo sapiens)
taaaaattttttagagtttttttttttgggtttaggaaagtgttaattattttgagtttttttgttttttattttttatgtagtggaggttttatgattagttttgttttatatgggaggaaattgaggtttagaaaagtgatttggttagtttttttgtttttgtttaatggtttagtgaggatttgttgattgtgagaatgattttagtttagagtatgtttttaggttgtggtgaggttttggtttagggtaggtttggaagtagtttgtttttagattgatatgatgttagtttttaggtggtaggagtataatggtattttttagaaaggagggaggtatttagtttgggtttttgagtttttttttgtttgtttgtttaaatagagataagttttgttttgttgtttaggttggagtttggagtgtagtggaatgattatggtttattgtagtttttattttttgggttaaagtgatttttttattttagttttttgagtagttgggattataggtatatattattatgtttggttaattttttaattatttttggtagagatagggttttgttatgttgtttgggttggttttgaatttttggttttaagtgattgttttattttggttttttaaagtgttaggatgatagattattttttttgtttagttggtttttttgtttttagtttgtgttaggtatggttttttttttattgttgggttgttttttggtttttaggagttttttttttgttgtttattggattattgtttgttttggagttttttttgggttttaggttttagtttttgtgttggagttggtggtttttttagagtttgtggtgaaggttgtgttttagggtaggttagggaggggatttatggggatagattgttgaagtgataagtatttataatgtagggattattgttgggtttttagataagttttagaggattagtttttggtagtggttatattgttatgtgttttagagtttattttgggagattttttttttggagaattttaggaagtttttagagtttttgtttgttagtttttgagaggtttagagggggtagagatttatttgaggttattgagttgttttgaatttttttttgtattattgggtttaaagatttatttttttatgttgtttggaattgttggtttagtttggaggtgtagtgtagggataggttgtttttgtttggtaggagtttttttttatggtttgtaggtttggtagttgggatagggttgaatgggaggtattgttggtagattaggtaagttaggtttttttaggttgaggtgaagaaggggtgggtggtgggtgggagtagtggttggagttatagggttttttgtttgttttagttgaggattgaggttttggtttgaatttttgggttagtttgatagggagggggtattagtagttggtttgggagttagtagttttgggtttttttttgttatgtgggttgtttttttagaggttgttttttagtttttgaaaaatatattttattaataagtagttttgaggttatagtgggggtttaggtttgtatttggtatatagtgggtgttttagaataggtgattttttttttttgtttgtgtttatatattgatataaatagtttaatattggatatataggattttagatatttattttttttatttaattttagattattgggagttatttaaattgatttttttgaattttattattttgtggtatatagtattttattgtgtaaatgtattatattgatttagttatttattttggatattggttatttttaattttttgttatttataaataatattgtaaagaatatttaaatatgtatttttttaagtttgtgtttgttttttaaataatatatttagattatggttaatgtttatgtattttgattttttagatttttgtttttgatggaattgtattttttattgtttgtttttttaattggaaataggggttaggtatagtggtttatgtttgtaattttagtattttgggaggttgaggtgggaggattatttgagtttaggagtttgagattagtttgggtaatatagattttgttttaagagaaaaaaaaaaggttgggtgtggtggtttatgtttgtaattttagtattttgggaggtggaggtgggtggattatgaggttgagattaagattattttggttaatatagtgaaattttatttttattaaaagtataaaaaattagttgggtgtggtggtaggtgtttgtagttttagttatttgggaggttgaggtaggtaaatggtatgaatgtgagagttgagatggtgttattgtattttagtttgggtaatagagtgaaattgttttaaaaaagaaaaaaaatatatatatatatatatatatatatatatatatatatatatatatatatatatatatgtatgtgtg

SEQ ID NO: 2231 - DNA, 2492 bp, Artificial Sequence
  chemically treated genomic DNA (Homo sapiens)
tatatatatatatatatatatatatatatatatatatatatatatatatatatatatatgtatatatttttttttttttttgagatagttttattttgttgtttaggttagagtgtagtggtgttattttggtttttgtgtttatgttatttgtttgttttagttttttaagtagttgggattataggtgtttgttattatatttggttaattttttgtatttttagtagagatagggttttattgtgttagttaggatggttttgattttgattttgtgatttatttgtttttgttttttaaagtgttgggattataggtgtgagttattgtgtttggtttttttttttttttttgagatagagtttgtgttgtttaggttggttttaaatttttgggtttaagtgatttttttattttagttttttaaagtgttgggattataggtatgagttattgtgtttgatttttgtttttaattaaaggaataaatagtagaagatgtaattttattagaagtaggaatttgaaaaattaagatatatgaatattggttatggtttggatgtattatttaaaaaataaatatgagtttgggaagatgtgtatttggatattttttgtaatattgtttgtaaatagtaaaaaattggaggtagttaatgtttaagatgaatggttaagttaatgtgatatatttatataatggaatattatatattatagaataatgagatttggaagagttaatttggataatttttagtaatttgaggttaagtgaaaaaaatgagtgtttagaattttgtgtgtttagtattaaattatttatgttaatgtgtaagtataaatggaaggaaagggttatttgttttgaagtatttattgtgtgttaggtgtgggtttgaatttttattgtgattttagagttatttattaatgggatgtgttttttagagattaggaagtagtttttgggagggtagtttatatggtaggagggagtttaggattgttgatttttgggttagttgttggtgttttttttttgttgggttggtttaaggatttaggttggggttttagtttttggttggggtaggtaggaggttttgtaattttagttgttgtttttgtttgttgtttgttttttttttattttagtttggggaagtttggtttgtttggtttgttgataatgttttttatttagttttgttttagttgttaggtttgtgggttgtggaggggggtttttgttaggtggggatagtttgtttttgtgttgtgtttttaggttggattagtagttttaggtggtatggaggggtgagtttttgggtttgatggtgtaaggggggatttagagtagtttagtggttttaggtaagtttttgttttttttgggttttttagaggttggtgggtaggggttttggggattttttggggttttttaggaagggggttttttaaggtgggttttgagatatgtggtaatgtggttattgttaggaattggttttttggggtttgtttgagagtttagtagtggtttttgtattatgaatgtttgttgttttagtgatttgtttttatgggttttttttttggtttgttttgaggtatagtttttattataggttttggagaagttattaattttaatgtaggggttggagtttgggatttaaaggagattttaaaatagatgatagtttagtgagtagtgagggggaggtttttgggggttggggaatagtttagtgatgggggagaggttatgtttgatataggttgagaatagaggggttagttgggtaggggaggtgatttattattttagtgttttgggaggttaaggtgggataattatttgaggttaggagtttaagattagtttgggtaatatagtgagattttgtttttattagaagtaattaaaaaattagttaggtgtggtggtgtgtgtttgtagttttagttatttaagaggttgaggtgagaggattattttagtttaggaggtgaaggttgtagtaagttatagttattttattgtattttagattttagtttgggtaatagagtaaggtttgtttttatttaaataaataaataaaaaaagatttaaggatttggattggatgttttttttttttttggggggtattattatgtttttgttatttgggagttggtattatattagtttgaggataggttgtttttgagtttattttggattagagttttattatagtttgagaatatgttttgaattggagttatttttatagttagtaagtttttattgagttattgggtagaggtaaagggattaattaggttatttttttgagttttggtttttttttatgtaaaataggattaattataggatttttattgtgtggggggtggggggtagggaggtttagggtgattggtatttttttgggtttaaaggaggaggttttgaggggtttttg

SEQ ID NO: 2232 - DNA, 2354 bp, Artificial Sequence
  chemically treated genomic DNA (Homo sapiens)
aatatttatatttgttaggagttgtagttattgattggtagtgttttatttatttattgaatattggttgagtatttgtaatgtgttaggtatgttgttagttaaggaggtagttattaaatatatagataaataaataaatgtgagatgataatagttatgagtgttttgtagtagatgtgtagggatttgtgagagaatgtagtagggagggttttaatttagggtgtgtggttagggaaggttttgttaaagatgtagtttttaagttgagatgtaaaggaggtagtgaagagttttttttagtagagggaatattatgagtataggttttggggtggatgttttagaatattttagaaatggaaaggaggttagtgagaaaaagggagtttaggagtagaggttggggaaggttgtagggttttaggggtattggaggtaggtagggtaaggattttggattttattttgagtatagggtgatggggtaggagagtttaagtagggagggtgaaatttattttgattggtagttttgtgaaagaggattggttgggtatggagatttaaggatgaggaaaggatattttagagtgttagggtgtgtaaattaaattttatattttaggaagatagaggttagaggaattaggagggttttttggaggaggtggtatttattttgggtttaagagattataggaaaatggaggttagtattttaggtttggggaagagtttgggtaaaggtttggtagtaagagaataaaggtggggtttgatgggttagaggataagtgattttttaaggttataagatattttgatggttgggattttatttttgatggagtaaggtttttgatatttaattgaggtttggtgttaaggattgatattaaggaagtggatttttgtaaatttggtatttgagggtttatttttttaatttttgtgtagttgggaggtgaggtaagaggaagtgtgggttataggttaggtttagagagtttggaggaggagtttttgttagattggagagaagtaggtttgagtttttttaaaggtagtttttggggatttttaggattataggttgagatgagatgtagggtggttggaggaagtgagaggtgaatttagtttgggattggttgggtgagattttttatttgttttttgggattattgtttattatggttgtggtttagtagttgtgggttgagaggtgagtgttggggtgtggttgtttttgggtttttttattgttttttataggttttagggataaaggttagtttttttgtagtttttgattaatatgagaggttggggttgagttagaatttaaatatttagaaatgtaattttttagaattgttttaatgaaattttgagttgtggtttattatttttagatataaatgagaatattgaggttttaagagtgggagtgatttgtttatggttatataatgagtgattggtagtgtttggagaggaatgtaggtgttttgggttttaggttggggttttttgttttatatggtgattagtaatgattttttattttttgtgtaaatagaatttatagaatttggtttgtttttttgttaattagggtttgttttaaatgttattttttttaagaagtttttttgatagtttttattttattgttgtttgattttttgttttattttttttttttgtttggtttttatattataggaataatattatatgtttatttattatttttttttgaatgttggtttttttatgagaagtaagttttatgaggttgtgtttgttttgattgttgttgtattattaggaggtagtttatttttattgagtattaggattaagggtttaataaatgttgttgaatgaatgaataaatgaatgaatgaatgggtggatttttgagatggaaaaggttttagatttttttagtttaattttgttattgtatagattggaaatttgaggtttagggaggataagagatttatttagggttatagagagtgattggtaaggttggggtttggagtatggttttattagtatttagttttgttgtttgggaagtatttttagaatttttttttagtagttaggtttgagttttaagttgtgggggttttgaggatgtaaagtttggtttttgtattttttggattggaatagtaggtgatttttgttatttatgtggaggttatttagggggttattagagataggttaggttggtgtgtgtttatgtggggaatagaaggtttatgttggggtttggggttggaagtagaatttgaagtgtgggttggggtaagggtagtagaag

SEQ ID NO: 2233 - DNA, 2354 bp, Artificial Sequence
  chemically treated genomic DNA (Homo sapiens)
tttttgttgtttttgttttaatttatgttttaggttttatttttagttttaggttttaatatgggttttttgttttttgtgtaggtatatattagtttggtttgtttttggtgattttttgagtggtttttatgtaggtaatagaggttatttgttgttttaatttagggggtgtaggggttaggttttgtgtttttagggtttttgtagtttagagtttagatttggttattgaggaaaaattttgaaaatgttttttaagtgatgaggttagatgttggtgaggttgtgttttaagttttaattttgttagttattttttgtgattttgagtaagttttttattttttttgggttttagatttttaatttgtataatggtaaggttggattagaagaatttaagattttttttgttttaaagatttatttatttatttatttatttatttatttatttagtaatatttattgagtttttggttttggtgtttaatagggatgagttattttttagtgatatagtagtgattaaaatggatatagttttgtggagtttgttttttatgggggagttaatgtttaagaaaaaataataaatgagtatataatattatttttgtaatataagaattaggtagaaaagggaaatagggtaaagggttagatagtaatgaggtaggggttgttaggaaggttttttggaggaggtgatatttgaggtaagttttgattagtggaagaataagttagattttgtgaattttgtttgtgtagaagatggaaagttattgttgattattatgtgaagtaaagggttttagtttgggatttaggatatttgtatttttttttagatattgttggttatttgttgtgtgattgtgggtaagttatttttatttttggagttttagtgtttttatttgtgtttgagggtggtgagttatagtttaaagttttgttaaagtagttttgagaggttgtatttttgagtatttgggttttgatttaattttagttttttatgttgattagggattgtagaaggattggtttttgtttttaaggtttatgaggagtagtgagaaggtttgggggtggttatattttggtatttattttttggtttgtagttgttgggttatagttatggtgggtgatggttttagggagtaggtggagagttttgtttagttagttttaggttgagtttattttttattttttttagttattttgtgttttgttttagtttgtggttttgggagtttttaggagttgtttttggggaggtttaggtttgtttttttttagtttggtagaggttttttttttaggttttttgggtttagtttgtggtttatatttttttttattttattttttagttgtatagaaattgaggaagtggatttttgggtgttaggtttgtaggaatttatttttttgatgttagtttttggtgttaagttttagttgggtattagaagttttgttttattagagatggggttttagttattagggtgttttgtgattttgaggagttatttattttttggtttattaagttttatttttatttttttattgttaagtttttgtttaaatttttttttaggtttagaatgttggtttttatttttttgtgattttttaggtttagagtaaatgttattttttttaggaagtttttttggtttttttggtttttgtttttttagagtgtgaagtttggtttgtgtgttttggtattttgggatattttttttttatttttagatttttatgtttagttaatttttttttatagggttgttaattagagtgagttttattttttttgtttaaatttttttgttttattattttgtgtttaggataaagtttagagtttttgttttgtttgtttttaatgtttttgaggttttgtagttttttttagtttttgtttttgagtttttttttttttattggttttttttttgtttttagaatgttttaagatgtttgttttaaggtttatgtttatggtgttttttttgttggaaaaagttttttattgttttttttgtattttagtttagaagttatatttttagtgaggttttttttgattatatattttaaattaaggttttttttattatatttttttataggtttttgtatgtttattgtagagtatttataattattgttattttatatttgtttgtttatttgtatgtttaatgattgtttttttggttagtagtgtgtttggtatattgtaagtgtttaattaatatttagtgaatgaatgaaatgttgttagttagtgattgtagtttttaataggtatgggtatt

SEQ ID NO: 2234 - DNA, 2282 bp, Artificial Sequence
  chemically treated genomic DNA (Homo sapiens)
tgtagttattgattggtagtgttttatttatttattgaatattggttgagtatttgtaatgtgttaggtatgttgttagttaaggaggtagttattaaatatatagataaataaataaatgtgagatgataatagttatgagtgttttgtagtagatgtgtagggatttgtgagagaatgtagtagggagggttttaatttagggtgtgtggttagggaaggttttgttaaagatgtagtttttaagttgagatgtaaaggaggtagtgaagagttttttttagtagagggaatattatgagtataggttttggggtggatgttttagaatattttagaaatggaaaggaggttagtgagaaaaagggagtttaggagtagaggttggggaaggttgtagggttttaggggtattggaggtaggtagggtaaggattttggattttattttgagtatagggtgatggggtaggagagtttaagtagggagggtgaaatttattttgattggtagttttgtgaaagaggattggttgggtatggagatttaaggatgaggaaaggatattttagagtgttagggtgtgtaaattaaattttatattttaggaagatagaggttagaggaattaggagggttttttggaggaggtggtatttattttgggtttaagagattataggaaaatggaggttagtattttaggtttggggaagagtttgggtaaaggtttggtagtaagagaataaaggtggggtttgatgggttagaggataagtgattttttaaggttataagatattttgatggttgggattttatttttgatggagtaaggtttttgatatttaattgaggtttggtgttaaggattgatattaaggaagtggatttttgtaaatttggtatttgagggtttatttttttaatttttgtgtagttgggaggtgaggtaagaggaagtgtgggttataggttaggtttagagagtttggaggaggagtttttgttagattggagagaagtaggtttgagtttttttaaaggtagtttttggggatttttaggattataggttgagatgagatgtagggtggttggaggaagtgagaggtgaatttagtttgggattggttgggtgagattttttatttgttttttgggattattgtttattatggttgtggtttagtagttgtgggttgagaggtgagtgttggggtgtggttgtttttgggtttttttattgttttttataggttttagggataaaggttagtttttttgtagtttttgattaatatgagaggttggggttgagttagaatttaaatatttagaaatgtaattttttagaattgttttaatgaaattttgagttgtggtttattatttttagatataaatgagaatattgaggttttaagagtgggagtgatttgtttatggttatataatgagtgattggtagtgtttggagaggaatgtaggtgttttgggttttaggttggggttttttgttttatatggtgattagtaatgattttttattttttgtgtaaatagaatttatagaatttggtttgtttttttgttaattagggtttgttttaaatgttattttttttaagaagtttttttgatagtttttattttattgttgtttgattttttgttttattttttttttttgtttggtttttatattataggaataatattatatgtttatttattatttttttttgaatgttggtttttttatgagaagtaagttttatgaggttgtgtttgttttgattgttgttgtattattaggaggtagtttatttttattgagtattaggattaagggtttaataaatgttgttgaatgaatgaataaatgaatgaatgaatgggtggatttttgagatggaaaaggttttagatttttttagtttaattttgttattgtatagattggaaatttgaggtttagggaggataagagatttatttagggttatagagagtgattggtaaggttggggtttggagtatggttttattagtatttagttttgttgtttgggaagtatttttagaatttttttttagtagttaggtttgagttttaagttgtgggggttttgaggatgtaaagtttggtttttgtattttttggattggaatagtaggtgatttttgttatttatgtggaggttatttagggggttattagagataggttaggttggtgtgtgtttatgtggggaatagaaggtttatgttggggttt

SEQ ID NO: 2235 - DNA, 2282 bp, Artificial Sequence
  chemically treated genomic DNA (Homo sapiens)
aggttttaatatgggttttttgttttttgtgtaggtatatattagtttggtttgtttttggtgattttttgagtggtttttatgtaggtaatagaggttatttgttgttttaatttagggggtgtaggggttaggttttgtgtttttagggtttttgtagtttagagtttagatttggttattgaggaaaaattttgaaaatgttttttaagtgatgaggttagatgttggtgaggttgtgttttaagttttaattttgttagttattttttgtgattttgagtaagttttttattttttttgggttttagatttttaatttgtataatggtaaggttggattagaagaatttaagattttttttgttttaaagatttatttatttatttatttatttatttatttatttagtaatatttattgagtttttggttttggtgtttaatagggatgagttattttttagtgatatagtagtgattaaaatggatatagttttgtggagtttgttttttatgggggagttaatgtttaagaaaaaataataaatgagtatataatattatttttgtaatataagaattaggtagaaaagggaaatagggtaaagggttagatagtaatgaggtaggggttgttaggaaggttttttggaggaggtgatatttgaggtaagttttgattagtggaagaataagttagattttgtgaattttgtttgtgtagaagatggaaagttattgttgattattatgtgaagtaaagggttttagtttgggatttaggatatttgtatttttttttagatattgttggttatttgttgtgtgattgtgggtaagttatttttatttttggagttttagtgtttttatttgtgtttgagggtggtgagttatagtttaaagttttgttaaagtagttttgagaggttgtatttttgagtatttgggttttgatttaattttagttttttatgttgattagggattgtagaaggattggtttttgtttttaaggtttatgaggagtagtgagaaggtttgggggtggttatattttggtatttattttttggtttgtagttgttgggttatagttatggtgggtgatggttttagggagtaggtggagagttttgtttagttagttttaggttgagtttattttttattttttttagttattttgtgttttgttttagtttgtggttttgggagtttttaggagttgtttttggggaggtttaggtttgtttttttttagtttggtagaggttttttttttaggttttttgggtttagtttgtggtttatatttttttttattttattttttagttgtatagaaattgaggaagtggatttttgggtgttaggtttgtaggaatttatttttttgatgttagtttttggtgttaagttttagttgggtattagaagttttgttttattagagatggggttttagttattagggtgttttgtgattttgaggagttatttattttttggtttattaagttttatttttatttttttattgttaagtttttgtttaaatttttttttaggtttagaatgttggtttttatttttttgtgattttttaggtttagagtaaatgttattttttttaggaagtttttttggtttttttggtttttgtttttttagagtgtgaagtttggtttgtgtgttttggtattttgggatattttttttttatttttagatttttatgtttagttaatttttttttatagggttgttaattagagtgagttttattttttttgtttaaatttttttgttttattattttgtgtttaggataaagtttagagtttttgttttgtttgtttttaatgtttttgaggttttgtagttttttttagtttttgtttttgagtttttttttttttattggttttttttttgtttttagaatgttttaagatgtttgttttaaggtttatgtttatggtgttttttttgttggaaaaagttttttattgttttttttgtattttagtttagaagttatatttttagtgaggttttttttgattatatattttaaattaaggttttttttattatatttttttataggtttttgtatgtttattgtagagtatttataattattgttattttatatttgtttgtttatttgtatgtttaatgattgtttttttggttagtagtgtgtttggtatattgtaagtgtttaattaatatttagtgaatgaatgaaatgttgttagttagtgattgta

SEQ ID NO: 2236 - DNA, 2398 bp, Artificial Sequence
  chemically treated genomic DNA (Homo sapiens)
tagagattaaatggaggtgtgttaagtatagtgttgggtatggagggggagtttaggagagttgttatgtgagttggggaagttaatgatatgatatatttggttttttttagttttgatagtttgtgattttgtgattttgagattttagaattatggtatgagattttgagattaatgtttttgtttttgtagttgattgggaggttataggaaggttttttttttgtttttttgggagtttttattttttgtttttttagttttagttttttaagtttattttgggtagaggatgggtttttaggattttattttttgggatattatttgggttttagtttttttatttgtttatggggtgagggtttttttttttgttgttaggttggttattattttgttgttttttttttttgtttagtttttaggtgtttttagggtatttttaattagggtttttataaggtatttatttttagattgtttgtgggtttaggtttttttttaggtttttggttatggttgtttatagagttttttttatttggtttttggttttgattttttaattagagtttggtatgttattttttatttttaggatatattttgggggggtaggggtaaggataggggggagaagttttttagggtgaggaagagaagaggggagtaagggatatagaagttaatagaaatagaggggaaagggggttgggaggaggtggagaaagagagagagagagaaagagggagggggagagagagagagggagagggagaggagattgtgagtaggaggaaaggtagaatgagggggagtgatgagagatgtgtgatagggagaagatgagaaggaaagagaggagaggagatatgggtgagagggagagatgtagagagaggtaggagggaggaaggagaatgagggggtggtagggagagtgatagagagggattgtgttatagatggtgatatggagtttgtgaaggagggagtaagtagggaggggttgagggttggagagtaggtgtggggggtgggggtggggtgtaggttaagggaggaggtttggagagggagtaggaggggtgtagattttgttattggggagattttagttatttatgtttgttggttttggtttttgtagggagttggagagaagaatgtgtttagtgtttaggggagttgaggttgttagttagtagttagagtagtttgtgaggttattgtggtataggttttttggggtagtagttgtgttttaaggtaaggttgggtgtggggttggttagtttgggagtttatagtttagttttgtagttgggtatattggttgtagtatggattattggggaggttgggtgggggttattagttttgggattggttatatttggagagttttaggtagggtgaggagtggaaggatagaatagagaattaatattttaggttttgagggtaaaattattgtgtagtgagaaaatagatttttattattttgtaattgataaaatttaaaatagaataataataattgaggttagtattttgtaatgtaggtttatttatgagaagaatagagttttttttatagatattattttttgtttaattggagtttagagttagtgttttattaaattgattgtaaatgtttatttgtaaaaattatttttagtttttaggttgtataaaaataggtagtgggtgggatttgttttgtgggttatatttattgatttttggtttaagagattttgttgtatagttttgagtataggtttagatgttttgggatgttgtgtttttgtttgtgttgatttttgttttagtataggagtgataaggaaaggaatagttagagatggaagggaaaaggatatatgttttggttgagtatttattatgtgttaggttgtatttaggttgttttttaaattgggttattttttgggattagggttggattttttttgttattaggtatttggtattgtagagaattggaagttgaatgtatttagaggtgttattatgtatgtggtagtatatagtaggatatatttatttttagttggagttggtttggttttttaatgttgtttgtttttttgttttgtgtttgggataaggtttttgttttaggttttagttttttattgtttttgtttgtataagtttatgaggtgtgggtgggtttttgggagtgtgtttttagggttaagggtgggttttttatggtattgattatttatttttatttatggttttttattgtttttagaataaagtttttttgttgtagtttatttggtattgtatttttgatttttgttgtttgtgtgggtttttttttttgttgattttatttgtttttttgtgttt

SEQ ID NO: 2237 - DNA, 2398 bp, Artificial Sequence
  chemically treated genomic DNA (Homo sapiens)
gggtatagaggagtgagtgaaattagtagaggaggaggtttgtgtaggtggtaggaattaaggatgtagtgttaggtgggttgtggtgagagagttttattttgagggtagtgagaagttgtgggtaggggtgggtggttagtgttatggaaaatttatttttgattttgaggatatgtttttaggagtttatttatattttatgaatttgtatggataaggataatgggaggttgagatttggagtaagggttttgttttgggtataaggtaaagggatgggtagtgttaagagattaggttggttttggttggaagtgggtgtgttttattgtgtgttgttgtatgtatggtggtatttttggatgtatttaatttttagttttttgtagtgttaggtatttagtgataaaggaggtttagttttggttttagggaatggtttagtttggaaagtagtttaggtatagtttggtatatagtaggtgtttagttaagatgtgtgttttttttttttttgtttttgattgtttttttttttattatttttgtgttgaggtaggaattagtataggtaggggtatggtattttaagatatttgggtttgtgtttaggattgtatggtagagttttttagattaaagattagtaaatatggtttatggggtaaattttatttattgtttgtttttgtatagtttaggagttgagaatggtttttatggatgaatatttgtaattggtttgatgaaatattaattttaaattttaattaagtaaaaggtgatgtttgtaaaaagaattttattttttttatgagtggatttatattataaaatattggttttaattattattattttattttgagttttgttagttataaaatagtaaaaatttgtttttttattgtataatgattttgtttttaaagtttaaaatattggttttttgttttgtttttttattttttattttgtttggggttttttagatgtaattaattttaggattaatgatttttatttggtttttttagtggtttgtgttgtggttggtgtgtttgattgtagggttggattgtggatttttgggttggttagttttatatttagttttgttttgggatatagttgttgttttgggggatttgtgttgtagtggttttatgagttgttttggttattggttggtagttttggtttttttgagtattgagtatatttttttttttaattttttgtaggagttaaggttagtgggtgtgggtggttgaaatttttttggtaatagggtttgtgttttttttgttttttttttgggtttttttttttaatttgtattttgtttttattttttatatttgttttttggtttttagtttttttttgtttatttttttttttatgggttttatgttattatttgtggtatagtttttttttgttattttttttgttatttttttattttttttttttttttttgtttttttttgtattttttttttttatttgtgttttttttttttttttttttttttgttttttttttgttatgtattttttattatttttttttattttgtttttttttttatttatggttttttttttttttttttttttttttttttttttttttttttttttttttttttttttttttatttttttttgatttttttttttttttatttttattggtttttgtgttttttgtttttttttttttttttttattttgggaagttttttttttttatttttgtttttgtttttttaggatgtgttttggagatggggggtgatgtattaggttttggttgggaagttagggttggagattagatgggagaggttttgtggatagttgtggttgagggtttgggagggaatttgagtttgtaagtggtttagaagtgggtgttttgtggggattttagttaggagtgttttgggggtatttggggattgggtagggagaggggatagtagaatgataattagtttggtggtaaggagggaagtttttattttatgggtaggtaaggaggttggggtttggatgatgttttgaagggtggggttttggaagtttattttttgtttaggatgaatttgggaggttggggttggggaggtagagggtggggatttttagggaggtaggagggaggtttttttgtgattttttggttggttgtaggggtaggggtgttagttttagaattttgtgttatgattttaggattttggaattatagaattgtaggttgttagggttggagggagttagatgtattatgttgttggtttttttagtttatgtggtagtttttttgagttttttttttatatttggtattgtgtttggtatgtttttgtttaatttttg

SEQ ID NO: 2238 - DNA, 2479 bp, Artificial Sequence
  chemically treated genomic DNA (Homo sapiens)
tggaagataagtggatttattttttagggttgtttgtagagattaaatggaggtgtgttaagtatagtgttgggtatggagggggagtttaggagagttgttatgtgagttggggaagttaatgatatgatatatttggttttttttagttttgatagtttgtgattttgtgattttgagattttagaattatggtatgagattttgagattaatgtttttgtttttgtagttgattgggaggttataggaaggttttttttttgtttttttgggagtttttattttttgtttttttagttttagttttttaagtttattttgggtagaggatgggtttttaggattttattttttgggatattatttgggttttagtttttttatttgtttatggggtgagggtttttttttttgttgttaggttggttattattttgttgttttttttttttgtttagtttttaggtgtttttagggtatttttaattagggtttttataaggtatttatttttagattgtttgtgggtttaggtttttttttaggtttttggttatggttgtttatagagttttttttatttggtttttggttttgattttttaattagagtttggtatgttattttttatttttaggatatattttgggggggtaggggtaaggataggggggagaagttttttagggtgaggaagagaagaggggagtaagggatatagaagttaatagaaatagaggggaaagggggttgggaggaggtggagaaagagagagagagagaaagagggagggggagagagagagagggagagggagaggagattgtgagtaggaggaaaggtagaatgagggggagtgatgagagatgtgtgatagggagaagatgagaaggaaagagaggagaggagatatgggtgagagggagagatgtagagagaggtaggagggaggaaggagaatgagggggtggtagggagagtgatagagagggattgtgttatagatggtgatatggagtttgtgaaggagggagtaagtagggaggggttgagggttggagagtaggtgtggggggtgggggtggggtgtaggttaagggaggaggtttggagagggagtaggaggggtgtagattttgttattggggagattttagttatttatgtttgttggttttggtttttgtagggagttggagagaagaatgtgtttagtgtttaggggagttgaggttgttagttagtagttagagtagtttgtgaggttattgtggtataggttttttggggtagtagttgtgttttaaggtaaggttgggtgtggggttggttagtttgggagtttatagtttagttttgtagttgggtatattggttgtagtatggattattggggaggttgggtgggggttattagttttgggattggttatatttggagagttttaggtagggtgaggagtggaaggatagaatagagaattaatattttaggttttgagggtaaaattattgtgtagtgagaaaatagatttttattattttgtaattgataaaatttaaaatagaataataataattgaggttagtattttgtaatgtaggtttatttatgagaagaatagagttttttttatagatattattttttgtttaattggagtttagagttagtgttttattaaattgattgtaaatgtttatttgtaaaaattatttttagtttttaggttgtataaaaataggtagtgggtgggatttgttttgtgggttatatttattgatttttggtttaagagattttgttgtatagttttgagtataggtttagatgttttgggatgttgtgtttttgtttgtgttgatttttgttttagtataggagtgataaggaaaggaatagttagagatggaagggaaaaggatatatgttttggttgagtatttattatgtgttaggttgtatttaggttgttttttaaattgggttattttttgggattagggttggattttttttgttattaggtatttggtattgtagagaattggaagttgaatgtatttagaggtgttattatgtatgtggtagtatatagtaggatatatttatttttagttggagttggtttggttttttaatgttgtttgtttttttgttttgtgtttgggataaggtttttgttttaggttttagttttttattgtttttgtttgtataagtttatgaggtgtgggtgggtttttgggagtgtgtttttagggttaagggtgggttttttatggtattgattatttatttttatttatggttttttattgtttttagaataaagtttttttgttgtagtttatttggtattgtatttttgatttttgttgtttgtgtgggtttttttttttgttgattttatttgtttttttgtgttttaggtgtatttagttttatgtatttatttatttatttttgtaggt

SEQ ID NO: 2239 - DNA, 2479 bp, Artificial Sequence
  chemically treated genomic DNA (Homo sapiens)
atttgtaggaataagtgaatgaatatatgaggttgggtatgtttggggtatagaggagtgagtgaaattagtagaggaggaggtttgtgtaggtggtaggaattaaggatgtagtgttaggtgggttgtggtgagagagttttattttgagggtagtgagaagttgtgggtaggggtgggtggttagtgttatggaaaatttatttttgattttgaggatatgtttttaggagtttatttatattttatgaatttgtatggataaggataatgggaggttgagatttggagtaagggttttgttttgggtataaggtaaagggatgggtagtgttaagagattaggttggttttggttggaagtgggtgtgttttattgtgtgttgttgtatgtatggtggtatttttggatgtatttaatttttagttttttgtagtgttaggtatttagtgataaaggaggtttagttttggttttagggaatggtttagtttggaaagtagtttaggtatagtttggtatatagtaggtgtttagttaagatgtgtgttttttttttttttgtttttgattgtttttttttttattatttttgtgttgaggtaggaattagtataggtaggggtatggtattttaagatatttgggtttgtgtttaggattgtatggtagagttttttagattaaagattagtaaatatggtttatggggtaaattttatttattgtttgtttttgtatagtttaggagttgagaatggtttttatggatgaatatttgtaattggtttgatgaaatattaattttaaattttaattaagtaaaaggtgatgtttgtaaaaagaattttattttttttatgagtggatttatattataaaatattggttttaattattattattttattttgagttttgttagttataaaatagtaaaaatttgtttttttattgtataatgattttgtttttaaagtttaaaatattggttttttgttttgtttttttattttttattttgtttggggttttttagatgtaattaattttaggattaatgatttttatttggtttttttagtggtttgtgttgtggttggtgtgtttgattgtagggttggattgtggatttttgggttggttagttttatatttagttttgttttgggatatagttgttgttttgggggatttgtgttgtagtggttttatgagttgttttggttattggttggtagttttggtttttttgagtattgagtatatttttttttttaattttttgtaggagttaaggttagtgggtgtgggtggttgaaatttttttggtaatagggtttgtgttttttttgttttttttttgggtttttttttttaatttgtattttgtttttattttttatatttgttttttggtttttagtttttttttgtttatttttttttttatgggttttatgttattatttgtggtatagtttttttttgttattttttttgttatttttttattttttttttttttttttgtttttttttgtattttttttttttatttgtgttttttttttttttttttttttttgttttttttttgttatgtattttttattatttttttttattttgtttttttttttatttatggttttttttttttttttttttttttttttttttttttttttttttttttttttttttttttttatttttttttgatttttttttttttttatttttattggtttttgtgttttttgtttttttttttttttttttattttgggaagttttttttttttatttttgtttttgtttttttaggatgtgttttggagatggggggtgatgtattaggttttggttgggaagttagggttggagattagatgggagaggttttgtggatagttgtggttgagggtttgggagggaatttgagtttgtaagtggtttagaagtgggtgttttgtggggattttagttaggagtgttttgggggtatttggggattgggtagggagaggggatagtagaatgataattagtttggtggtaaggagggaagtttttattttatgggtaggtaaggaggttggggtttggatgatgttttgaagggtggggttttggaagtttattttttgtttaggatgaatttgggaggttggggttggggaggtagagggtggggatttttagggaggtaggagggaggtttttttgtgattttttggttggttgtaggggtaggggtgttagttttagaattttgtgttatgattttaggattttggaattatagaattgtaggttgttagggttggagggagttagatgtattatgttgttggtttttttagtttatgtggtagtttttttgagttttttttttatatttggtattgtgtttggtatgtttttgtttaatttttgtaaataattttgggaggtgggtttgtttgtttttta

SEQ ID NO: 2240 - DNA, 2500 bp, Artificial Sequence
  chemically treated genomic DNA (Homo sapiens)
tttttgggagtttttttggtgtagttattgggatggaatgtatataggtttttggtagaggtttagattagtaagttgggagggtggggagtgttttagtttttgtgtgggagtgaatgtgggtggggtgtaggattaaggatgtggtttagtggggggtttattaggggttttttagtttttttatttggagaggggtggtgttagtagggttggttttaggattgggattaggatataggttttagagtttttttattttttataaaggaaggtaagttgtaatttttgtgggaagggggtttaagggggtttagttatttgggggatttagtattattagatttgtttattttttttggttagttttagttatttgggggtttagtatttttagatttgtttgttttttttgtttattatttttattaaagtttataggtgggtttgttttaggattttttttgaaatagtttgtatttttggggttatttatggatgggattttatgggtatttttgaatttaagtgggagttggaggagggatatagggaggtttatttattgtttgttttaaatttgatattattttttattttttgggttatttttagttgtatataatttgttggttgggtgggtttaggtgtatgtggtttttatggtatagttatatttgatttttgtgtgtgttttttgtagtgatgtattggttttgtggttggtttgtattggggatgagatggatgtgagttttagggttttgtgtttggtttagttttttgaggtggttatgtataggtagttggtttatgttttatgtttttatatttggggaggggttttgggtggtgggtggaggttttgaatatagtatagggttgggttttgaggaagttttgtgggggatgtgttttgatattggggttatattgaaatttttggttgttttttgtattttttttgggagtttttagtttttggtatttgttttttgttatttgtttttggtatttttgggtaataaagtagagtttagggttttttttttttttgttgtttttattgagtttagatggtatatttttattgtggttttaagagggggtgttatgtgagtttggattttagattttgggggttgggttttttagtgagtttttggtgggggaatagagtgggtagtggtttgtgagggttttgtagaatgggggtttattttttatgtggttagttttggaagatagggttaaatatttggtgggttggtgggtggttggttggtggaggaagtaggaagttggaatgaatttgattataaatagtttatattatgtggtttttgtaggtggaggtgtttatggaaagggttttgggtggttgtggggtgggagggtataggtttttgttttttatagttgtgatggtgttatttaagtataggttgtttttatttgtttttgtagtaatggttttgtttttttattttttttgtttatagtttgggtttggtttttatttatgattagattgaggatattagggatgtttttagaagttttatggatggttttattatatttaaggagaatataatgaggttttggagatttttgaattttgggttttgggtaagagttttgagatttttgattttgatttgtgttgtggttagtgggggttgttagagttgttttttggggtgttatagtttttattattttgtattattatttgtgttatttgtgtttatatttgtttgattttatgggtttttgggtttgagatgtttggttttgagtgtataaattagtgtatggttttgggtttttttttggtttgagagtttttatttggtaggtaggatttttgttttttggttagggtaggggtttttttgagtagtttttttggtagtttggttttatggtgtttatttggtattgtttattataagggtagttgattgtttttatttgtgtttattgggtgtttttgtttgtgttttgtagattggtaggtttaggttatgttggtttttttggttatgtttttagggttatttttttttttttttgaattttttttttttttggtttttttgagtttttttttagtttttatttttttgggtttttttttggtattttgttgttatttgtttggttttattgttggggtttgttttgagtttgatttttttgttttgtttttataggtgttttgtgaataggtgttgttggtgttgttgttgttgttggtgttgttgttgttgttgtttagtgggggtttgtatttgttgtttaagtgaggttttggtggtttagggtggggttggttttatttttatgattattgttttggaggtggtggtttgttgttgttatttttttaattgtttttttatgatgtttttttatatttaaattttgagatagtgttggaatattgttgaggttttatatttaggttttttgttttttttttattttagttttt

SEQ ID NO: 2241 - DNA, 2500 bp, Artificial Sequence
  chemically treated genomic DNA (Homo sapiens)
gaaaattggaataaaaaaaaaataaaaaatttgagtataaaattttagtagtgttttagtattattttggggtttaaatataaaaaggtattatgagaaaatagttaaaaagataatagtagtaggttgttatttttagggtagtggttatgggggtggggttagttttgttttgagttgttggggttttatttgagtagtaggtgtaggtttttgttgagtagtggtagtagtagtgttagtagtagtagtagtgttagtagtatttgtttgtaggatatttgtgggagtaaagtagaggagttaggtttggggtaggttttggtaatggggttagatgggtgatagtggagtgttaaggggaagtttaggagggtggggattgggaaggagtttgaggggattagagaaggaaggagtttaggagagggggaaagtggttttgaggatgtggttagagaggttagtgtggtttgggtttgttagtttgtgggatataggtaaagatatttggtgggtataggtgagggtagttagttgtttttgtggtgggtggtgttgagtggatattatgggattaggttattaggaaggttgtttagggaggtttttgttttggttaggagatgggagttttgtttgttaggtgaaggtttttggattagagggagatttaggattatgtattggtttgtgtatttagaattaggtattttaaatttaaaagtttatgggattaggtagatgtggatataggtgatatagatgatgatatggagtggtggggattgtggtgttttaaggagtggttttgatagtttttattggttgtagtgtaagttagggttagggattttaaggtttttatttaggatttggggtttggggatttttagaattttattatgttttttttaagtgtggtgaaattgtttatgaaatttttaagaatatttttgatgtttttagtttggttgtagatgaaagttagatttaggttatagataaagaggatggggggataaagttattattgtaggagtaggtaggggtagtttgtatttagatgatattattatagttgtggggagtaggggtttgtgtttttttattttatagttatttggggttttttttgtgggtgtttttatttgtaggggttgtgtggtatggattgtttgtggttaaatttattttaattttttgttttttttgttagttagttgtttgttagtttattgggtgtttggttttgttttttagagttggttatgtggaaaataaatttttattttatagggtttttataagttattgtttattttatttttttattggagatttgttgagaggtttagtttttaggatttaggatttgagtttatgtagtatttttttttaagattatggtggaaatgtattatttgggtttaatgaggatggtgagagagaaaagggttttgggttttgttttgttgtttaggaatgttagggataggtggtagggggtgagtgttaggagttgggggtttttaggagaggtgtgggaagtagttaagggttttagtatagttttagtgttaaggtatattttttatagagtttttttagggtttagttttgtgttgtgtttagggtttttatttattgtttagggtttttttttaggtgtagaggtatagggtataggttggttatttgtgtatggttattttggagagttgggttaggtgtggggttttgaggtttatgtttattttgtttttgatgtaggttagttgtagggttaatgtgttattgtagggagtatatataggagttgggtgtggttgtgttgtggaggttatatgtatttggatttatttagttaatggattgtgtgtagttgggagtggtttagaggataagagatggtgttagatttggggtaggtagtgagtgggtttttttgtattttttttttggtttttatttggatttagagatatttatgaggttttatttgtgggtggttttagaggtgtaagttattttaaaaagaattttggggtaggtttatttgtgggttttggtggaaatggtggataaggggaataggtaggtttgggggtgttgagtttttggatggttgaggttgattaaggggaatggataggtttggtggtgttgagttttttggatggttgagtttttttgagttttttttttataggggttgtagtttatttttttttgtgggaggtgagggggttttaagatttgtgttttggttttaattttgaaattagttttgttggtattatttttttttaaatggggggattaagaagtttttagtaggttttttattaaattatatttttgattttatattttatttgtatttatttttatataaagattaagatattttttatttttttagtttgttggtttgggtttttattagggatttgtgtgtattttattttagtgattatattgggggaatttttaggga

SEQ ID NO: 2242 - DNA, 2467 bp, Artificial Sequence
  chemically treated genomic DNA (Homo sapiens)
ttttggaggaggtggggtttggttttggttttggattgttgagattggttatgttgtgttgtttggatgttgggtttttttatttatagttttgtgatttttatgagtttgattttttttgtgttttagtttttttatttataaaatggagataatgtttttgtgtgttgagtttgagtgtggttgtgttgttatattattgttgttgttatgttgttaatgatggtatagtttttatggaaggggggttaaggaaggtatggggatttttttgtaggatatggggtgggtattagttttaagttatgtatataatttattttgaggttaggatttgggttttttttgtgtttattgggggttttagttgttgtttttatttttttaggttttagttttttataatgggtgtgtttttttgtttgagagggaggttttagttaagttttagtttttattgtaaaaagttatatagtaaatatttaatggattttaaatttataaaaattattttatagagttttatgaggtagggaatgttattgtatttattttgtagatgaggaaatttggggtattgatattttttagagttaatatgtaaattaggtatttggtttgagtgatagattggtgtaggtggttagtagtttaatttgtattgagtgtttattgggtttttatagtgattttgaattgtgtttttgtttatagtgatttggttggtttgggtatggtagatttagtggtgggtattgtgggtttggtggttaagagtgtgtggttattttgttttagtgaggtttatgtggaggttatgaaggaggatttggttgagtggtttaatgttttgtatggtttgggttttttgggtggtggtgatggttttttgatagggttggttatgggtatgattttgtgttaatatgttaatgttgtgattgaggttgtttgtgtattggtagttgtttgtttggtttgaggtgtggttttttaggtgtatagtgtagtgtttggtttttttatggtgtgtgataatgtggttatttttattggttggtgttgtgtggagttgggtgtgttggaggtgtttatgtttgagattgaggatttggtgttgtgtaagaatgagaagagtgtggtgttgtgtttgttggaggtggtgtggtgtggggtatgtttgggtttgttggttttatgttttgtgtagtttgagtaggagattgagtgggagttgtgtgttgtatttttagtttttaatgtttttgttgttggggaggatattattgaaattgtttttgtattagggatttttgtttgtggtttttgtatgatatttagtgatttgtgtaattttgatgagttggtgagttttttagtattaggtgttagggatttgatagtatagttagtgtttgtaatttgtttttgaattttttagggtttattttgttatttgtagaatagtttgttttataaaaagagtgtatatgttgagtattaaattgaggaatgtatatttgattttaaggaaatgggtagtttatagagagggaggtgttggggagatgatgtagtttagttgggtttgggataggatgtgggtttttggtatgatttttttttattttgtgtgttaattgtgttttaattgagtttgtgtatttttttttttggggggttgtatgattggggtgttttttttgtgttttttttgtagttagttttaggtagatgtatttataattttatggaggtttgaggttgagtgggtgttgtgatgtttggttgagatgaggtatggaaaaatttgggtaaggtgtttggtatatagtaggtgttttagggggttttgtaggtttttttattttttaggtatttttgggaagtttagttgggttgttgttgttgttgggagtagggattttgtttggaattataggatttgttttattttaagtataggtgttgttgggttttgtttttaagtttttttttttttaggatttgggtggtttttgttatttttgagggttggattaagagttttttttttattagaaggttaggattataatgtgtttgtttgggaggtagatagtggatggtagtgggtagagtttggggttttattttttgttttggattagggttatttaaggttttatttgtttattttttttggtggtattattgttgttgtgggtggggaggtgggtagggttgtttatatagttagtttggtagtgttttggttttggtggggggttgtatgtggtgtgtgtttatttggttagtggtttgtgtgtgtatgtgtttgatgtgtttgtggtatgtttttatattagtgtttatttaggggtatggggttttttgtatttgtgttttgtagtttgtttggtttttttgtgggttttagtttttttgtttgagaagtgggtgaagtgggagtgaggatgggttttgg

SEQ ID NO: 2243 - DNA, 2467 bp, Artificial Sequence
  chemically treated genomic DNA (Homo sapiens)
ttagagtttgtttttatttttgttttatttattttttagataagaaggttggggtttataggaaggttaggtaggttataggatataggtgtagggggttttatgtttttgggtgggtattgatgtggaggtgtattatagatatattggatatatgtatatatagattattggttgggtgagtatgtattatatatagttttttattagagttagagtgttgttaagttggttatgtgggtagttttgtttgtttttttgtttatagtggtagtggtgttgttagaggaaataagtaggtggggttttgagtgattttggtttaggatagggggtggggttttaggttttgtttattgttatttgttatttgttttttaggtaggtatattgtagttttgattttttgataagaaggaaatttttggtttagtttttaggggtggtaggggttatttagattttgggagaggagagatttgggggtagggtttagtaatgtttatgtttagagtagaatgaattttgtaattttaaataggatttttgtttttagtaatagtagtaatttagttaggttttttaggggtgtttggggagtggggagatttgtagagttttttggggtatttattgtgtgttaggtattttgtttaggtttttttatgttttgttttaattgagtattatagtatttgtttaattttgagtttttatgaggttgtgggtatatttgtttaagattgattgtagggagggtatagaggaggtgttttgattatgtggttttttagaagaaggaatgtataagtttagttgaggtatagttagtatataaagtgagggaagattgtgttaggagtttgtattttgttttaggtttggttgggttgtgttatttttttggtatttttttttttgtgggttatttatttttttggggttaggtatatattttttggtttggtgtttaatatgtgtattttttttgtggggtagattgttttgtagatagtagggtggattttgggaggtttagggatagattgtaggtattggttgtgttgttgggtttttggtatttggtgttgggggatttattagtttgttgaggttgtgtaggttgttgggtgttatgtgggggttgtgggtaggagtttttggtgtgggggtggttttagtggtgttttttttagtggtaggggtgttgggggttgggggtgtagtatgtagtttttgtttaattttttgtttaaattgtatgaggtgtggggttagtaggtttaggtgtgttttatgttgtgttatttttagtaggtatagtattatgttttttttgtttttgtgtagtattaggtttttagttttaaatatgagtatttttggtatatttagttttatgtggtattagttgatgaaggtggttatgttgttgtgtgttatgaaggagttaggtattatattgtgtgtttggaaggttatattttgggttgggtgggtggttgttaatgtatgggtagttttggttatggtgttggtatgttggtatagggttgtgtttgtggttagttttgttaggaagttattgttattatttgggagatttaggttgtataaggtattgagttatttggttaggtttttttttatggtttttatgtaggttttattggagtgaaatggttgtatgtttttggttgttgagtttgtgatgtttgttattgggtttgttatgtttggattggttgagttattgtgggtaggaatatagtttaggattgttgtggggatttagtaagtgtttagtataaattaagttgttggttatttgtattagtttgttatttaggttaaatgtttggtttatatgttggttttgggaaatgttggtgttttaagtttttttatttgtgaaatgggtatagtaatattttttgttttataggattttatgggataatttttataaatttagggtttattaagtgtttgttgtgtggttttttgtggtggaaattggggtttggttggggttttttttttaggtagggaggtgtgtttattgtgaagggttgggatttagagaagtgaagataatggttaaggtttttagtggatatgaaaggaatttaggttttgattttagagtgggttatgtgtatggtttagggttggtgtttattttatgttttgtgggaaggtttttgtgttttttttggttttttttttataagggttgtgttgttattaatgatatagtagtagtaatagtgtaatagtatgattgtgtttgggtttagtgtgtggaggtattatttttattttatagatgaggaaattgaggtgtagaaagggttgagtttgtgaaggttgtagagttgtgggtggaggagtttggtgtttaggtggtgtagtgtggttggttttggtgatttggggttagggttaggttttgttttttttaaga

SEQ ID NO: 2244 - DNA, 2385 bp, Artificial Sequence
  chemically treated genomic DNA (Homo sapiens)
tgtggttgtgtgggtattatatatgtgataatttattaagttgtgtttatttatggtttgtttttattgtaggtaagttatatttttataagattgtttggaaagagatattatttattaggtaagaaaaattattaaatggttagaaaaatatttaatgaatgatatgttagatttgttagattttttattttgaaaattattgaggaaagttaaagaatttggttaaatgaattagatttggattatggttggaaaattttatttaaaaaaaaagttggttaggtgtggtggtttatgtttgtaattttagtatttagggaggttgaggtgggtggattatttgaggttaggagtttgagattagtttgattaatatgatgaaattttatttttattaaaaatataaaaaaattagttgggtgtggtggtgtgtgtttgtagttttagttatttagggggttgaggtaggagaattgtttgaatttaggaggtggatgttgtagtgagttgagattgtgttattgtattttagtttgggagatagaatgggattttgttttaaaaaaaaaaaaaatttgttgggtgtggtggtttatgtttgtaattttaatattttgggaggttaaggtgtgtggattgtttgagtttaggagtttttaattagtttggttaatatggtgaaattttgtttttattaaaatataaaatattaattgggtatggtggtgggtgtttgtggttttagttatttaggaggttgaggtaggagaattgtttgaatttgggatatggaggttgtagtgagttaagattgagttattgtattttagtttgggtaatagaatgagattttgttttaaaaaaaaaaaaaaaaaaggatgtttgttttttttaagatttgtagatttaaggtgattttagttaaagttttagtagtttgttgtttttaagttaataagttttaagggttagtatgtattttttgttttgttggttggattgggtttggtgattttgttgttgtaggttttttgtagtataggttttgagagtaatggtgtggttgtttgattgttatggaataaatatatattaggtgagtattagtttgaggttgaggggtatatggagttggtttgagtttagttaggagtttggaagtaagtttagttttttttggttgtgtttttgagggtttgattgtgaaatgtttgtatgtatgggttggagttgtttgttatgtgtggtaattgtggtaggaatttgatttatgtatggatgttagtatttataagtgagaggtgttttagatatgtggtgttggttttggaagtagttggtgggtggtgaggaaatgttatagttttggaaagatagaggtttttgtaaggtggtgttaaaatgttaggttgaattaatagttatttgtggggattttgaaggtaggtaatttgtttagtgaattggtagtattgggtaggagggtttggagggagaattttggtggtatggttggtgtgtgaggattaaaggtagaggagattttttttttttagtatggtaatttggtattgggttaagtttttagttgttttttgttggtgatttggtaaaggggaatataaatttttttggttggtaatattgtttatggtaatattgttttgtggtaggtagattatgtggggattggggagttattggtgtttgggaggttatgttattggtttttttgagtgatttttatatttgggaatgtgttttgtgggttatagttgtgggattgttgtaggaggaattttgttttttgtggggtaagaggtatttttgtgagtgggttttagtttttgaattgtagtgggaattagggaggtggtaatatttgtgtgttgttataaagatttttattatgtttttgtaaagatttttattatattgttttgaagatttttatatatttttgtaaagattttattatattattttaaagatttttatatatatttgtaaagattttattatattattttgaagattttatatatttttgtaaagattttattatattgttttaaagatttttatatatttttgtaaagattttattatattgttttgaagattttatatatttttgtaaagatttttattatgttgttttaaagatttttatatatttttgtaaagatttttattatattattttaaagattttatatatttttgtaaagatttttattatattgttttgaagatttttatatatttttgtaaagattttattatattgttttgaagatttttatatatatttgtaaagattttattatattattttgaagattttatatatttttgtaaagattttattatattgttttg

SEQ ID NO: 2245 - DNA, 2385 bp, Artificial Sequence
  chemically treated genomic DNA (Homo sapiens)
taggatggtgtgatggggtttttatgagggtgtgtggggtttttaggatggtgtgatggggtttttatgagtgtgtgtgggggtttttaggatggtgtgatggggtttttatgagggtgtgtgggggtttttaggatggtgtgatgggggtttttatgagggtatgtggggtttttaggatggtgtgatgggggtttttatgagggtatgtgggggtttttaggatagtgtgatgggggtttttatgagggtgtgtggggtttttaggatggtgtgatggggtttttatgagggtatgtgggggtttttaggatggtgtgatggggtttttatgagggtgtgtggggtttttaggatggtgtgatggggtttttatgagtgtgtgtgggggtttttaggatggtgtgatggggtttttatgagggtatgtgggggtttttaggatggtgtgatgggggtttttatgagggtatggtgggggtttttatgatggtatgtaggtgttgttgtttttttgatttttattgtgatttaggggttgggatttatttatggagatgttttttgttttatgggaggtgaagttttttttgtagtaattttgtggttatggtttgtagggtatatttttaggtgtggggattatttaggaaggttagtgatgtggttttttagatattaatgattttttagtttttatgtggtttgtttgttatagggtagtgttgttgtaagtaatgttgttgattaaaggagtttatgtttttttttattaggttattagtgggaggtagttggaggtttagtttagtgttaaattattatgttgaagaggaaagattttttttgtttttgatttttatatattagttatgttattagggttttttttttagatttttttgtttggtgttgttagtttattgggtggattgtttgtttttagagtttttgtagatgattgttgatttaatttggtattttgatattattttatagaggtttttgtttttttagagttgtgatatttttttattatttattagttgtttttaaagttgatattatgtgtttgaggtgttttttatttgtgggtgttggtgtttgtgtgtgagttaggtttttgttgtagttgttatgtgtggtaaataattttaatttgtgtgtatgagtgttttgtggttaggtttttgagggtatggttgggaggagttgggtttgtttttagatttttggttgggtttaggttagttttatgtgttttttggttttaggttagtgtttgtttggtgtgtgtttgttttgtgatagttaggtaattgtattgttgtttttagagtttgtgttgtaaaaggtttgtggtgatagggttattaggtttagtttggttagtaggataggaagtgtgtgttggtttttggagtttgttggtttaagaatagtaaattgttgggattttgattgggattattttgaatttgtagattttggggagaatggatatttttttttttttttttttttgagatggagttttattttgttgtttaggttggagtgtagtggtttgattttggtttattgtaatttttatattttgggtttaagtaatttttttgttttagttttttgagtagttgggattataggtgtttattattatgtttagttaatattttgtattttagtagagatagagttttattatgttggttaggttggttggaaatttttaagtttaggtaatttatgtattttggttttttaaagtgttgggattataggtgtgagttattatgtttagtagattttttttttttttgagatggagttttgttttgttttttaggttggagtgtagtggtataattttagtttattgtaatatttattttttgggtttaagtgatttttttgttttagttttttgagtagttgggattataggtgtgtattattatgtttagttaatttttttgtatttttagtagagatggggttttattatattggttaggttaattttgaatttttgattttaggtgatttatttattttggtttttttaagtgttgggattataggtgtgagttattgtatttggttgattttttttttaaataaagttttttaattatgatttagatttggtttatttaattgggttttttgattttttttagtggtttttaggatagaaggtttggtaagtttggtatgttatttattagatgtttttttagttatttggtggttttttttgtttagtaaatagtatttttttttaaatggttttgtgaaggtatgatttatttatagtgaggatagattgtaagtagatatagtttgatggattgttatatgtgtgatatttatatagttata

SEQ ID NO: 2246 - DNA, 2500 bp, Artificial Sequence
  chemically treated genomic DNA (Homo sapiens)
aattttttggttttttggagatttttttgtattttttattattttaagtttttagatttaatttttatttaattgtggttggtaagggggagggtagtggaagagagttgggtttttttgataaagttttaattttttggaatttagatgttttttatttttgtttttatttttttgtttttttttaattttttgattattttttaaagtgtaggtgatttattattgttattagggttaggggaagttttttggatagagagtatgggagttttgggttttggttttggttttgttattaatttttatgtgatttttgtgatttttttgtttttttgggtttgttttttggttagtttagtgagaattaggtgattgttattggtttatattttttggagtttttggttttttttagagttgttttggtatttttgggtgggagtgggggattgttttgttttatatatttttaggaggtttggttgaattttagatttgagttgagggtgggataattgttttttgtgggggatgttttttttagaggtgtgggttggttttagggaatttgggattttgagggtttttgggtaggaaggaggttaaggtttttttttggttagagtgtttagttttagttttggggtagtggggaagaggttgtttaatgttggggtggggttttggtagggaagatggtgttgaattgggagagggaggaaagagattagtttggtgattttggggtagggtaggagggggagttttttattgtgtgttttttttttaggaggatgaagaagtttttaatttaaaggagggtggtgttagaaagttttagggaagagttttaggataggatgaggttttgtagtagtagatttgttttgtagttttttattttttatttttttaaagatttttatttgaattttgttttttttaaattttttttgagttttttatttgattgttttagtttttttgaatttttagttaattttttggttttttttaagtgttttttttgtatttttttgattatagtagttggtggtatagtgtgtgtatttgtgggtaggagttagtgaaggtttttttttttttttttaaagttttaggttttatggtttgttatttgtaaaattttaattatgagggggtgtttttttgtttgttgttttgtagggagatttggtttaggttgttggagttttgagttttagggtttttgtgatggaagggtgggtgtggtttttatatttggttttttagttttatttaaggaggattgttagatagttttgttttgaggtgtaggaggttgggttgttttggttattttgaatttatttgaagttagagggtttgagtttggggggtggttgggtgtttatttttagagtttgtttagtgttttgttgagtttagtgttgtgtaggtgtgggtattggtttgtgagttttttgtgtgttgtttgagtttatattatgaaggtgtttatgggttgtttgatgtgtggtttgtttttgttggtgttgttgatgtgtatgggtatgggtattagtgtttagttgtagttgttgagtatttggttgatggttttgtggatgtatatggggaatttgttattgtttgttttgttgttttgttgtttttttttgattttgtttagtttgtttggttttgggttggtttgtaggtttgatttgttgttgttgttgttgggttttagtgagggtgtgttttttggggataggtagtggggtttttttgagtttatggggtttagttttatttttgataggttttgtttttttgttatgttgtttttggttgttgttgttgttgttttggttgttttttttgggttagttgttggggtttttgtaaagagtttaatgtttatttggatggaaggagggtgtgatggagtggttgtgtgtgtagttttgagggtggtttgagataggatgtgggtatagttttgaggtggtggttttttttgttttagttaaatttatttggtttttggggtttatgtatatgttagattttaggtgggtgtgttttgtttttgtgtttttttattatttggttttaattgttttttggtgtgggtggttttttttttagtttttttttttgggtggaggtttgttgatgataaggaagaaaaaaatggagtttttattttgttttaattttggtttttggaattttttatttttttttttatttttttttttttttttagtttgttttaatggggtttagaggagagttaggtggggggtaagggtggggtgttgtttttttttattttatagtagggttttaggtttgggtgggttagggaggagtaggttgtgtatttatttttttggattttttttttagtttggggtttgtttttaggaagtggaaaattgtgttttaaggtgtgtggtttagtttggggttgggaggtgatgttggtgggttgggagggaggggt

SEQ ID NO: 2247 - DNA, 2500 bp, Artificial Sequence
  chemically treated genomic DNA (Homo sapiens)
gttttttttttttagtttattagtgttattttttagttttgagttggattgtatattttgggatatggttttttattttttaaggatgagttttagattggaggagaggtttgaggaggtgagtgtgtagtttgtttttttttggtttgtttaggtttgggattttgttgtgaggtggagagaggtgatattttgtttttgttttttatttggtttttttttaaattttgttggggtaggttgagggaagaaggaaaggtgagagaaaaggtgggaaattttaggggttgggattagagtaaaataaaggttttgttttttttttttttattattaataaatttttatttaaaaaaggaggttaaaaaaaaagttatttatattaagagatggttgggattaggtggtgggaagatatagaggtgggatgtatttatttagagtttggtatgtgtgtgggttttaggggttagatgggtttagttggagtaggaagggttgttattttggggttgtgtttatgttttgttttgggttgtttttggggttgtgtgtgtggttgttttattgtgttttttttttatttaggtgggtgttggattttttgtgaggattttggtggttggtttgggggaggtggttgaggtggtggtggtggtggttgggggtgatatggtggaggagtaggatttattggaggtggagttgagttttgtgggtttggaggagttttgttgtttgtttttggggagtgtgtttttgttagggtttgatggtggtggtggtggattgggtttgtgagttagtttggggttaggtgagttgggtaaggttaagaaggagtagtaggatggtgaggtggatgatgataagttttttgtgtgtatttgtgaggttgttagttaggtgtttagtggttatgattggatgttggtgtttatgtttgtgtgtgttaatggtgttagtaaaagtaagttgtatgttaagtggtttatgaatgtttttatggtgtgggtttaggtagtgtgtaggaagtttgtggattagtatttgtatttgtataatgttgagtttagtaagatgttgggtaagttttggaggtgagtatttgattgttttttgggtttgggttttttagttttgggtggatttagggtagttgaggtggtttggttttttgtattttagagtgggattgtttggtagttttttttggatagggttggaagattaggtgtgggggttgtgtttgtttttttattataaggattttggaatttggaattttagtggtttaggttgggtttttttatggggtggtgggtaggaaggtgtttttttgtggttggaattttgtgggtggtagattgtggggtttggggttttggagggagggaaggaggtttttattaatttttgtttatagatatgtatattatgttattagttgttgtggttaggaggatatgagggaaatgtttggaaagaattaaagggttggttggagatttagggaaattgaggtagttagatggagaatttaggggaggtttaaagaaaatggaatttagatgagagtttttggaagagtgagggatgaagaattgtgggataaatttgttgttgtgggattttattttattttagggtttttttttgggattttttgatgttatttttttttgagttgggggtttttttatttttttagggagaggatatatagtaaggggtttttttttttgttttgttttagagttattaagttgatttttttttttttttttttagtttggtgttattttttttgttagggttttattttaatgttgagtaattttttttttattgttttagagttggagttgagtattttggttagaaggaaattttggttttttttttgtttaggggtttttagagttttaggttttttgggattagtttatatttttaggaaaaatattttttgtagggagtaattattttatttttgatttaggtttggggtttagttaggttttttggggatgtgtggaataagatagttttttatttttatttgggagtgttagagtagttttgaaagagattagggattttaggagatgtgagttggtagtagttatttgatttttgttagattgattaagagataggtttagaaaggtaaaggaattataaaggttatatagaagttggtagtagagttagggttagaatttaggatttttatattttttgtttagaggattttttttgattttggtgatagtggtggattatttatattttgaggagtggttaggaggttggggggaagtaagaagatgagaataagagtgaggagtatttgggttttagaaaattagggttttgttagaggagtttggtttttttttgttgtttttttttttgttagttatagttgggtagagattgggtttagaggtttagagtggtagaaggtgtaggaggatttttaagagattaaaagatt

SEQ ID NO: 2248 - DNA, 2402 bp, Artificial Sequence
  chemically treated genomic DNA (Homo sapiens)
ttttgttttttggtttggtttttgaagattttagaagaatttggaatttgtttttatttggaatttagggattattttttgtatttagtaggtttttgtttttttgtgtggaaagtggttgggtgagttttggtattggggttattatatttgagtgttgggggttatggagggaggggtttagatattatttgggaaggattttagagtgtagttttagtttaggttatttggggaagggagttggtaaagtgggattttgagtttttatggtttttttggttgtttttgtttagaggttgtttggtgttttttttttttgttttattgaggagttgttgtttttgaattttagttaatttttttgtttttaggtgaagaaattgaggttttggggttaggaaggggtttgtttaggttgttgatttttttgggtagtattgagtttaggttttttttgtaattatgtattaggattagagagggtagggggtttgtttaatgttatatagtttgagtgaggaggagttggtttgggatttaggttttttgatgtttaggttaggtttttttgttttttttggttatggtttttagtttggatattaaggggttgggagttagttgtgtttttattatttttatgttatagggtaggatggagtttggtattttttgttttaggttggttgttggtgtgatatgggtggttttagttgagtgaatgtttttgttttttatagtttagggggttttttgttttggttattaatttttgttatgtgatttttttattttaatgtttgattgagtttgaaaatattgagaagatttaggggttgaaaagggaggaagagggaggttagaaggtgttagttgagttagtgaagtttttataggagaggaagtgggttaggggaataggaaggagggttgggttggtttttgggtttgtttttgttttgggtatgtggtgagtttagttttttgtttgtaatgaggaggaggaagatgaatagtgtttttgttaattttggtttttttggtttatgggatgggagatgttattattttatgtatttattttagttagttttatataggttgattggggaggttttttttgagtttaatttgataagttttgaggagtgagttgtatttattttgttttgtttgggatagggtggggggtttttgggtagggggttgggggttgtaggagtatggtgggtggttgttttgtatttgtttgaggaaggattattttttttgttaagtttttgtttggttgtgtttgtttttagtttttgtgtttttttttaatttgttattttgtaagggttggtttaagggtttttttttatagggtttgtattttttgtttaggttggtatgttgatgtgtttttagaatttggtttttattttttttttgtgtttttaggtttagagaaaatgaggggtttagtgagtttggggttttttagattgtgatgtttttttttgttttttttgtgtaggtttgggaggtgatggagttggagtttttgtatgatttgttgtagttttttaagggggtggagtttttagtggaggaggagtttttaaaaggtgtgtgtttatgtaggtttgagggtggagggtgaaggtttgtgtggtaagagtgagtttggttatgtttgggatttgtagtatttttttagttgttagttgagtgtttaattttgtttatttttgtttttattttttgttttatgtttgatttaatttttttttttgggattttttatagagttagaattttttttttttagatgagagatggtgtggattatgatggtgaatattgattgtttttattttgtgagttttttgagtgtttttattgtattagtattttttattaatagtaatttatttatttttaagggtgggtattagtgtttgttttatatagatgaggaaattgaggtataaggggtgatgtgttatagtaataggaaatttttagtaagtggtggatttgggttttgagtttaaggagggtggttttagaattgaggttttatatggattatgtagtgatgtttattatggagtgatattttgtagggtgtggggtttttgatgtgttttttttatatgtgtgggttttttttaaaagtggggtgagtataggatggagtaatttaatgattataggttgtttttttagtaaagttttgtgttatgagttttttggggggttggtggttatagtttttgtaattttttttttaggagatggtttaaaagaaggatatgggtaggtatttagagttgttattttttttgtgttttttgaaagaaataaatgaataatagtttgtaaggaagtagtgagatgttttagtggggaag

SEQ ID NO: 2249 - DNA, 2402 bp, Artificial Sequence
  chemically treated genomic DNA (Homo sapiens)
tttttttattgggatattttgttgtttttttgtaagttgttgtttatttgttttttttagagaatatagagagggtgatagttttgggtatttgtttatgttttttttttgagttattttttagaagggaggttgtaggaattgtggttgttaattttttaaagggtttatgatatagagttttattgaaagggtgatttatagttgttgaattgttttattttatgtttattttatttttgaaagggatttatatgtgtgaggggagtatgttaggagttttatattttgtaaagtattattttatggtgggtattgttgtgtggtttgtgtggaattttagttttgggattattttttttgggtttagaatttaggtttattatttgttaagagttttttgttattgtggtatgttattttttgtgttttagtttttttatttgtataaagtaggtattgatgtttgtttttgagaataaatgagttgttattggtaagaggtgttggtgtagtaggggtatttagaaggtttataggatgagagtaattagtatttattattgtaatttatattgttttttatttggagagaagaggttttagttttgtagaaggttttaggaggaggagttaggttaagtataaagtagaaggtggaggtaggggtgagtagaattgggtgtttagttgatagttgggaaggtgttgtaagttttaggtatggttaggtttatttttgttatatagatttttattttttatttttagatttgtgtgggtatatattttttgagagttttttttttgttgggggttttatttttttggggagttgtagtaggttgtataagaattttggttttattgttttttaagtttgtatagaggaggtaggagagggtgttatggtttgagaagttttaaatttattgagttttttattttttttagatttggaggtatagaaggagggtagaagttaggttttggggatatgttagtatgttagtttaggtagggggtatgggttttgtgagaaagagtttttgagttaatttttgtggggtgatgggttagaaaaaggtatagaagttgagggtgggtatagttaagtaaaggtttggtggaggaagtggtttttttttaggtaggtgtagagtggttgtttattgtgtttttgtagtttttagttttttatttagggattttttattttattttagataggataaagtaggtatagtttattttttagagtttgttaggttgagtttaagggaaatttttttggttggtttgtgtggggttggttgaggtggatatgtggaatggtgatattttttattttataaattggaagggttagggttgatagaggtattgtttattttttttttttttattataggtagaaggttgggtttattatatgtttgggataggggtagatttagaggttagtttagtttttttttttgtttttttggtttatttttttttttgtgaaggttttgttggtttggttggtgttttttggtttttttttttttttttttttagtttttgggtttttttagtgtttttaaatttaattagatattgaggtaggggagttatatggtagaagttggtggttagagtagggagttttttgagttgtgggagatggaggtatttatttgattggagttatttatgttatattagtagttagtttggggtgggggatgttagattttattttgttttgtagtatggaggtggtggggatataattgatttttagttttttaatatttaagttgagggttatggttagagaaaatgaaagagtttggtttgggtgttaggaagtttgggttttaggttagtttttttttatttaggttgtgtgatgttgggtaaattttttgttttttttggttttgatgtatggttataaggagggtttggatttgatgttgtttaaagggattagtagtttgggtaagtttttttttggttttagggttttagtttttttatttggagatggaggggttggttgaagtttagaggtggtaattttttagtagaatagggagggaggatgttgagtagtttttgagtaggggtagttggaggggttgtggggatttaaggttttattttattgatttttttttttgggtggtttgggttgggattgtattttgggattttttttaggtggtgtttgggtttttttttttgtgatttttaatatttaagtatggtggttttgatgttagaatttatttaattgttttttatgtaggaaaataaaggtttattgagtgtaaagggtggtttttggattttgaatggaagtaagttttgggtttttttggggtttttggggattaggttgggaggtagga

SEQ ID NO: 2250 - DNA, 2439 bp, Artificial Sequence
  chemically treated genomic DNA (Homo sapiens)
gagatgtagtaggaggtatagttttatttgttgttggagggagttaggtgagatttttttatatagggagtaggtggaatagtagtgtgggaagggggttggtattggagttagttggatttggtttaaatttaggttgtgttgttttttggttttgtgattttgagtaagtttttttattaatttgagttttagagtttgtatttgtaaatgagggtttggtgtatggtgttttggtgaggattagaagatatgatgtttaatttatgtgttttttgataataatattaataatggttattgatgatataagttgtgagtagtgtgttagggattgtatatgtttgaaattgtgttttaaatttattgggttaggtatggtggtttatgtttgtaattttagtattttgggaggttgaggtgggtagattatttgaggttaggagtttgagattagttgggttaatatggtgaaattttatttttattaaaaatataaaaattagttgggtgtggtggtatgagtttgtaattttagttatttgggaagttgaggtaggagaattgttggaatttgggaggtagaggttgtaaggagttgagattatattattgtattttagtttgggtaataagggtgagattttattttaaaaaaaaaaaaaaaaaaaataatttattaaatttttataatttagtgttttttggttttggttttattgatgttttaggttaggtaattttttgttggggattgttttgtgttttgtagggtgtttgatagtatttttggtttttatatattagatgttaataaatttttattaattgtgataattagaaatattttttagatatggttagatgtttttagggggttagaattattttttattgagaattatagttataatttaatgaagtaggtatattgagtattaaaaggatttatttatgttaaagagttagtaatggtggttttgggatataggttggttggttattatattgtaaaagttgtttttttttttgtttttttgatttatttttttagggtttattgttagttgtaggttatggttgtgaagtatagttgagtttttttttttattgagttgtgttaggtgtatggtgattatgtagtttttatttttgagttgtagtagttttaggttgtttgttttttagtttttttgtagttgttgatagtgtttttgagtttgttgttggttttgtagttgttgttttagttttgtttgtttttttttgagtatttggttttgggtttgtagttgttgtttttgttgtagttggtttttgtgagttttttgtagttgttgtatttttgttattaagaattgggttaggtttttaggtttttttttatttgttaggatagaataggggatagaataggtagtttaggtaagtaaaatttaggagataatatattgtgttaaaaaatttaaattataaaaatattagagggaaattttggaatatatttgtagaattgggagtaggggaggtttttttaaataatatataaaatttaggagttataagagaaaaaagatggataaatttatataaaaatgtttaaatttttgaaaaatgaaagatgtaataaagttaataagtaatagagtgggagaaaatataataagaatttagagttgtaatatataaagagtttttataaattaataagattaataattaaataaaaatatggataaaaattattaataggtaagttttaaaataaaaatagttaataaatataggaaaatatgtattaatttattaataataattatagtagttattaatatttgttaattttattttttgtgttagatatattttaatttttatgataatattgtaaggtaggtattattattgtatttattttaaagatagaaaaattgaagtatagagtagttatttatttaaggtttaataattagtaatttgtgaattgtattatttaatgaaatataaatttaaaataataatattattttttatatattagaatggtaaaaatgtttaaatatgatttttaggatttaaatgggtttttatatatttttggtaggaggtatgttgatttaatagttaaaatatatagattttttgagaaattttttttagaatttttttgtttgagatatatttgtataaagatgtatatataaggatgtttttgtattgttgtaataatataaaattggaaatttaggtatttattaattggaaatgggttaaatgaattatgttttaattttattaatgaatagtatgtagttatttaaaataagtgtatgtaatagaggtgaaagaattattaaaattagttgttttaagaaaaagtaaaatatatatgtaggtgtgtgtgtgtgtgtgtatgtgtttgtgttttttatataaaaa

SEQ ID NO: 2251 - DNA, 2439 bp, Artificial Sequence
  chemically treated genomic DNA (Homo sapiens)
tttttatataaaaaatataaatatatatatatatgtatatatgtttatgtgtgtattttgtttttttttagaataattgattttagtgatttttttatttttgttatatatatttgttttaagtgattgtatattgtttattagtgaagttaggatataatttatttaatttatttttagttgatggatatttaggtttttagttttgtattattataatgatatgggaatatttttgtatgtgtgtttttgtgtaaatgtgttttaggtgaagaggttttgagaagaattttttaaagagtttgtgtattttaattgttaaattaatatattttttattaggaatgtgtaagggtttatttgaattttggggattatgtttaaatgtttttattattttgatatgtaaaaaataatgttattgttttaagtttatattttattgagtgatatagtttataggttattagttattaaattttgggtaaataattgttttgtgttttagtttttttgtttttaagatgggtataataatagtatttattttatagtgttgttataaagattaagatatatttagtataaagaatgaagttaataaatattagtagttattgtaattattgttgataggttggtgtatatttttttgtatttattaattatttttattttgggatttgtttattgatagtttttgtttatatttttatttggttgttgattttattgatttgtaggagttttttatatattatggttttgagtttttgttatatttttttttattttgttgtttattaattttgttatattttttattttttaaaggtttaaatatttttatatggatttgtttatttttttttttttataatttttggattttgtgtgttgtttaggaagattttttttgtttttaattttataaatatattttagaatttttttttagtgtttttatggtttgagttttttgatatagtatgttattttttggattttatttgtttgagttgtttattttgttttttgttttgttttggtagatgaggaggggtttgagggtttgatttaatttttgatgatagaggtgtgatggttgtgggaagtttgtaagagttagttgtagtgggagtagtaattgtaggtttggggttgggtgtttgaggaggagtgggtagggttggagtagtggttgtgggattagtagtaggtttaggagtgttgttaatggttgtgggaggattgggaggtgggtagtttggagttgttgtggtttaaggatgagaattatatgattgttatgtgtttggtatagtttagtgaggagaagaatttggttgtattttgtagttgtgatttgtagttggtggtaggttttggggagatgggttggggaggtaagggaaggggtagtttttgtaatgtagtagttagttagtttgtgttttagagttattattgttggttttttgatgtggataagtttttttagtgtttggtgtatttattttattgggttatgattgtggtttttaatggggggtgattttgattttttagaaatatttggttatgtttaggaaatatttttggttgttataattagtggggatttattggtatttggtgtgtagaggttagggatgttgttaaatgttttgtagggtataggatagtttttagtaaagaattatttagtttaaaatattggtagggttggggttaagaaatattgggttatgaggatttgataagttgttttttttttttttttttttgagatggagttttatttttgttgtttaggttggagtgtagtggtgtgattttggttttttgtagtttttgttttttgggttttagtgatttttttgttttagttttttgggtagttgggattataggtttgtgttattatatttagttaatttttgtatttttagtagagatggggttttattatgttgatttggttggttttgaatttttgattttaggtgatttgtttgttttggttttttaaagtgttgggattataggtgtgagttattgtatttggtttggtgagtttaagatatagttttaaatatgtatagtttttagtatattgtttataatttgtgttattagtagttattgttgatattattattaagagatatataggttaaatattatgttttttaatttttattaaagtattatatgttaagtttttatttgtaaatatagattttgagatttagattagtgaaaggatttgtttaaggttatagagttaggaagtggtatagtttggatttgaattgggtttggttggttttagtgttagttttttttttatgttgttgttttgtttattttttgtgtggggaagttttatttgattttttttagtagtaagtgaggttgtgttttttattgtatttt

SEQ ID NO: 2252 - DNA, 2451 bp, Artificial Sequence
  chemically treated genomic DNA (Homo sapiens)
ttgaggttgggagtttgagattagattgattaatgtggagaaattttgtttttattaaaaatataaaattagttgggtgtggtgggatatgtttgtaattttagttatttgggaggttgaagtaggagaatagtttgaatttgggaggtggaggttgtggtgagttgagattgtgttattgtattttagtttgggtaaaaagagtaaaattttgttttaaaaaaaatttagttaggtatggtggtgtgtatttgtaattttagttatttgggaggttgaggtaggagaattgtttgaatttaggaggtgtaggttgtagtgagttatgattgtgttattgtattttagtttgggtgatagagtgagattttattttaaaaaataaaataaaataaaattatattgattttatattggttttttattttatgtttattattttgtaagttttgatataaagataagttttgtttttgttttgttaggatttttatttttgaatgtttaagtatgttttggaagtttttaggggtaggaaagggtttggaaatagatttttttttgtgtaatttttgttttagggtagatagattttttttattagaagttttttttagttttaatttaggtttgtgatgtagtagggtgtgttattatttgttagagttatggtggtttggggtgtttagtttaggtttttttagttattgttttatgtaagttattgttttgtgtttttttagggaggggttggagataggtttgaggaggaggtgttatttatggagaaattaattaaagttttgtttaggaagtttagagattttttgtttttttagtggtgagttttggtttgttgtttttttggttttattttttttggttggtagtagtgatttggtttttagggtggtgtggagtaggtgtagggtttggagtagttttttgtttgtttagtgattttttgtttttttttattgttttgttttgttttatttatttttgatagtgtttgatttttagtgttttttgtgtttgggtgaagggtttgtgtttttgagttgagttgttggtaggtattttggaggtagagtaggttaattttggtatgaatttggtggttttggtatttgtaatttgttttgatattttttttgtgagttaggtggtgagttattttataatgtaattttaaattgaggttttttgtttttttttaggatttttttttttatagtattattatatgtatatagttgtaaaaaggttaagaggaaatatttttgatgggtttaggattttaaaaagtttttaagggttttttgtattagtaaggtttagtgttgttgttttataggtaaagtatggtatagtggggagtgagattgagaatgaagtggtgttttagtttaggttgtggggatttgtttttgtttagtttggttgtttttgtagtttagtttgtatttaggtaatgattgtatagtttaaggttgggaagttaggatttttttggtttggggttagttgtttttgtttggggttagttgtttttgtttggggtttgaatttttgaaggagtaggtagttgagagtaggttttttttaggaagagtttttagagttatgtgggggtatttttttaaatgtgtattttatttggtatttattagatttgtgtgtttgtgatttgtttgtttttgatattatgtataagggtaggtttttggggtggtggaaatggttagggtttatgggtttgtttttagtagttagttttgtggttgtaataaagtatagttttttttgtgttaagattttaattagggttaaggattagtgtgtttgttgttagaatttagagtttatttgttgttttgaaaagtaggtttttgaggttagtgggggagtagtgttttttatgttttttattgaggagtttttgtgtttgttttttgtttttggttttaggagtttttttaattgatattgaagtggtggaagtagttgagtgttaggttattttttattattatattggggtagtgtttttaggtttttagtagtttttaggtgggttttaatgtggaaggattaattaattttttttaaagtagttgtagttgggtttggtggtttatgtttgtaattttagtattttgggaggtttaggtgggtagattatttaaggttgggagtttgagattagtttggttaatatggtgaaattttgtttttattaaaaatgtaaaaattagttaggtgtggtggtatatgtgtgtaattttagttatttgggaggttgaggtggaagaattatttgaattttggaggtggaggttgtagtgagttgagattatgttattgtattttagtttgggtaatgttgtgattttgttttaaaaaaaaattaaaaaataaagtagttgtattttgatttgtataaaagta

SEQ ID NO: 2253 - DNA, 2451 bp, Artificial Sequence
  chemically treated genomic DNA (Homo sapiens)
tatttttgtatgagttaagatgtaattgttttattttttagtttttttttgagataaggttataatgttgtttaggttggagtgtaatggtgtgattttggtttattgtagtttttgtttttagggtttaagtgatttttttattttagttttttaagtagttgggattatatgtgtgtgttattatatttggttaatttttgtatttttagtagagatagggttttattatgttggttaggttggttttgagtttttgattttaagtgatttgtttgtttgggttttttaaagtgttgggattataggtgtgagttattaagtttggttgtaattgttttagaaagaattaattaatttttttatgttgggatttatttgggagttgttggaagtttggggatgttgttttagtgtggtgatgggggatgatttggtatttaattgtttttattattttagtgttagttgaggagatttttggggttgaggataagggataggtatagaggttttttggtgaagggtatggggggtattgtttttttattggttttaggagtttgttttttagagtagtaggtgggttttggattttagtaatggatatattgatttttaattttggttaggattttaatatagggagaattgtattttattgtagttatagggttaattgttggagatagatttatgggttttggttatttttattattttaaaaatttgtttttgtgtgtggtattaaggataaataaattataagtgtataaatttgatgagtgttaggtggggtgtatatttgggaagatgtttttatgtggttttgaaggttttttttgggggaggtttgtttttagttgtttgtttttttgggaatttaaattttaggtaaaggtagttgattttaggtaaaggtagttggttttaggttagagaggttttggttttttaattttgagttgtgtagttattatttaggtgtaggttgggttatagggatagttaagttgagtaaggataggtttttgtagtttagattggggtattgttttgtttttggttttattttttgttgtgttgtgttttgtttgtgagatggtggtgttgggttttgttggtatgaggggtttttgggggttttttggagttttgggtttgttggggatgtttttttttgatttttttgtggttgtgtgtatgtagtgatgttgtgagggaggagattttaggggagggtagaaagttttagtttaagattgtattgtggggtgatttattatttggtttatggaggggatgttaggataggttgtgaatgttaggattgttaagtttatgttagagttggtttgttttatttttagagtgtttgttagtaatttagtttagagatataggttttttatttaggtatgaaaagtattggaggttagatattattaggggtgggtgggataggatggggtaatgaggagaggtagaggattattggataggtagagggttgttttgggttttatatttgttttatattattttaagggttaggttattattgttagttaggaggggtgggattggggaggtagtaggttaagatttattgttgagagagtagggggtttttggattttttgggtaaggttttggttggtttttttgtggatgatgttttttttttagatttgtttttagtttttttttaaagaggtataagataatgatttatatggagtagtagttggggggatttgggttgggtattttgagttattatggttttggtaagtggtggtgtgttttgttgtattataggtttgggttgggattagagaaggtttttgatggaagaagtttatttgttttaaagtaaggattatataggggaaggtttgtttttaaatttttttttgtttttagaagtttttaggatatatttaaatatttaggaatgaaaattttagtaaaatggggataagatttgtttttgtattagaatttgtagaatagtgagtataaaatgaaagattggtgtgagattagtatggttttgttttgttttgttttttgagatggagttttgttttgttatttaggttggagtgtagtggtataattgtggtttattgtaatttgtgttttttgagtttaagtaatttttttgttttagttttttgagtagttgggattataggtgtatgttattatgtttggttaagttttttttgagatggagttttgttttttttgtttaggttggagtgtaatggtatgattttggtttattataatttttattttttaggtttaagttatttttttgttttagttttttgagtagttgggattataggtatgttttattatatttagttaattttgtatttttagtagagatagggtttttttatgttggttagtttggttttgaatttttaattttag

SEQ ID NO: 2254 - DNA, 2384 bp, Artificial Sequence
  chemically treated genomic DNA (Homo sapiens)
ggggtttttggaattatttaattgtagtttttatttttatatttagttttttaggaggttttgttaggtttgtttttaaaaatggttgttttaggtttttatagtttttttgtagtagtgagtaaatagtgaaatagtattttttagtttagaggttattatggttttttttttgttgagtttagagtagtgttttgtggtaatgtattgagggttattttttattttttttgtgataagggttattgttgtgtgtatttttaggttattttgagttaaattagtgatgattaattttttttttattttatttttttttgtggtttatttgtttggatatttttttaaattttattgtttgagtttattgtttttattatgttttgatggtgtgttaggttttttttaatatgtttttatgtttattagggatttatggttatttggaagaaggtgtgtggagagatttggaaggttagttttagtaggtttttgtggatgtattggtttttagttatatgttttaggggtaggtttttttggttaggagtttttttgtgggtgaaggtgtaggttttttagtgttatagtttttgtagggatttgttttgttttatttgggttttttattgttgttttttttttatgaagtagaggtaggttattttattggttttgtttggttttgttgtgaagtgttgtgttagggaggtttttagttttgttagttttttagggtttagtttttggagtaagtggtgaaaagtttttattaggttgtgttgaggtttatttaggttaggtatttttttttagtagggtttttgttgagatttgggggtggaagtaggtaatggttatggtttggtggtggtggttggtgtgtatagttagttgtttttagtggtttgtgtatgtttttgggttgtatgttgagtatggagtggatttgtgggaattatgagttggtttaagtgtttataattgggtaagtagtttttttgtttttttttttggttatatttttttttatttggttgaaatggtaggtattttagaatttttggggtaggattattattttttgtttttatattgtataggattttttgggagttttgttataggtttttattggatgaatttttggaaggtttttattatttgtttggtggttttggggatgtgtatggtgttaaatggggttgttatagtatatgttttgtttttgtatttgttgagttgatagtttatggtgttattttttttatttattttgatgttaattagaaatttatatttattatgatatttagtttgtagggagagagagttgtattttattttggttgtttagtgtttgggtttggaaattttgatttttttataggggttggtagttaaataagaggaatagttgataattatgtgatgttattagaagaaaatataaagtagggagattaataggaagggtgagtaaaagtaaagttttttaaaatttaggataggggtttgtggttattgaagtttagtttgatttgttggggtgatggtttgattttttttagtgggtagtaggttttgttgtgtttgtgtttttgtttgagtagttagggtagtaaggtatggttggtgtttttgatttttttgtaagaggagtagattggtggttggattttatttattgtttttgatttatgttaggttattttttaaatgtttaggtttttgattttttttttgggatgttattgtgtttattgtgatgtgggtgttttgttggttagtttttaaaggggttgttagattttgtgttgggttttttaattggtgtatggataggttgaggaagtataggttgggtagagttttggttaagaggggtgttttgtgtttatatttatttggtaagtttttgtagtatttgtttgtattttagttgtttttgtttaagttgtttagtatagggtattgtttatagaggggttattatgttggttatttgtgttattggtggtttatttttatttttttgttgtttttttttggttatggggttggttttgggttgggttaggtgtatattgagtgggtggtttttttagagggtattatgtaaaatgtgtagggttttgtttttttttgtagtgttgtggaatgttataaaggtgtagggtggttgtttaaagagtttggttttgtggggttgtagattaaagtggtttaggaagtgttggatgttgttgaagttggtgtggtgaggtatgttttgtagttttagtttaaagattttagaggtaaataagttatttttgatgtagttgtagagtttgggttgaggttttggttttgtagttgttttagtgttttttttttttatt

SEQ ID NO: 2255 - DNA, 2384 bp, Artificial Sequence
  chemically treated genomic DNA (Homo sapiens)
ggtggagaaagagggtgttggggtggttatagggttggggttttagtttgggttttatagttatattagggatgatttgtttatttttgagatttttaaattggagttgtagaatgtgttttgttatgttagttttagtgatgtttggtgttttttgggttgttttggtttgtagttttataaaattaaattttttgggtaattattttgtgtttttgtgatattttgtagtgttgtagagagggataaggttttgtgtgttttgtatggtgttttttggaaaggttgtttatttagtgtgtgtttggtttggtttaaggttgattttatggttaggaggaggtgataggagggtgagagtgagttattagtaatatgagtggttgatgtggtgatttttttatggatagtgttttatgttgagtagtttgagtggaagtagttggagtgtgagtaggtgttgtagaaatttgttaagtgagtgtgggtgtaagatgttttttttggttagggttttgtttggtttgtgtttttttagtttgtttatgtattagttgggaggtttagtataggatttggtggtttttttgggagttagttagtaagatatttatgttatagtgggtataatgatattttaaaggaggggttaggagtttggatatttggggagtggtttggtatgggttgggggtagtaggtggagtttaattattgatttgttttttttatagggaaattgggagtattaattgtgttttgttgttttggttgtttgagtagaggtataagtataataaggtttgttgtttgttggagggggttaggttattattttagtaggttagattagattttggtggttataaatttttattttgggttttgaaaaattttgtttttgtttattttttttgttgatttttttgttttgtgtttttttttggtaatattatatagttgttagttgttttttttgtttgattgttagtttttgtggggaaattagggtttttaggtttaagtgttgggtagttagggtaaggtgtagttttttttttttgtagattgagtattgtaataagtgtgagtttttggttggtgttggggtggatggggaggataatattgtgggttgttggtttggtaagtataagggtgggatgtgtgttgtggtagttttgtttgatattgtgtatatttttgaagttattaagtaggtggtgaaggttttttaggagtttatttggtgaggatttgtgatggggtttttgggaagttttatgtggtgtgggagtagagggtggtgattttgttttgggaattttggagtgtttgttattttagttagatgaaggaaggtgtggttagaggagagagtagggggattgtttgtttagttgtgggtatttgggttagtttgtgatttttataggtttattttatatttggtatatgatttagagatgtatataggttattggaagtagttgattgtgtgtattagttgttgttattaggttatggttattgtttatttttatttttaggttttaatgggggttttgttgggggagggtgtttagtttaggtgggttttagtatagtttgatgggaattttttattatttattttagaagttgagttttgaggagttggtagagttgaagatttttttagtgtagtattttatagtagggttaggtagggttagtggagtgatttgtttttattttgtggaggagggatagtggtaaggagtttgagtggggtggggtaggtttttgtagggattgtgatattgaaggatttgtatttttgtttatagaaagatttttagttaggagggtttgtttttggagtatgtggttggggattggtgtatttatgaggatttgttagggttgattttttggatttttttatatgtttttttttaggtagttatgagtttttggtgggtatggggatatgttgagggaggtttgatgtattattaggatgtgatgggaatagtgggtttaggtggtgagatttgggggagtatttaggtaggtgagttataggggagggtgaagtaagaaagaggttggttattattgatttgatttgggataatttagaggtatatatggtagtggtttttgttatagggaggatgaggagtggtttttagtgtattattatagggtattgttttgggtttggtaggagggaggttatggtggtttttgggttgggaaatattgttttattgtttgtttattgttgtaggaaggttgtggggatttggagtggttgtttttggagataggtttggtaggattttttggagggttaggtgtgggggtgggagttgtagttgggtgattttaggggtttt

SEQ ID NO: 2256 - DNA, 2499 bp, Artificial Sequence
  chemically treated genomic DNA (Homo sapiens)
gatttttagtttatttttagagtatggatgtttttggttttgttattaaggttttttttttttttaagaggttgtttttttattattttaaattttttttaagataattgtgagatatagagggtttagaaattaggtaagttttaaatataagtttgtataatattaatattaaatatatattataaataaggtttataaatataaaattgataaaaattgataaaaattgataaattagttatgtttttttaaggaattggttttgtagtttttgagattttttttaggagagtaatggtttttgtgtgagaaaattttaggatttattattagggggagtagttagtagtgaggatttaagatgggttttttggtgttgggaggtgggtttgtttttatagagatttttgtgtatattttttagtgttatttgtattatttgttttgatttatagatttttaatatttattttatgttagggaatttaagtaattgataggtagtgggggttttgtatagtttttaattttttagttttataaagagaaaataggtttatagaggtaaagtgatttgttttaggttatgtggtgattttggggttggtttgggatttgagttttattttttggatttttggattagggtttttgggatattttgttgttgttatagttgtttaaagtgaggttatttagatatttaggtgtttggtttgggatatgatgaggtataggaggttagtttaggttgtgattttttttttagaaatatggaaaggaggaagtttgggggtaatggttttgtaagttatgagagggaaggattggtaggttttggggagtaaggtaggggggtagttagtttggttatgagttagtttgtgttattagatttttgaattaatggaaagttggttttgtgtggtttgtttggttattttattgggtttggggaatttggggttgaggtgggagtgtaatagtttgattttgttttttagtttggaggaggtagaggggtttgtttagtttttattttttaaagtgtattttttagtggttagtagtagaggggaataggtttggggatttgggagttgttattttgtgatggttttttttatttatagagtatttgttgtattttttattggtaaggggtgtttttgaggttattggggtagttgttttttggttatgagttttttgttttttttggagggtttggttttgtgtatttttttttttagggtttggtgggggttgtgtttttggttttggtttgggttttttttttatttgttgaagatttgttttattgagtgtatgaagtgatggtagttatgtaggaatttgtagttttttagtttgtgttgaaaagtatttgaggtaggggtgggggtgggtggttgagaggttttttggttagtttttgtgggtttagttgtgtttgagttgtttagtagttgggttatgtagtagatgttgtttttgagtttgaggatgtttggttttgttatttgtagtttttttaagtttttgatgtttagtttagatttttttaaattttgggttttggggaggtgttgttttaagttggttagtttgtgtaggatgtagtttagtgtggtattgagggtttgtaggaagttttgtttgtttagtttttttagggtttttttattggggaaggttttggggtgttttttgtagtgtttttttagtttaggaatatttaggttttggatatgtatttggtgggaataggaggattatagggtgaatgttgaggatttggattatatttatagataagtaagttttgaaatgttagattttatgtattttaatttaattttttattggatagatttggaaattgaggtttgagagggaagaggattttaagattattgtaggtaaggttggagtgatgttggggggttggtgggatgtttgtggggaatgaagagttttaagagggttggattttgttttgtttattgttatgttttagtgtttagattagagtttggtaggtgtgtaggaaatatattgagtaagtaggtgagtatggtgatggtgtttggagttttgttttgggattatagagttaggaaagttggagggttagttttagttttttagggttaaggttggaataatatagtgatttagttttttgatttggttatatggagtggggttaggtttgttttttttgttttttattttttttttaattttatagttttttgagatttagatgttataagggtttaggtgtttatataggggtttaggagtttgttggtgttttgtatgagatttgtttgtttttggagttggttaaggagtatgtggtatttttttgagtagttgtttatagttgttatgtttgttatgtttggaaataggagtgtaaggattagatttaaggtagagaagaggggtgttatttgatttggtgaggaaagttatagatgggagttt

SEQ ID NO: 2257 - DNA, 2499 bp, Artificial Sequence
  chemically treated genomic DNA (Homo sapiens)
aggtttttatttgtggttttttttattaagttaggtgatattttttttttttgttttaggtttggtttttgtatttttgtttttaagtatggtgagtatggtggttataggtagttgtttgaaagagtattgtgtgttttttggttagttttagaagtagatagattttatgtaggatattagtagatttttggatttttatgtaagtatttgggtttttgtggtatttgagttttagagaattatggggttaggaagggagtgagaagtagggaggataggtttagttttattttatatggttaggttggggaattgagttgttatgttattttagttttaattttgaggagttaaggttggttttttagtttttttagttttgtggttttggggtgggattttggatattattattatgtttatttgtttatttagtgtgttttttgtatatttgttaggttttggtttaggtattgggatgtagtagtgagtaagatagagtttagtttttttgaagttttttattttttatgggtattttattagttttttaatattattttgattttgtttgtagtgattttggggttttttttttttttgggttttagtttttggatttgtttagtgggagattggattggggtgtatgaggtttagtattttaaggtttatttgtttgtgagtgtggtttggatttttagtatttattttgtgatttttttgtttttgttagatatgtatttaaggtttggatgtttttaaattgagagagtattgtagggagtgttttggggttttttttagtgaggagattttgagggggttgggtaggtggggttttttgtagatttttaatgttatattgggttgtgttttgtatagattggttgatttagagtagtgtttttttaaggtttaggatttggagaggtttgggttgaatattgaggatttggagaagttgtagatggtgaggttgaatatttttgggtttaggaataatatttattgtatggtttagttgttggataatttagatatggttgagtttatgaaggttggttggggggttttttagttgtttatttttatttttgttttggatgttttttagtgtaagttggagggttgtaggtttttgtatggttattattgttttatgtatttagtggggtgggtttttagtaagtggggggagagtttgaattggagttggagatatagtttttattaggttttgaggaagggggtgtgtaggattagattttttaggaaaggtaagagatttatgattaggggatagttgttttggtagttttgagagtattttttgttggtgaaggatgtggtaggtgttttgtggatgagaggaattattgtaggatgatagtttttgggtttttaaatttgtttttttttgttattagttattgagaagtgtattttaagaggtgggagttgggtagatttttttattttttttaggttgggagatagagttaggttgttgtgtttttattttagttttaagttttttaggtttagtggggtggttgggtgggttatgtgggattgattttttattgatttaggggtttgatgatataggttgatttatggttgggttgattgtttttttgttttgttttttgaggtttgttggttttttttttttatgatttgtagggttgttgtttttagatttttttttttttgtgtttttgaaggggaggttatagtttgagttggttttttatgttttattatgttttaaattagatatttggatgtttgggtgattttattttaggtagttgtaatagtggtagggtgttttaggagttttgatttgggggtttagggaatggagtttaggttttaggttagttttgaagttgttatgtggtttggggtaggttattttatttttgtggatttgttttttttttgtgaagttagggagttagaggttgtataaggtttttattgtttgttggttgtttggattttttgatgtaaggtggatattaaaaatttgtaaattaggataggtggtgtaaatggtgttgggaggtgtatatggaggtttttgtaaaagtagatttattttttagtgttgggaagtttgttttgggtttttgttgttggttgttttttttggtggtggattttggaatttttttatgtaggagttattgtttttttagagggggttttagaaattgtgaggttagttttttggagggatatgattaatttattgatttttattaatttttattagttttatatttataagttttatttatgatgtatatttaatgttaatattgtgtaaatttatatttaaaatttgtttggtttttaaattttttgtgttttatggttgttttggaaaggatttggggtggtggaagggtagttttttagagagaggagggattttggtggtaaggttaaaagtgtttatgttttggggatgggttggaggtt

SEQ ID NO: 2258 - DNA, 2455 bp, Artificial Sequence
  chemically treated genomic DNA (Homo sapiens)
gttgtttttgtaatgatattatatgaaataatttgaaatatgattttaattgtatttggtgggttttgttaattttgtaagttatggatagaatatttatttaaattgtagttaagtttaggtttatgggaatatgtgattaatttaggtgaatgaaagggattttaaaatattaatttttagtttaggtttttttaagattgtttgtatgttttttaatattattttagtttgagtgttatgtggattttgaatgtggatttgtgtgtatattgttgaaaaataagtaattgaaaattttaggtagtggggtggagtgatgatgaaagatattgagatttattgggaagttggaaatttttttttagttttggtgtttgggttgtattttgtttttttatttttttaaattatttttgtggtgtgagtgtgtttgtagtagatgttttttaattgttttttgtatttgtagtaggatgagtagtaaataaaattttttagatattgagttaaagaaggaaggggtttatttagttgggggtattggtaagatttttgttttaagagttgagttttttgagtgagtaatttttgtgtttttaattttaagtgggtgtgtgtgagagggttgtgattgattgagtaagttgggggtaagtgattgggagttgtatgtattgttaagtagattggaataaaataggatagggattttataatgtttttttatataatgtttgtaatttttagataatataattgattaggttaggggttgatttttaattattaggtttagggtgtggtgttgggttgttggtttgtggattttatttttgttttttagtttttattttttttttttttggttgtagaaattaggtataagataatatgagaggtggtttttttttttatattgatagtaaaattttaagggtaggaatatttttattttttaatattattttaataattaaattaaaattttttatttgagtgtaagggagtggtgatttttttaagttgggagtttttttattagggggttttttaagggtatttttgtttttagtgggggagttgttattttattttgttttgtttagtttgagatatgtaattttttttagtttttattttttgttgaatttttaaggtggggttggggggatgtttaggtttaggaaggaggttgggggtttggttgttggatgttgtttattggtagtttggattagagtaggagttttattattatttgtggggataggtgggatatatgtatttttggggttattttagattttttggaggatgttgattgatattgtttagtttgagaattattgtgtttttggagtagaggtttttttattgtttttgggtagtgggtgttgggtatagggtttttttggatgagtggggtgggtatgagagtatatggaattgggggtgggaggttggggtagttaaggaggagaaggaggaggtggagggggagggaggggaggaagaagaggaggaggagttttttgtggttatttggaggggagagatttggttgggaggtgttaattgagttggttgttgggattttgtatttaggtgtgttaatttttgggtgtatgttttttgtagatttttgttgaaggagtggtgggtggtgtgttgtgattttggtgggttatagattatattgtttgtagggtgttgttggggtgtgtagagtggggttgttttagggtggtttttttaggttggggtgtggtgggtggtggttgtgggtgtgtgttttatttgggttttgagtaattgttattgttgttgttaaagtttgttaatatggtggatttggaggttgtggtggttgatgttagttatttgatggttatggagaagagtaaggtgattttggttgattatgtttgtaagaggattgttttgtttgaatttatgtattatttgttttggtttgtgttggtttttgatgttgttgttttttgtggttgttagtgattttttgtgtttgggagaattgggagttgagttgttgttgttttggagtgggtgatatagtggagtgggtgatgtggggttggttttttggttttagtttttgaaatggggtattggagggtgggtggggggtattttgggagagagtgttttaaagtgtttggtgttgtgttttgtgtgtagttagtattttagtaaggggttggttatgatttggttggattagttttatttttgttgtttttttttttagttttgtttttttttgttttatttttgtggttttatttgttgtattggtgtggtttttttgggttttttgtttgttatttgtttgtgttttattttggttgttttttttttttgggttttgtggtttttttttttaattttatttttttagttttttttgggttgattatttggggattgtagg

SEQ ID NO: 2259 - DNA, 2455 bp, Artificial Sequence
  chemically treated genomic DNA (Homo sapiens)
tttgtagtttttagataattggtttagagggagttgaaaggatggagttggaaaggggaattatagagtttgggaagaaggagtgattaggatggagtgtaaatgagtgataggtaaggagtttaaagggattatattaatgtaataggtagaattatggggatgggataggagaggatagggttgggggagggggtgatagggatggaattggtttagttaagttataattagttttttgttggggtgttagttgtgtgtagggtgtggtgttaggtattttggagtgtttttttttggagtgttttttatttgttttttgatgttttattttagagattggagttaggaggttggttttgtattgtttgttttgttgtgttatttgttttgggatagtgatggtttagtttttgatttttttggatgtagggggttgttggtggttgtagggggtggtggtgttggggattggtgtgggttggggtaggtggtatgtgggtttgggtaggatggtttttttgtaggtgtggttggttggggttgttttgtttttttttatggttattaggtaattgatattggttattatggtttttaggtttattatgttggtgagttttggtagtggtggtggtggttatttgggatttggatgggatgtgtgtttgtggttgttgtttgttgtgttttaatttgggggagttattttggggtagttttgttttgtgtgttttagtagtgttttgtaagtggtgtaatttgtagtttgttagggttgtggtgtgttgtttattgtttttttagtgagggtttgtggggagtgtgtgtttaagggttggtgtatttgggtgtagagttttagtggttagtttggttggtgttttttaattaagttttttttttttgggtggttataaaggatttttttttttttttttttttttttttttttttttttgtttttttttttttttttttggttgttttgattttttgtttttagttttatgtgtttttatgtttgttttgtttatttggagaagttttgtgtttgatgtttgttatttaagggtaatggggaggtttttgttttggggatatagtagtttttaaattggatagtgttaattagtattttttaggaggtttaggatggttttggaaatgtatgtgttttatttgtttttgtaggtggtgatgaaatttttgttttggtttgggttattggtgaatagtgtttagtggttgggtttttaattttttttttgagtttgaatatttttttaattttgttttgagaatttagtgaagagtaaaagttggagaaaattgtgtgttttaggttaagtagagtaaagtggggtgatggtttttttgttaggaatagagatgtttttagggaattttttgatggaagagtttttggtttaagaaggttattatttttttatatttaggtgagaggttttagtttggttgttgaaatggtgttgagaaataagagtatttttgtttttggggttttattgttaatataagggaggagattattttttatattgttttatatttagtttttgtgattaaagaaagaaaaagtaaaaattaaaaggtagaaatgaaatttataagttgatagtttagtgttatattttgggtttggtagttaaagattgatttttgatttaattggttatgttatttagagattataaatattgtatagaaaagtattgtgaaatttttattttgttttgttttgatttatttagtagtgtgtgtagtttttagttatttatttttagtttgtttaattaattatgatttttttatatgtatttatttagagttgaaggtataggaattgtttatttggggagtttggtttttgagatgggagttttgttgatgtttttggttgaataaattttttttttttttaatttggtgtttgaggagttttgtttgttgtttattttgttataaatataagagataattagggagtatttgttgtgagtatatttgtattatgggggtgatttagggaagtggaaaagtgagatatagtttaaatattgaagttgggggggaatttttagttttttgataggttttggtgttttttattattattttattttgttgtttggggtttttagttgtttattttttagtagtgtgtatataagtttgtatttaggatttatgtgatatttaggttggagtggtgttaaggaatatgtaggtagttttaggaagatttaagttggaaattaatgttttaaagttttttttatttatttgaattggttatgtgtttttatgagtttagatttggttataatttgagtaaatgttttgtttataatttatagggttaatgggatttattagatatagttaagattgtattttagattattttatgtaatgttattgtagaagtagt

SEQ ID NO: 2260 - DNA, 2471 bp, Artificial Sequence
  chemically treated genomic DNA (Homo sapiens)
ggttttatgggtgggttttgagatgtggtatatggtatttagggtagggttgggaagggtggggtgtaggggtttttttggttgtagggtttatttattaggtgtttgggtttgttgtattgagtaggtatgggttttggttttttttattgttttttttaggtttagtttgtgtttagggtttaggatagggtttggttagtaggttttaggtttttaagatgtttttagtttttggagtgtgtgtgatgatgagtatttatggagttttttgtatgttgggttttgggtttttgagagggttattgggtggtgattgagttatgaggtggagggttagttttagggattttaggtgattttgtgttggtattatgttttttttttatgggtagttttgggtgtttttttttggttttgggtttagtggtttgtggtttgattttgtttatttttgtttggttgttttagtagtagtaggagtttatgttggagaaggtgttatggggtaggtggagggtttggttgatttagatgattttttaagtttttttttaatgaatatttgtttagtgtagttttttttttttaaattttttttatataggtagatatttttttggtttagggtaatttgttgagtttttgtttaaatatagtagttttgttgttttttaaatataattaatttaatttgggatttggggatttgaggtgggtagtattgggttttagatgagtttttattattttagatttatgtaggaagagttaggtagggtggggttttggggttatttggtgggtttagggttagggtattgtgatgtttttattttttatattatggggttttttggttgtagagttggggatttagttgggaatgttggttatagaggtagagagtttttattttgttgggttagttttgatttggtttttttagggtggtttagtgtttttttttgttttttttttggtttttattgtttatatttttttatttgtttattttggataataattagtatagtgtagtgtggttttgtagtgatattatttgtagagaggttaggtttagttttttttgttttttaaaaggttagtaggttttaggagttgggggtggggtttggttgtggggtttttatgttttaggggttagggtagattttttttagttggtaattattgtagattttttttttggttagtatttggggatttttttgtttttgttttgtttttttattttgtttgttgagatatagggttttatgggttttttttttggggttgggttgattgtggtttgtgaggggtagttattgtgttgggtttttttgttagaggtagaaattataaaattatttggaatatatatgttttaagtgatagatttaatttaattttataaatattgattttgtgtttaatttatttgttttttagtgttagtttatttttgagaagtttagtttggtagttgtagattttatttaattttagttttataatgttattagtttgtagtttgggagttgggtttatttaggttttggtaggtggggttagagttgggttttgatttttgtatttatatttattattatgtaaagtgttgggaagaggggtggggagttatggtaagttgagggtttaggtttgttttagtttgttagatgtttgttttggttgttttgatttagtagttaatttttgtggggtattgtggttatatggtgattttagtatggggatatttattagaaatggaattgatggattaaagtggaattaagtgaattgatttttttttttgggtattgaaatgttgtgtttaattaagtgattaattttgtgggtagggtggttgtggggatggaggtgggggataaggggatggtggttatggtggggattgaaaggtggttatggggatagatgaggtgagttaggtggttttggggttgagttttagtttagtttttggtaaagaggttttgtgtgtagaagtttgggtgtgatgttttttttttattgattgtgtgatattggttagttttgttttggttgagttttggtggttttgatgtaattttgtggggtttggtggtagggattgatttatttatttgtttatttatttatgtgtttgatatatattgtagtaaaggaaaggtgagagtagttataggttggttagggatgatttagattttagagtgtagtgtgtttgtttttttttttgtgaggtttagttttggtgtgtgtggatttttaggtattttttaggtttattttttattttgtagtgttttgtttatttgtttatatattttgttttgtggtttgattgttatttttttgttttgtggttaattggatggtttaagtggattgagttgggtagggtggttatatttgtggagtttgtggttgtggttggaggttttgtgggtagttga

SEQ ID NO: 2261 - DNA, 2471 bp, Artificial Sequence
  chemically treated genomic DNA (Homo sapiens)
ttagttgtttatggggtttttaattatagttataggttttataggtatgattattttgtttaatttagtttgtttgggttatttagttggttgtagagtagaaggatggtgattaaattatagaatagagtatgtggataggtgggtggggtattgtagagtggagggtggatttggagggtgtttgggaatttatatatattaaggttggattttataagaggaggggtgggtatgttatattttgaagtttgaattgtttttggttagtttgtggttgtttttattttttttttgttgtagtgtgtgttaaatatatgaatgaatgagtaaatgagtgaattagtttttgttattagattttatagggttatattaaggttattgaggtttagttgggataggattggttggtattatataattggtggggggagggtattatatttggatttttgtatatagggtttttttgttagaggttgggttggagtttgattttagggttatttggtttattttatttgtttttatagttattttttagtttttattatggttattatttttttgttttttatttttgtttttatagttattttgtttatggagttgattgtttgattaagtgtagtattttagtgtttagggagaaaaattaatttgtttggttttattttaatttattagttttatttttgataaatgtttttgtgttggagttattatgtagttgtagtgttttgtagagattagttgttaggttagggtagttagggtgagtatttggtgagttggggtaagtttggatttttaatttgttgtgattttttatttttttttttagtattttatatggtggtaagtgtgggtatagaggttagagtttagttttggttttatttgttagggtttggatgagtttagtttttaagttgtgagttggtgatattgtggggttgggattaaatgggatttgtggttgttaggttgggttttttaggaatgagttggtattggaggatgagtggattagatgtgaggttaatatttgtggaattgaattgaatttgttatttggggtgtgtatgttttaggtaattttgtggtttttgtttttggtaggaaaatttaatatgatgattgttttttgtaggttatagttagtttggttttaggagagagatttgtggagttttatgttttagtaggtaaggtagggggatggggtaggggtagggaggtttttgagtgttggttaggggaggaatttgtagtggttgttggttaaggagggtttgttttggtttttggggtatggaggttttatagttaggttttatttttagtttttgggatttgttggttttttaggagatgggggaggttgggtttgatttttttgtaggtggtgttattgtagggttatattgtattgtgttggttgttgtttagggtgggtagatagagggatgtggatggtgggagttaggggaagggtagaaggggatattgggttattttggagaagttaggttagggttggtttagtaggatgggggttttttgtttttatggttagtatttttagttgagtttttaattttgtagttaggaagttttgtagtgtgaaggatggggatattgtgatgttttggttttgagtttattaggtggttttagggttttattttgtttggttttttttgtatgggtttggggtgatgggggtttatttgaggtttagtgttgtttattttgaatttttaaattttaaattggattagttgtgtttagaaagtagtaaagttgttatatttgagtaaaggtttagtagattattttgggttaagagggtgtttgtttgtgtgagggggatttgaggaggaaaaattgtattaaataagtgtttattgaaaagaaatttgggggattatttgagttagttgggttttttatttgttttataatattttttttagtatgggtttttgttgttgttgggataattaagtaggagtggatggggttaggttataggttattgggtttaaggttaggaaggggtgtttaggattgtttatgggagaagggtgtggtgttgatatgaggttatttggagtttttgggattggttttttattttgtgatttagttgttatttggtggtttttttagaagtttagggtttagtatataggaagttttatgagtgtttattattatatatattttagaggttgagaatattttggaggtttggggtttgttggttagattttgttttgggttttgaatataggttgggtttggaagggatagtgaggggggttagagtttatgtttgtttagtgtagtaagtttaggtatttggtgggtgggttttgtagttagggaggtttttgtattttattttttttagttttgttttgggtattgtgtgttatattttagagtttatttatggggtt

SEQ ID NO: 2262 - DNA, 2371 bp, Artificial Sequence
  chemically treated genomic DNA (Homo sapiens)
tttttttagtttggagttatttttgaggtttttgttgttttttgaggaggaagaaaatggatttttttttttaggtttttaggttttatgttttaggtttttttatttttttttttttttttttttttttttttttttttttttgagatggagttttgttttgttatttaggttggagtgtagtggtgtgattttggtttattggaatttttgttttttgtgtttaagtagtttttttattttagttttttaagtagttggggttataggtgtgtattattatttttggttaattttttgtatttttagtagagatggggttttgttatgttggttaggttggttttgaatttttgattttaggtgatttgtttttttggttttttaaattgttgggattataggtatgagttattgtgtttagttttaggtttttttatttttgttttttttttgattttttttttttaaagaggttttttattttaagaagtgtttggtttattggttttggttttgttttgttgatagttagttattttttgagtttagttaggagattgaaaagttttattgtatttttttaagggttttatagttaggaaaattagtaaaggggaatatagtgtttgtagattggtgaggtttagggttgttttataaaaatggatttttggaaaaatataaattagtaatttattttgtgaattttattggtttaaaaaaaaaaaaaaggttattttatttgaataatgaagagagataaattatttttagttttttttttattagtgaataaggatataaatatttaatagaaatggaatatttatataaagttttaggtttgatttattagttattttagttttataaaatttagtatttttattaaaataaaatgatgtttaaaaggtttgtttgtttttaagaaaattgtatttaatatagggtaagattttgttatggtttatttatttatttatttattttttaaataaagtttaaatttttttgattttatgtttgttattatagttggagggaaattgattttagaatttatttgatatgttggatttttttgtggtatttattttattgtttagtagttagttatgatgttataagtttattagatttttggtagggggaaaatgttggggaattggaaagaatggatgttttttatttgttaggaaggtaggggaaggagttgggtatgtttgggaggagaagttgtgtggttggtgggggataggagtaggtttaatgtttgtgatattaaatgttaggtagaaatttgaaaattttagttatttagatgtttttttaatatttagatgtttggtattgagtagattatgtttttgttttttaggaggtgtttagtatttgggttttgattttaggtttttgggtgagtgtatattgttaggagttgtatatttttgtggttgtttatttttgggtttgggattttttttttaaatttttatatatagatgataggagtaattaggtttagatttttaaaagttgttgaagtagtgatttgagaagtttagtttttggaatgttatgtaagttaaaaaggaggaaaaaaaaaaaaaaatttttagttaatatatatataaatatatgtgatttttaagttataggatttaagaatttaaaataaaattagtaagtttgagaattagggttggagattgatattgagaagtgttgagtttttttttaggagtatgtttttttttaaattagaaaaatattgtatagttttgttttttttgataaagttttttgtttttagggagttgatagttgttaataaaagtatagggtggaatttatttatatgtaggttgggttttaaggagttattaagtgtagaaatggaaatggttttgtttaggagttttgtttttttgtgattggtaatggggatttttggagtttgggggagttttgtaggttatagatggagtagggttttggttttttggtgtttggttaagtatttgttttatggaagttattatttaggtttgtgatattatagttaattgtttttgataatgagttaggaattgtaggttttttagggttgtaagtttgagattttatagggagttgggaggagaggtagttggggaggggttattgttaattaaaatttagtgtttagataataagaaagaagtggttgagggggatagtattgtttttggtggggagagggtaggaggaagtgggtgtgtggaaggggttgagggtggggtatttgtgtttttattttttattataatttttatttttagtttttatagatgaggatattgaggttaggggtggttgagtggtttgt

SEQ ID NO: 2263 - DNA, 2371 bp, Artificial Sequence
  chemically treated genomic DNA (Homo sapiens)
gtaggttatttagttatttttggttttaatgtttttatttgtaaaggttgggggtggggattgtggtaggagatgagggtataaatattttatttttagttttttttgtatatttatttttttttgttttttttttattagagatgatattgttttttttaattattttttttttgttatttgagtattgggttttaattggtgatggtttttttttagttgtttttttttttggttttttgtgaagttttaggtttgtagttttgaggggtttgtagtttttggtttattgttaggggtaattagttgtgatgttataagtttaggtggtgatttttgtggggtagatgtttagttaggtattaggaggttaggattttgttttatttgtgatttgtggggtttttttaggttttaggggtttttattattagttgtagggaggtagggtttttaggtaaagttatttttatttttgtatttgatggttttttgaagtttagtttgtgtgtaaatgagttttattttgtgtttttgttggtaattgttggttttttggaagtaaggggttttgttaggaagaataaagttgtgtggtgtttttttgatttgggggaaagtgtgtttttgggggagggtttagtgttttttagtgttggtttttagttttggtttttagatttgttggttttgttttgggtttttaagttttatggtttaagagttatatatgtttgtgtgtgtgttggttgagggtttttttttttttttttttttttttggtttatatagtgttttagagattgaattttttaaattattgttttaatagtttttaaaaatttggatttagttatttttgttatttatgtgtaaagatttagaaaaaaaattttaaatttaagggtgggtagttgtgaggatgtatagtttttggtagtgtgtgtttatttggagatttgaggttaaagtttaaatgttgagtattttttgggaggtgggagtatggtttgtttagtgttagatatttggatattgagaaaatatttgggtagttggggtttttaggtttttgtttgatatttaatattataaatattgagtttgtttttgttttttattagttatgtggtttttttttttaaatatatttagtttttttttttgtttttttgatgggtaagaaatatttattttttttaattttttagtgttttttttttattggaaatttgatgggtttatgatattatggttggttgttgagtgatgaagtggatgttataaagaaatttgatatattagatagattttgaaattggtttttttttagttgtagtaataggtgtgaagttaggagaatttgagttttgtttaaaaaataaataaataaataaataaattataataaagttttgttttgtattaaatgtaatttttttaaaaataagtaaattttttggatattattttattttaatagaaatgttgagttttatgaaattaaagtggttaataaattagatttgaagttttgtgtgagtgttttatttttgttgagtgtttgtgtttttatttattaataaaagaggagttaggaatggtttatttttttttattatttaaatgagatagttttttttttttttttaggttaataaaatttatagggtaaattgttggtttatgtttttttaggaatttatttttatggagtgattttggattttattggtttgtagatattatatttttttttgttggtttttttggttgtgaagtttttaagagaatgtagtaaagttttttagttttttggttgggtttaggggataattggttgttagtagggtgggattaagattagtgggttaggtgttttttggaatgagaagtttttttgaaaggagagagttaagagaggaatagaagtaaagggatttggggttgggtgtggtggtttatgtttatagttttagtaatttgggaggttaagagggtagattatttgaggttaggagtttaagattagtttggttaatatggtgaaattttatttttattaaaaatataaaaaattagttaggagtggtggtgtatgtttgtaattttagttatttgggaggttgagataggagaattgtttgaatatgggaggtagaggttttagtgagttgagattgtgttattgtattttagtttgggtgatagagtaagattttattttaaaaaaaaaaaaaaaaagaagaagaagaagaagaaaaagtaaagggatttgggatatgaagtttaggggtttgggagggggaatttattttttttttttttaaaagatagtaaggattttagaaataattttaggttgaggggg

SEQ ID NO: 2264 - DNA, 2467 bp, Artificial Sequence
  chemically treated genomic DNA (Homo sapiens)
aggttttgtttgttattttggttgttttttgtttaaggttttgtttgttattttggttgttttttgtttaggtatgtttgttttttattttagtttttttggtaggttgtggatgtttttatatttttttgttttggtatttgtgtttttatttgaatgttttttttttttgtttgaatgttgttaatttattttttaggttttagtttaaataatttttttttggaagttttttttgattttagttgggtaggagttttttttgtgtttttattgtttttgtatttttttatttatgttagtttttattattgtttgttttttttgagaatgttttttttttatttttatgtattttttttttaattttatgtttggtatgtatttggtgtttagaaagtgttattgagtgattgaatgagtgaaggaatagtgaatgaattagtttttgttttgttatgattattgttatttttttgggtaagttattgtttttttgagttttagtttttttatttttaaaatatttttgtggttttgtttgtttttagattgtaagttattgtatatatttttgaagttattaatattaatgttgtagggtatgtttgtaggtttgttagttgggtttgtgtttttaaaattgtgtggtggttgttagggattttggttagtgaatgtagaaaggggagagattttgtttttgagagtagtagtaggaagagtaggggttttggaggtagttagttttgggttttaatttttgttttagttttttttggttgtgtgatttatagtaatatgtttttgagttttggtttttttatttataaaatagggttatagtatttgtttgtagggttgttgggtggattatatgaagttaagtttttttaaaatttagtttggatgtggaaagtgttagtaattaagagttttttatttttgtagtttaaggaatagtaggtggagtttgtatgtgggtagtggtgttttagatttgtttttttgttttatatataatgtttttttagaaggaagggaagagttaggaggggaggggtaggggtttataggttgtattaaatggtggttttttattgtaaaatttagtttaatttgaattttagtattagagggtttatggggtggagttttgggatttttagttttgtttttttttaggttaggtgttatggtgtagatttgtatggtttttttttgttttttgttgtaagtttttgttgtttattgtttttgtgtaaggtgttttagtttgtaatttagtagtgtaggttgggtttgaagaagtgggagtgtgtgggtaggtagatggggtgtatggtggttgagtgtattattgggtggttgagttgtagtagtgttatgttgtagttatggttgttttttttgtggtatgggtgtaggagtaggtggtttattttgaaggatatttttttaggttagtgtgagttttgttatattttgtttaggaatatggtttatagtattgtggaggttatgttggggtggggtggggtggggtggggtggggtgaggtgaggtgggaggaagttgtttttttttatttagggatttttaagatagttagatttttgtttgggatagtgttttttatatttagtttttttttttttttttgaaggttgtttagttggtggtatagtgtttagtttttatttatttggtttgtttgggttttatgttttagttttatttttttttagatatgggtgtgtttttttaagtttttgttattttatttgtaaatgggaatggtattttttatttgaatgtttttgagagaatttaataagattgtgtatttaaaaaatgtagtatagtgttaggtttttgatatagatttttttttttttgtgtgttttatagatttaggttgttttgaattttttgaggttggtgggttttagtggggagtgggtgggagttgagtgtggaggaattggattgtggtagttagttgtttgggtggtagatgggtagtttttgggtttttattttttatttgagggtagtggggagtttgagatggggttaaagagagttaggtggttagagtgttttgtgttttagagaggatataaaaggggatttttgtgtagggtttgggggtgggatttggagtttagatttgtttgggggtggattgggggaggttttagtttattaagtagatgggaaagatggttatgaggtttgatgagatgttttttgggggttttttagttttatttgttattttgtgttatattttggggagtgttatagtttatgattaggttgggtagttttgttttttattgaatttttagtatttagtatagttttggtatatagtaggagtataagtgttgttgaatgagtgaatgagatgaatgaatgaattattggtttaatttaaagtaagatattaaaagtagatggt

SEQ ID NO: 2265 - DNA, 2467 bp, Artificial Sequence
  chemically treated genomic DNA (Homo sapiens)
gttatttatttttggtattttgttttaagttgggttagtaatttatttatttattttatttatttatttagtaatatttgtgtttttattatgtgttagggttgtgttagatgttggggatttagtaaaggatagaattgtttaatttggttataagttatgatattttttgaggtgtgatatgaggtagtaggtggggttggggagtttttaggggatattttattaggttttatggttattttttttatttgtttggtgggttgaaattttttttaatttatttttagatagatttgggttttagattttgtttttaggttttgtatagggatttttttttgtattttttttgggatgtagggtgttttgattatttagttttttttaattttattttaggttttttattgtttttaggtagagggtagagatttgaaggttgtttatttgttatttaggtagttgattgttgtagtttaatttttttatgtttaatttttatttgttttttattaggatttattagttttagggaatttagagtagtttgggtttgtaaagtatataggaaaaaagaaatttgtgttgggggtttggtattgtgttatattttttagatatatggttttattggatttttttaagaatatttgagtagaaaatgttatttttatttgtagatgaggtggtagaggtttagagaggtatatttatgtttagggagggatgaagttggggtgtggaatttaggtaggttgagtgggtgaaggttgaatgttgtattattagttaggtgatttttagggagggaagggagggttgggtgtggagggtattgttttgggtggggatttggttattttgagggtttttggatggggagaggtagtttttttttattttattttattttattttattttattttattttattttagtatggtttttatggtgttgtggattgtgtttttgggtaaggtgtggtagaatttgtgttggtttggagaggtgttttttaaggtgagttgtttgtttttgtatttgtattatgaagaggatagttatgattatgatgtggtgttgttgtagtttgattatttggtggtgtgtttggttgttgtgtgttttgtttgtttgtttgtgtgtttttatttttttgagtttggtttgtattgttggattatgggttggggtgttttgtgtgagggtggtgagtagtggggatttgtggtgggaggtggagggagattgtgtggatttgtgttgtaatatttggtttggagaagggtggggttgggggttttggggttttattttataggttttttagtgttgggatttaaattgggttgaattttatggtagaaaattattatttaatgtggtttgtaggtttttgtttttttttttttagttttttttttttttttggaagggtgttatgtgtggggtaaaggggtaggtttgggatgttattgtttatgtgtaagttttatttgttgttttttgggttgtaagggtggaaggtttttaattattagtattttttatatttaggttggattttaggggaatttgattttatataatttatttaatagttttatgggtggatgttgtggttttattttatggatggagaaattaaggtttagagatatgttgttgtaagttatatagttagagaggattggagtaaagattagaatttagggttggttgtttttagagtttttgttttttttgttattgtttttagaaatagggttttttttttttttatgtttattgattagagtttttggtggttattgtatagttttggggatatagatttagttggtaaatttatagatatgttttgtagtgttagtgttggtggttttaaaaatgtgtatagtgatttataatttggaagtaggtggggttgtagagatattttaaggatggggaaattgaggtttagaggaatagtgatttatttaaggggatggtagtggttatggtaaagtaaaggttggtttatttattatttttttatttatttagttatttaatgatattttttgagtattaagtatgtattaggtgtggggttaggggaagggtatataaggatgaagagagaatatttttgggggagatagatagtggtaagagttgatatggatggggagatgtaggaatagtggagatatagaggaggtttttgtttagttagggttaggggaggtttttaggggagggttgtttaagttgaggtttggaagatgagttggtaatatttagataaaggggaaagatatttaggtgaagatataggtgttaagataggaagatgtgagaatatttgtagtttgttagaggggttgaggtggggggtaggtgtgtttgggtgaggagtaattagaatggtagatagggttttgggtgaggagtaattagaatggtagatagggttt

SEQ ID NO: 2266 - DNA, 2340 bp, Artificial Sequence
  chemically treated genomic DNA (Homo sapiens)
gatggtggtgattggtggtgttgaggtgggatttgggtgagttgagtgaaggtagtggtgagtggagattttaggagattgggttgggtttttattttgaggtggtagtagttttgttttgttgttatttgttgttttgggtttgtgatattatttttggggtgttttaggttttttgtggtttagtttaggggttgagttggggattggagtagtggttgtagttgtttttaggaaggggttggagtgggtagaaggaggagggtgggtgggagttgtttaaatggggaaggtgggaaagttgtggggttgggagggggtgtgtggttgttttgggggtttgtggatttgggttgtttttttttttgtttgggttgtttttgtttttgggggtgttgtgaggttgttggagatgtgggaatttgggtttaggttgagttgtgtggtttggaatttgtgatgtgggggttttttgggttgttagggggaaagggtttgtggttgtggttatgggagggttggggttgtggttggtaggagaaagtatgaggagtttttttttttttttttttatagagttttgttgagttagttgttgttgtaaaattgttgggagaattttattggtttgttttggggattataaaaatggtggttttgggggttgtttgtgtaaattatttggtattttgtgtgttttttgtgtgtaatttggtttggttgtgtttttgtggtgggtgttttttttatgtaggtttattttttttttattaattattatttgtagatttattttatagtgtgtaaaagtggagaaatatttttgtttttttttttggagggttaagttggtggttgattatatttttttttaatagaataaagtaaaaaattgaattttaaataaagtttgttgattggataaggttttttaaaatttgattgttggttttatggaatgtgtgttgttagttaatttgtgtggtggttgtggttttgtttaattgtattgtaatgagaggatttaatttttatttttgattgttgggatttttgtagtttttagagttggtaggggttgggagtgttgtttaggtaggtttttggagaagggagtggtaagaggatttggagttattgtgtttggagattggaagaaatttggatgaagttgagaaggtattatttgtttgtattgtagaagtaataagaaaattttagaaattggtaattggtggatgtgtatttttttttatttgtattgattggtattttgagtttttgaaaggagtggttggaagaagagaatgtagaattttggatatggtttttattttggaatagatttggagtttagaattttttttattgtttgtgtgatggggtttattttgtttttttttttttgatatttatttatattatggggtgaagaaggttgttgattgtaggagtttaagttattttaaaaaaagtttgaaatttgttttttaattgtaatttgaagttttaaaatgataaagtgttatatttgaggattttttttttttgattattttggttattttaaaggtttatgtttgaatataatttgtatgtttatttattagggaaagagtaattttgttttttttttttttatattttgaagaaaagtttttgaagagttatttaataatttgtgtattttataagtatatatttttatggtattagttttttatttgtattaatagtatgaaatagtgaatttttatttatgttgttatattttagtatattgagataaataaaattatttttgttttttggagttgataatattgaattttataaatttttaaattattgaattgagattgggttttaatatttgttttatatttgttaatatttaatgtaattatgattttttttttttaatgtgaaaattaaatttaatatttatttttattaatttttataatttattttttatttttgaattttgaatttttatagattgtatttaagatttggaaggaatattaggggtttatttgattttatataaatgttgtttgaattttgttttttttttatattgttgtttgagatttatttggtatttttttaaaattaaattttgagttgtaataatattttgattttaaagaatgtagaaatttagggtttattggtttgtttaagttgtggttgatatagtttgttgtgtttaattttagttttttaagtttttggttgttttagttttttagtgaattggatgtgtttttaggttttatttttttttttttttttaggttatttaatttagtaatttataaaatgttttttagt

SEQ ID NO: 2267 - DNA, 2340 bp, Artificial Sequence
  chemically treated genomic DNA (Homo sapiens)
attgaagagtattttataaattattggattaaataatttgaagaaaaaagaaggaatgaggtttgaagatatgtttaatttattgaagaattggggtagttaagagtttgaaaaattaaaattaaatataatggattgtattagttatagtttgggtagattgatgggttttgaatttttatgttttttaaaattaggatattattgtagtttagggtttagttttggaaagatattagataaattttaagtaatagtgtgaaagaaaggtagagtttaggtaatatttatataagattagatgaatttttgatattttttttaggttttgaatataatttgtgaaaatttagagtttaggggtagagagtagattgtgaggattaatgaaaatgaatattaggtttgatttttatattagaaaagggaggttataattatattaaatgttggtaaatgtgaaataggtgttaaaatttagttttaatttaataatttgggagtttataaaatttaatgttgttaattttaagaggtaagaataattttgtttgttttagtgtgttaagatatgataatataagtaaaagtttattattttatattgttgatataagtaaaaaattggtattataaaaatgtatatttatgaaatgtataaattgttaaatagttttttggggatttttttttaggatatgaaaaaggagggggtagagttgttttttttttggtagataagtatataagttatgtttaggtataggtttttgggatgattaaagtaattaggaggaaaaagtttttagatatagtattttgttattttgaaattttaaattatagttaaaaaataggttttagattttttttgaggtaatttgagtttttgtaattaataattttttttattttataatgtaaatgagtattgaaaaaaaggaaataaagtaagttttgttatatggatagtaagagaaattttgaattttaggtttgttttaggatgagagttatgtttaagattttgtattttttttttttaattattttttttaagaatttaaaatgttagttagtgtaggtaaaggaagatgtatatttgttggttgttaatttttgaaatttttttgttatttttatgatatagataagtgatgtttttttaattttgtttaggttttttttaatttttgaatatggtgattttgaatttttttgttatttttttttttagggatttatttaggtagtatttttagtttttgttagttttggaagttgtagagattttgatagttggggatggggattgaatttttttattgtagtgtaattaagtggaattatgattattgtatagattggttgataatatatattttataagattagtaattgaattttgagaagttttgtttaattaataggttttatttgggatttagttttttattttgttttattaggaggaaatataattagttattagtttagttttttaaaagaggggatagagatgtttttttgtttttgtatgttataaagtgaatttataagtagtagttggtggagggaaaatgggtttgtatggagaaggtgtttattatgaaggtatggttaagttgggttgtatgtaagaaatatataaaatattaggtgatttatataaatagtttttaggattattatttttgtggtttttaaggtaaattagtgggatttttttggtagttttgtggtaatagttagtttaataaagttttgtgaagaggaaaagaagaaagttttttgtatttttttttgttagttgtagttttagtttttttgtggttgtggttatgagttttttttttttgatagtttgagggatttttgtattgtgggttttgagttgtatagtttgatttgaatttgggtttttgtgtttttggtggttttatggtgtttttgagggtggagatggtttgggtagggggaggggtggtttgggtttgtaggtttttggggtggttgtatgtttttttttggttttgtagtttttttgttttttttgtttgaatagtttttgtttgtttttttttttttgtttgttttagtttttttttgggggtggttgtggttgttattttagtttttggtttggtttttgggttaggttgtgaagggtttggggtattttagaggtgatgttgtgggtttagggtggtgggtggtgatggggtggggttgttgttgttttagggtgggggtttagtttggttttttggggtttttgtttgttgttatttttatttggtttgtttggattttgttttaatgttgttgattgttgttatt

SEQ ID NO: 2268 - DNA, 2468 bp, Artificial Sequence
  chemically treated genomic DNA (Homo sapiens)
atgtttattttgtagaatggtttatatttaaatagatgatttttgtttttgagatggaattttgtttgttatttaggttggagtgtaggggtgtgattttggtttattataatttttgttttttgggtttaagtgatttttttgttttagtttttttagtagttgggattatagatatgtattattaatgtttagttaattttgtatttttagtagagatggggtttttttatgttggttagattggttttgtatttttgattttaggtgatttgtttgttttggttttttaaagtgttgggattataggtgtgagttattatatttagtttataggtgattttttaaattaatattgagattatagtattatgttttttttaaagtagtttggtgaggataattttttatttttattttaaaaaggaataaagaaaattgtagtatgaataaaattagaatggagaatgggttattttttggagtggtttgagttaagagggagttgttttttgtttgtgtttgtttttttgagggttttttgggtatagttgataaattatttaagtttgaaagatatatgttattttattaatatagttatttttttttattgttttagtggtgaaggtgtttgtattgtaatatggaggggtattaaatgttttgtgggttttagtttgttgttataggttaggtttgtttgtagttaagaaggttgtttaaattttagatgttatttggaggtatgaggatttgagtttagaggtggtagtgttttatttagggaagttaatagattgtgttttaggttttagttttgggttgggttaggattaaattttggttttttttttttggtattaaggggattagtgtttggttgtttgtagggggttagagtagggagggttttaggaagggttttagagtgggtttataggggatttttttttttggttttttggagtttaggttgttgagggtgtaaagttgtatgttattttgggtaagttgggtttgtagtgtgggtgtggtgaggatgtgtagtttatgtagttgtttttaagagtaagagaaagtgttggggtttttattgtagttgttggtgggaggtatattggggtagttggggtgtgttattagtttggttgttagggtgtggtttgttagggtattttttaggatttgtgttagggttttggatatgtggtgagtggatatgtgttggttgtaagtgtttaggtttatgaaggtgtttgtttatttgtggggggtgggatattagaggtgggattaggttgggttatggttaagggttaggtaggttagggaagggatggtggggtgggagggggtaattggggtggtggtagtggttgatgttagatttgtttttgggttgagaaatggatatagttagttaggtgaatagttagtgtggagggatagaggtagttatggtaggagatggggtggggagttttattgtaggttgtggtgggagaaggggtttatggtggtttgggtgttgtgttttatggtgtaggtgaaggtatgtgtgggggtttttagttaagtgtagttatttatattgtgttttagtggtagttgtgtaaagtgtattttataggtttgtagtgttttggtgaatatttggtatatgtttgtgggtggagtgggttagggaggagtatgtttttttatttgggggtattgaattttttttatttttttagttttgtttgggagtaatgttttttaaattgggattattaattatgtatttgggagtatgtgtatgtgttggtgtttgtttgtgtgtgtgggggttttgtttagtagtttttggaagtagtttagttgggttttgagttttttttgtatttagagggtgagtgagagatattttgagtgattgggagtagttgttgaggatattttttttgtgtttttgtgtgatggttttagtgtttgaatgtggaagttatttattgttagtttttaatggttttatagtattttttgggtggagttttgggggtttttgtgagtatttttttgtagttgtggttttgtatttgaggtaaatttatgtttttggttgttattgttttttggaattttattttgttaaggaagaagttttttgggttgagtagtgatgaggtgttatggtgggttggatttatggggtggtttttggataggttggtgtggaggtttgtggggatgttgtgtttgagggtggagtgtgagttggagtattagtggttgtggagttgtgtgttttaagttgattgttgttttgttagaggttttttttttatttgtgggttagttttgttgtgttttttgtggttgtattgttgattagtagggatatgttggttatagttttggttagaaaggtttttatgatatttttattgtgttgtgggtagtaattaaagttgtttgtggtgatt

SEQ ID NO: 2269 - DNA, 2468 bp, Artificial Sequence
  chemically treated genomic DNA (Homo sapiens)
ggttattgtggatgattttggttattgtttgtgatgtgatgagggtattgtggaggtttttttggttggggttgtgattagtgtgtttttgttggttaatggtgtggttatggagagtgtggtggagttggtttgtaggtgaggggagggtttttagtagggtggtgattggtttggggtgtgtggttttgtggttgttagtgttttagtttgtgttttgtttttaggtatagtatttttatgggtttttatgttaatttgtttgagggttgttttgtgggtttggtttgttgtggtgttttattgttgtttggtttggaaggttttttttttggtaagatgggattttgggaggtggtggtggttggagatgtggatttgttttaggtgtggagttgtagttataggaggatgtttgtgaggatttttagagttttgtttggagggtattgtgaggttgttaggagttggtggtggatgatttttgtatttaaatattggagttattatatggaagtatgaggagggtatttttggtagttatttttggttgtttaaggtgttttttgtttgttttttaggtgtgggaggagtttgaggtttaattaagttgtttttgggagttgttgggtagggtttttatgtatgtggatgggtattagtatgtgtatgtgtttttaggtgtgtggttagtgattttagtttggagggtgttatttttaggtggggttgggggagtaggggaagtttgatgtttttaggtgaaaggatgtgtttttttttgatttgttttgtttgtaggtgtgtgttaggtgtttgttgaggtgttgtaggtttatggggtgtgttttatgtgattgttgttggagtgtggtgtgggtggttgtatttggttggaggtttttgtgtgtgtttttgtttgtgttgtggagtgtgatgtttgggttgttgtgggtttttttttttgttatggtttgtggtgaggttttttgttttgttttttattatagttgtttttgtttttttgtattggttgtttatttggttagttgtgtttgttttttaatttggaagtgagtttggtgttgattgttgttgttattttagttatttttttttattttgttgttttttttttagtttatttagtttttggttatggtttggtttggttttatttttgatgttttgttttttataggtggatagatgtttttgtgggtttgagtatttgtggttggtatatgtttgtttattgtgtgtttggggttttggtgtgggttttggaaggtattttagtgggttatattttgatagttgagttgatggtgtattttggttattttagtgtgttttttattggtggttgtggtgaaggttttgatgtttttttttgtttttgggagtggttgtatgagttgtgtgtttttattgtgtttatgttgtgggtttagtttgtttaggatggtgtgtagttttgtgtttttgatgatttggattttaagaggttaggggaggaggttttttgtgagtttattttggaattttttttggaattttttttattttgattttttatagataattaagtattaatttttttagtattaagaaaggggagttaggatttagttttggtttagtttagagttgggatttggagtatgatttgttgatttttttgggtaggatattgttatttttgggtttaggtttttatgtttttaaatggtatttagagtttgagtagtttttttggttgtaggtaggtttagtttgtggtagtgggttagggtttgtagagtatttggtgtttttttatgttgtaatgtaaatatttttattattggggtagtggggagagatggttatattaataaaataatgtgtgttttttaaatttgggtggtttattagttgtgtttaggagatttttagagaaataagtatggataaagagtagtttttttttggtttaaattattttaggaaatggtttattttttattttggttttgtttatgttgtaattttttttatttttttttagggtgggagtgggagattgtttttattaggttgttttggaagaggtataatattataattttagtattgatttaagaagttatttgtaggttgagtgtggtggtttatatttgtaattttagtattttgggaggttgaggtgggtagattatttgaggttaggagtgtgagattagtttgattaatatggagaaattttatttttattaaaaatataaaattagttgggtattggtggtgtatgtttgtaattttagttattggagaggttgaggtaggagaattgtttgaatttgggaggtggaggttgtggtgagttgaggttgtgtttttgtattttagtttgggtaatgagtgaaattttattttaaaaataaaagttatttgtttagatgtaagttattttatgggataggtgt

SEQ ID NO: 2270 - DNA, 2782 bp, Artificial Sequence
  chemically treated genomic DNA (Homo sapiens)
tttttttttttttttaggtggtagaaatttagttttagttaaagatatatagaatttttgtagtttgattttttttttgtttttttttttttgttttgtttaattttggtagtttaagttttaagatagaggagagatagatatgttttttttttaagatggggggttttgaaagattgatgtttattagagggttgaaaaggggggttgtttttggagtagagtaaagtgaggatttagtggggttatggagtaatagggggttaggttttgttttttttattaatttagtattaattgttttttgtattaatagttattgattgtttatagggttttgggtattgttttaaaagtggggattaggaggaaagttttttaatggggttgatattttagtagagaaagtaggtaataaataatgaaataaattagaatataggaagagttgttatagaagaggttttttaatgtggggaggggaagataagatgtggagaggtatttatgaggtttatgataaatattttattatttttgtttagttagttttttttttttttttttttagatgtgtatatatatatatatatatattttttttttttttttttttttggtttttgtattagattttttaaattttgtttgatttgtttttgtatatttttagggttttgggattttagtagttggttttttgttttttagggttattagtaaagttagaggaagttggatggtaaagggtagtggggttttttatttttttttggaagaagtgtgttgaggttagatgtgttatgtgatagtgggatttgtttttttggaagttagtttagttggtggagatggtattttagaggttttggtaggttttttatttagttttgttttatggttgtttgttgtttgttgaaagattagtttgagtatgattaggatgtggatagttttaaggttatttttattagtaggtttgttttgatttttttagtattggttattatagtttttttttggattgatttttgtgtggttttatttttatgtaggtttttttttttagggttagtttgaggtttatttaggtttagtagtaaagtgttttataaattgtaaagtgttatatatattgtgtttgtggttatgtgtttaagaatgttgtgattaaagtgaggagaaaggtagtttttgtgttatagtttttattttagatatatgagtttgtggagttgtgggaaagaaggaggaggtgttggatgaagttggaaatggtaaggggaggttggggaaatatttagttgttagtggtttttttggggtatgttgggattagttaagagaatgtaatagttaggggtgggagttttttttgtggttgtatatgttaggtttttttagttttgtaggtttaaatgaaggtttatgtgaagggggaattgttttggatagtttagtgttttttagagttatattattattattttttattatgtggaggtggttgaaaaaaaggagttatagatgggtaaggtttgaggggtgttgggttgatgaggtaaaaaaaaaagtaggtgttgtggtgttgatgggaggtttttttttttttataggatgttaggaaggaaatggggttgttatagaggtggtgaggtgttagggtttatggagggtttatttgttgtgtgggggtgagtattaggtgttgggtgtatgggggtttgtgtgtgtttgtgtatgtgtgtgggtgtgtgtgtatgtgtgtttaggttgtgtgtgtaggggttgtgtgtgtgtttgtgtgtggtgtgtgtgtgtgtgttttgtgtgtgtatgggtgtggtagaggtgggtgtgtgatttggttgtggtagtgtgtgtttgttgttttgtgtgtttgtttgttggagtgtagtattgtttttggttaggagtgtgtatgtgtggggtgagtgagtgagttgggggtttgggtggggtgggttgtggagagtagttatggggtgttgttgtttttaggatgttttggtattgggtttagtttttaggttttatggtgaggtgaggtggtagttggggttggttggttattttttttttaatagttggttgtggtttggggggttgtgggagaggtggagagggggtgttgggaggggtttgaaggtggtttggttgagttttgtgtttttttttttgggtgtgggttgtggggggtggttgtggaagggtggggtttttgggtgggtggtttgtggtttttgaggagttttgagaataaaaggagatggtgatggtttttttgtggttaaaataatttgtgttggtggtagtttaaggttgggttgtggtttttgagttttttgttttaatttttttgttgttgttgttttttttttgtgtttggttggaggttgtaggggttgattttttttgggagttggtgaggtgtgggtgaggtgtggatttttggttgtagttgggtggaggtgggatggtatttagttatgttgtgtttttggttgttttttttttttttttattgtgtgtgttgttttgttttgtttttttttttatttggattttgggtagatttgttaatttatggttatgtgaggttgggaggggtggggatggttttgattttagtgtttttttagatgtttttatattttattttttgtgtagttaggtttttgtaggtggtgtgttttgtattttgtatgtgggggagagaggtgtttttttttgtagggtgtgggtataggtatggtaaggt

SEQ ID NO: 2271 - DNA, 2782 bp, Artificial Sequence
  chemically treated genomic DNA (Homo sapiens)
gttttgttgtatttgtgtttgtgttttgtaggaggaagtattttttttttttgtatgtagggtgtggagtgtgttgtttgtaaaagtttagttgtatgggagatggggtataaaaatatttgagggagtgttggggttggagttgtttttattttttttagttttatgtagttgtgagttggtaagtttatttggaatttaggtgggaaagggggtggggtaggatgatgtgtgtggtggaggggaggagagggtagttgggagtgtggtgtgattgggtattgttttatttttgtttggttgtggttgggagtttgtattttgtttgtattttgttggtttttggggagggttggtttttgtggtttttagttaggtgtaggaaggaggtagtggtggtgaaggggttaaggtggagggtttggaggttgtggtttggttttgggttgttgttagtgtaggttgttttgattatggaggagttgttgttgtttttttttgtttttggggttttttgagggttgtaggttgtttgtttgggggttttgtttttttgtggttgttttttgtggtttgtatttgggagggaggatgtggggtttggttgggttgtttttaggttttttttgatgttttttttttgttttttttgtagttttttgggttgtggttagttgttggggagggggtggttggttggttttagttgttgttttgttttgttgtgggatttgggggttgggtttggtgttagggtgttttgggaatggtggtgttttgtggttgttttttgtagtttattttgtttgggtttttgatttgtttatttattttatgtatgtatatttttggttggaggtgatgttgtgttttggtgggtgggtgtgtagagtgatgggtatgtattattgtggttaggttgtgtgtttgtttttgttatgtttgtgtatatgtgggatatatgtgtgtgtattgtatataaatgtatgtatggtttttgtatgtgtggtttgagtatatgtgtgtgtatatttatgtatgtatataggtatgtatgggtttttgtgtatttagtgtttggtgtttgtttttgtgtaataggtgggttttttgtgggttttggtattttattatttttgtagtggttttattttttttttggtgttttgtgagggagggagaattttttattagtattatagtatttatttttttttttgttttgttagtttgatgttttttaaattttatttatttgtgattttttttttttaattatttttgtgtggtggaaaatggtggtgatgtgattttgaggggtattgagttgtttagagtgattttttttttatataagtttttatttgaatttgtaagattggagggatttggtgtgtgtaattgtggagggggtttttatttttggttgttgtatttttttggttgattttagtgtgttttggggaggttgttgatagttggatgtttttttagtttttttttattatttttagttttgtttagtatttttttttttttttttatagttttatgggtttgtgtatttggggtggaggttgtggtatagaaattgtttttttttttattttagttatagtatttttgaatatatggttataggtgtgatgtatgtggtattttgtagtttatgaagtattttgttgttaagtttgagtgagttttaggttggttttgggggaggggatttgtatggggatggaattatgtaggggttagtttaggaaggagttgtaatggttagtgttgggagagttagggtaggtttgttggtggaggtggttttggagttgtttatgttttggttgtgtttggattaattttttagtagatggtaggtagttgtgaggtagggttgggtggagggtttgttgaggtttttgaggtgttatttttattagttgagttggtttttaggagggtgagttttattgttatgtgatgtgtttggttttagtatattttttttgggaaagagtgaagggttttattgttttttgttatttagttttttttggttttgttaatggttttagggggtaggagattaattgttggaattttagagttttggaggtgtgtaagggtaggttaaatagaatttggaggatttggtgtaagagttaggaagagagagagagagagagtgtgtgtgtgtgtgtgtgtgtgtatttgagagagagagagagagagattgattgagtaggaatggtgagatgtttattatgggttttgtaagtatttttttatgttttgtttttttttttttatattgaggagttttttttgtgataattttttttatgttttggtttattttattgtttattatttgttttttttattggagtgttaattttattagagagttttttttttggtttttatttttagaatagtgtttagagttttgtggataattagtaattattagtgtaaagaatagttagtgttgggttggtggggagggtaggatttggttttttgttgttttatggttttattgagtttttgttttgttttgttttgagggtagtttttttttttagttttttggtaggtattagttttttaaagttttttattttgagagagaagtatgtttgttttttttttgttttgggatttgggttattaggattagataggatagaggagaagaaatagaaagaaaattagattgtaaaggttttgtgtatttttagttggggttaagtttttgttatttaaaaaaaaaaagaga

SEQ ID NO: 2272 - DNA, 2377 bp, Artificial Sequence
  chemically treated genomic DNA (Homo sapiens)
tattttagggaggttagttgggggtaggttttggatttgttttaggtatttgaagtttaaagaataggatatattggttttgttatttttttttattttttgtttatttattttttaggttagattattgtatttttgtttttattattgtgtgatttgtttggtaattattttttttttttttttgaaatggagttttgttttgttatttaggttggagtgtagtggtgtgattttggtttattgtaatttttgttttttgggtttaagtaatttttttgttttagttttttgagtagttgggattataggtgtatgttgttatgtttggttaatttttttgtattttaatagagatagggttttattgtgttgtttaggttggttttgaatttttgagtttaggtaatttgtttattttagttttttgaagtgttaggattataggtatgagttattgtgtttggttttggtaattattttttttttttttttttgtttggtgttttgagatagagttttgtttttatttaggttgaagtgtaatggtatgagtttagtttattgtaatttttgttttttgggtttaagtgatttttttattttatttattttggtttttaaagttttgggattataggtatgaggtattgtatgtggtttttggtaagtatttaaaagtttgttttgtgatagtttatgatattagatttatttaagtggagggttggatagagtttttgatatatttgttggtatggaggtttagtttaggagtataggagttttgaggaggtttttgatttattgttttatggttttaaatagttagtggggttttttggtgaaaggtatttttatgttatgaaattgtgttatttttgtggtaatggttgttgataatattggtttttgaagtttttgagtttttaatggttgattttgtatttaggaagttattagggtggtgatggggttggggtaggagtgggaagggttggggtaatgaggggaagttagggttttgggggaaattttttatttggggtgagggatgtggaggtagatattgggtattggggtagggttagggggtggaggtgttttggggaggagagggtaggattgggtttgtattgggatgtattgttttagttggttttttgggaagattttgtatagttggggttttagtgattgttttgtaagtatggtgaatattatgttttttagtattagggagtttatgttttgaaaaaggatggatagtaaaggggttaaggtaaagtggtatagggatatatatgagggtttgttttttttttattagagttgtgatttttgatttaattgtttggaggttttggagtataggttttagtgttggtttatttttatttagagatgggggttttattatgttgtttaggttggttttgaatttttgtgtttaagtgatttttttgttttagttttttaaagttttgggaatataggtttaggttttggtgtaatgaggtgttatttagattgtgaattttggtgtttttaattgtgtaatgggaataatattatttgtattgtgtaagtgataggttttaaagttattggtgttgtggtgtttatattttttttatttgtaagatggttttgtatagttgtagaagtattttttggggttttttgttaatgttgggtaggtggtttgggagtgagtagtggaagagtaggttgttgaggtttttgttgtagatttatattaggtgtgtttagtttgtggttggttttatttgttgtggttttggtttttttttggttaggttggttttgttttgttttaggtgtgggtgtaagaggggggtgaaaatatggagtattttgagggttttgtggttgatttttgattttgatttgtgtattggagaggttgatttttgattttttattttatggggtaaatttttagttttttgggttgtatttggtgttaggttttgtttaagtatttttggtattattggtaggtttggtgtttggtgttatgtgatagtgatgaggtgtgttgttgttttggggtagtgtttgggtatttagattgttgtaagttgtttttggttaggtagttgttaatagttttgtttttggttatagttgttgttttggttgttatggtgtgggtttgattgggttttaggttaggttgtgttttgttttttttggatgggtttggttttttttggttgtgtttggttttttttttggttggtttgggtttttttggttatatttgggtttttttggttttatttggtttatggttgtggtgtttggttttttttgtgttttggtttgggggttttttttgaaggttgaattt

SEQ ID NO: 2273 - DNA, 2377 bp, Artificial Sequence
  chemically treated genomic DNA (Homo sapiens)
gaatttggtttttggaaagagtttttgggttggggtatggagagagttgagtgttgtagttgtgagttgaatagagttggagagatttgagtatgattggagaagtttaggttggttggaagaggagttgagtgtggttggaaggaattgagtttgtttgaagggagtggagtgtagtttggtttggggtttggttgagtttgtgttatggtggttgaggtgatagttgtggttggaagtggggttgttggtggttgtttggttaaagatggtttgtagtagtttaagtgtttggatattattttaaaatggtggtgtgttttgttgttgttgtgtgatgttgagtgttgagtttattaatggtgttgggagtatttgggtggggtttggtgttgagtgtagtttgaggagttgagggtttattttgtgaggtgggaggttaggggttagtttttttggtgtgtggattggggttaggggttagttgtggggtttttaggatgttttatgtttttgttttttttttgtgtttgtgtttggggtggggtggggttggtttggttgggagggggttggggttgtggtaggtagggttggttgtgggttgagtgtgtttggtgtgggtttgtagtggaggttttagtaatttgtttttttgttgtttgtttttggattatttgtttagtgttggtgaggagttttgggaggtgtttttgtggttgtatggagttattttgtaggtgaggggggtgtgagtgttgtagtattagtggttttagggtttgttgtttatgtgatgtgggtagtattgtttttgttgtgtagttgaggatattgaggtttatggtttgagtaatattttattatattgaagtttgggtttgtatttttagagttttgggaggttgaggtgagaggattatttgagtataggagtttgagattagtttggataatatagtgagatttttatttttaaataaaaatagattaatgttaaagtttgtgttttagagtttttaggtaattggattagaagttgtagttttggtgggaggaaggtgagtttttatgtgtgtttttgtgttattttgttttggtttttttgttgtttatttttttttagggtgtggattttttggtgttagaaagtgtgatgtttgttatatttgtggagtggttgttggggttttagttgtatggagtttttttagagggttggttggaatagtatattttagtatgggtttagttttatttttttttttttaaggtatttttattttttaattttattttagtgtttaatgtttgtttttatattttttattttaagtagggaattttttttaaaattttgatttttttttattgttttagttttttttatttttgttttagttttattattattttgatagttttttgggtgtagagttggttattgaaaatttaagagttttgagagttagtgttgttagtagttattgttatgaagatggtgtaattttatggtatggagatgttttttattaaggagttttattggttgtttgggattatggagtggtgagttaggagtttttttagggtttttgtatttttgagttgaatttttatgttagtggatgtgttgggggttttatttagttttttatttgagtggatttgatgttatgggttgttatagaataggtttttaaatgtttgttagaggttatatgtagtgttttatgtttgtaattttagaattttgggagttgaggtgggtgaggtgggaggattatttgagtttaggaggtggaggttgtagtgagttgagtttatgttattgtattttagtttgggtgagagtaagattttgttttaaaatattaaataaaaaaagaaaaaagaaatgattgttaaggttaggtatggtggtttatgtttgtaattttagtattttgggaggttgaggtgagtagattgtttgagtttaggagtttaaaattagtttggataatatagtgaaattttgtttttattaaaatataaaaaaattagttaggtatggtagtatgtatttgtagttttagttatttgggaggttgaggtaggagaattgtttgaatttgggaggtagaggttgtagtgagttaagattgtgttattgtattttagtttgggtgatagagtaagattttattttaaaagaaaaaaagaaatgattgttggataagttatatagtgataggagtaggggtgtagtagtttggtttgaggggtagataggtgaggggtgggaaagaatagtagagttagtgtattttattttttgggttttaggtatttaaaatagatttaggatttgtttttaattggtttttttgagatg

SEQ ID NO: 2274 - DNA, 3534 bp, Artificial Sequence
  chemically treated genomic DNA (Homo sapiens)
agtaaatggttatattatgagttatgaatatagagtgatttatttataatagttatgtaatatgtgggatttaaaaggaattggtatatttatttttattgatattaaaattttttaaatttattattgattgaggaaaataatttggttagatttagtgtttaatatggtagtatttatgaaaaatattaaattaagaatagaaaaattgtatataaagttagagatagattttaaatttttttttttttttttttagatggagttttgtttttgttatttaggttttggagtgtaatggtgtgattatggtttattgtaatttttgttttttgggtttaagtaatttttttgttttagttggtatagttgggattataggtatgtgttattatatttagttaatttttgtatttttagtagagatagggttttattatgttggttaggttggttttgaatttttgattttgtgatttgtttattttggttttttaaagtgttgggattataggtgtgagttattgtattggttgattttaaatttttatgtttggagattagtaaagggtatggaataatgaaggggaatttttattttattttgtttttgagatagggttttagtttgttgtttaggttggggtgtagtggtgtaattatggtttattgtagttttaattttgaggttttaagtgatttttttattttagttttttaagtagttgggattataagtatatggtattatatttggttaatttttaaattttttgtagagatggggttttattatgttgtttaagttggttttaaatttttgggtttaagtgatttttttgttttagtttttgaaggtgttgggattataggtgtgagttattatgtttggtttaattttatttattaaatatgttagaattaagtgtttttttttgagatttgtgagtttttttagtgaaaaaatatttaaaaggtttgttagtatgtttataaaaaagaagataggaggggagggataggatttaggagggtagtttatagtttgttttttttgttttgttttggggtggagtttgtattgtgagttgagttttttttaaggtgtatgttatttttggagttaagtttagtagtgtagttgtatagttagggtggggtgggttaggtggagaagtaggttgtagagggggtagggtggtggtttggggattttagggaagggttatgggagtatggtggtgtttttagtgttggggtttttaggggttttggtattgtgagttgatttttgggggtaggaggttattttatgtaggggtagtaggtgttggttattatattgtttagtaaggtggtagtagaggttttttaggttttttttttaggaaaggagtttgggttgttttgatgagttttttgttttttttttttttgtaggatgaagatgagatgttataagtttttttttatgttttgtatggttggtttgtgttttattttttttttgtatttttttaagattttgttttatgttatttttttttgagaattggttttttttagttttaatttggtgtttagttttttttggaataatgttttggttatgttttaggttagttttgagttaggaggttttgatttgttgtgtattttattttatttttatttgtttttgttgtagttgttgttgtttagtaaggtggttgaggagttttattgggtggatttggtgttgtttgaggatattattgagtattttgtgtgtattaaggttggtggtgtttgttttaaatttggtattaagatgttggagaggttgtttttgggatggttggaggagaagtttgagggggttaatggttttttggtttggtggttattttggtattttttgagtgtttgggagtgtatggggggttgaggtgtttggtgtaagtgggtggagtgtgtgtgtttgtttggttggtatggatttagttgtggtgtgtttattgtggtgtagtattttaatttgtttattaaggagtggttggtgtttagggaggtgttgtgttgtgttattaatgttattaatgttaattatgagtttgatttgttggatgtgtgtttttatgagttgggtgatgtggtggatgtttttgtggtgtgtgagtttaattttatggtttatggggagttgtggttgtttaagttttgggagatgttgattaatggtatttttgagtatatttgttataaggtgttttatgtttttttggattattttttgtttggtggttggtaggatggttggattgttgatgattatttgtgtattttttttatttaggatggtgttttgtggttgtgtaatttgtggtttgatgatgtttttattattgatgatgtggatgagattttggtttgtgatggtgtttttttttttaagttttatgatggttggattgagttttttgttttttatatgtgtaagttgttttatggttttttttggaagtagttgggtattttggaggtggtgttaggttgtatggtggatatgttgtaggtagtgtatgggttggatggtatttgtttgtgttgttgttagtattatattatgtttaattttagatagtatgagaattgtattggttatattttggtgtagtggttgttgggtagttttttgtattttgttggttggtattgtttttggtgttttatgtttgagggtatttattttaagtttgtgtttgtttagaatggtgattttttatgttggggtgattatgaggataagtgggatttgaattatatttgtggtttgatttgtattgggggttggtttgatggtatgtagtaggagtatttgtttgtagattttagtgagtatatgtatgtgtttaagtatttgttgaagaattatgattggttttattatttgttggataatttttattaggagtttaggagtatggtggtgggtgggtggtgttataggggttttgagggaaggttgtttgtttggggtaaattggatgaggtggaagtttagagttgtatgatttgatagggtttgtgatagggtgggggtggtggtggtttttagtgttatttttttgttttttgttggttttttggtttttgaggggattaggagtgggtggggagtgggggtgggggtagggtttttttattgaagtttttgtgaattaagggttaggtttttgagtttagaaaatattttttttgttgggagagggtgtaggttgtgatgtttgggtggtttttatgattgttaagattgttgtggttaggaggtgttattggagtgtgtgtggtggtttttgggtagtgggggagggtaggtaggattggggaagagagtttgtaggattttattaggtagtttttggggggtggttaggttgggaaaaagtttattatttggtatttttgggttttgggttttgtgtgggagattggtttgttaggaggatttagggttttgtaagtagatgtatttgggtttaggaggaagtgtgg

SEQ ID NO: 2275 - DNA, 3534 bp, Artificial Sequence
  chemically treated genomic DNA (Homo sapiens)
ttatgtttttttttggatttaaatgtatttatttatagagttttgggtttttttggtaggttggttttttatatggagtttaaggtttagggatgttaaatggtgggtttttttttggtttggttattttttagaggttgtttggtgagattttgtaggtttttttttttaattttgtttatttttttttgttatttagggattattatgtatattttagtggtattttttggttatagtagttttggtagttataagggttatttagatgttatggtttgtgtttttttttaataggagggatattttttgagtttaaaggtttgatttttgatttataagggttttagtagggaaattttatttttatttttattttttatttatttttggtttttttaagaattaaggagttggtaggaggtagggagatagtgttaggggttgttgttatttttgttttgttataaattttattagattatgtagttttagatttttgttttgtttagtttgttttgggtgggtggtttttttttgggatttttgtggtgttatttgtttgttgttgtgtttttgggtttttggtaggggttgtttagtaggtagtggaattggttgtagttttttagtaggtatttgggtgtatatatgtgtttgttggggtttgtaggtgggtatttttgttgtgtgttgttgaattagtttttggtgtggattaggttgtggatgtagtttaggttttgtttgtttttgtagttattttagtgtgggaagttgttattttgggtggatatgagtttgaagtagatgtttttgggtgtgaagtattaggagtagtgttagttggtgaagtgtagggggttgtttagtgattattgtattaggatgtggttggtgtggtttttatattgtttgaagttgggtatggtgtagtattggtggtggtgtaggtggatgttgtttagtttatatattgtttgtagtatgtttattgtgtagtttgatattatttttagggtgtttggttgtttttagaagaagttgtagagtgatttgtgtatgtggaaggtgaagggtttggtttagttattgtagagtttgaggaaaaggatgttgttatgggttgggattttgtttgtattgttaatgatgaagatgttgttgggttgtaggttgtgtagttgtgagatgttgttttgggtgaggaaggtgtgtaggtagttgttggtgatttagttgttttgttggttgttgggtgggaagtggtttaggaagatatagagtattttgtggtggatgtatttgaaggtgttattggttagtattttttggaatttgagtggttgtggttttttataagttgtgaagttggatttgtatattataaaggtgtttattatgttgtttagtttgtggaagtgtatgtttagtaggttgaatttgtggttgatgttgatggtgttgatgatgtggtgtggtatttttttgggtattagttgttttttggtgggtaggttggagtattgtattatagtgggtatgttgtagttgggtttgtgttagttgggtaggtatatgtattttatttatttgtgttgggtgttttggttttttgtgtgtttttgggtgtttaggaggtattggggtggttgttgggttgaggagttgttggtttttttaggttttttttttggttgttttgggggtggtttttttagtattttggtgttgggtttgaagtagatgttgttggttttggtgtgtatgaaatatttggtggtgtttttgggtagtattaagtttatttggtggagttttttggttgttttgttgggtggtagtggttgtagtaggggtgagtgggagtagagtggggtatgtagtaggttagggttttttggtttggggttggtttggggtgtgattggggtattgttttagaaaaagttggatattaggttagggttgagggaggttagtttttgggggaaggtgatataggatagggttttgaagaagtgtaggaaggagatgaggtataggttggttatatagaatatgagaaagagtttgtagtgttttatttttattttgtgggagagagagagataggagatttattagggtagtttaggttttttttttaggaaggggatttaggaggtttttgttgttattttgttggataatgtggtggttagtatttgttgtttttgtatggagtgattttttgtttttaagagttaatttgtggtattaaggtttttgaaagttttagtattgaggatattgttgtgtttttatagtttttttttgagatttttaggttattattttgttttttttgtagtttgtttttttgtttggtttattttattttgattgtgtggttgtattgttaggtttggttttaggagtaatatgtgttttgggaaaagtttaatttgtagtatagattttgttttaggatagaatggggagagtaggttgtaggttgtttttttgggttttgtttttttttttttatttttttttttatggatatattgataaattttttgaatatttttttattgaaaaaatttataggttttaagggaaaatatttaattttaatatatttaatgaataaaattaggttaggtgtggtggtttatgtttgtaattttaatatttttagaggttgaggtaggaggattatttgagtttaggagtttgagattagtttggataatatagtgagattttatttttatagaaaatttaaaaattagttaggtgtggtgttatgtgtttgtggttttagttatttaggaggttgaggtgggaggattatttgagattttgaggttgaggttgtagtgagttatgattgtattattgtgttttagtttggataatagattgagattttattttaaaaataaaataaaataaaagtttttttttattattttatgttttttattaatttttaggtataaaaatttgaggttggttagtgtagtggtttatgtttataattttagtattttgggaggttgaggtgggtagattataaggttaggagtttgagattagtttggttaatatggtgaaattttgtttttattaaaaatataaaagttagttgagtgtagtggtgtatgtttataattttagttatattggttgaggtaggagaattatttgaatttagggggtggaagttgtagtgagttatgattatgttattgtattttagaatttgggtgataagagtaagattttatttaaaaaaaaaaaaaaaaaaatttgaggtttatttttggttttatatgtaatttttttatttttgatttaatattttttataaatattattatattggatattaagtttaattaagttgttttttttaattaatgatagatttaaaagattttggtattagtagaaataaatgtattagttttttttaaattttatatattatatggttattgtgaataaattattttgtatttatgatttatgatgtaattatttgtt

SEQ ID NO: 2276 - DNA, 2484 bp, Artificial Sequence
  chemically treated genomic DNA (Homo sapiens)
tttagtagttgagattataggtgtgtgttaataagattggttaagttgtgtatttttagtagagatgaggttttattatgttgggtaggttgattttaaatttttgattttaggtgatttatttgttttggttttttaaagtgttgggattataggtgtgagttattgtgtttagttgggaaatatttattagggataataaaggtttagaagaattttttggggaaattttgtgaggagtataattttagagggtttatagtagttatagttttttggtgtgatattaggtatattgttggttgtataggttgttgggtataggtaggtatagttagtttggaagagtagtttgttttaaatttttggtttttttttaattaggagtaaatattggtagaaagagttagggtatatttattttttatatttagaatttttatttattattgaattatttggtttgtatagtgttttttgataatgtggtttataaaaattattattaaagttgtttttttatttgatttgggtggggttaaatgaggaaatgagaagttttttgtatgttttaaaatataaattaatgttaggaaattttgaaaatggatgttgtttgttaaatatgaaattattaagggagtttttgtaaaatttatttggtagtatgaggaatggtgtttatagtgtgttttaaatggttatggttttgttttttatagattaaagtttaagttgtatatttttatattttaaataaaattatgttatagatattatttatgtgggtatggatatatattaaataaggatgtagtatataattgaggggtgttttggggagtgtggtaggaatgttttttgggaagaattttttggttgttggagtttttgtgttgtagaggaaattagtgatttattgtggttttgaggtaaaagatagatatttgagatgtagtttatattattttggtttaaaaggataagatgtttaataaatatagagaatttagtgtgaagaaaagataaggataaatttggattatgtgtatagattttaggttttgttttagaggagttttgtgggagtttaggattggttttttttttatggatggttagtttttttttgattgtttttaagtttggttgtgttaagtattttgtgttgatataaagtattggtatttgatattttaatagtaataaatttgttagtgttttatatattgttagtttttagagtttattatttgtgtttttagaatagatgttaaggttatgtttttagttggattgttgtagttttgttgttgtgatgaggtaggtgtggaggttttagtagtttttttggtgttggtgtggaggttttttttgtggattatttgaagtagggttatgttgtattgtagttgtatagtattgtaaggattaagtagtgatgttttaattgtaaatgaagaggaaggtgaaatgaaggtaaagagaattaattattttttaaaatttggttataaattgttatagaataagttttgtaaagtggattaaagtgatttattgttattttaggtttagatggtgtgatttgtgtggaaattatataatgtttttaatattattgtaatagagttattaatgggttattttttaaattatattgttgatattgttaaaatttaagaggttagtgtttttaagtgagtagttgtatttgttgagagtaagtggtgtgggttgtaatttgtagatgtgtatagaattgaaaatgttaaatatgtatataaaattgttgataaaagggtttttttttaaaattaagatttaattattaaaaataaatttttatatttaaatgtatatattaatataattggtttgtaataattattttaaatagtttttatatttttttagtttgtgagtaggatgttggttttttagttgtgtgagtttggttttggattttttttaattttttgtgtaaagagttgaattagttggtagtggattttgtagagataagtggttatgtgtaaattttatgtgttttttatttaaagttggtttgagttttatttttggataggggttgtagtaaattttatgtgttttttatttaaagttggttttgagtattgtttttggataggggttgaagtgggggtttattttttatggaatggttagatgttattgtgggttgtaggagtttagtttataatgatgggttttgggtgtggaataatttatttagatttttgggatgttgagtttgtaaaggggttgttaatggttaggtgggaaatttgggtattggtagatttgatttgaattttagtatttttatggaaagtagagtgtttgttttagtgtttgtttattttatttatttatttatttttatttttttagtagtattgagtgtgtaaggtttgtgaggagtttgtgtggggtgatttaatgtgtgtaagagatgtgtga

SEQ ID NO: 2277 - DNA, 2484 bp, Artificial Sequence
  chemically treated genomic DNA (Homo sapiens)
ttatatattttttatatgtattgagttgttttgtatagattttttgtaggttttgtgtgtttagtattgttgagaaaatggaggtgggtgggtgggtggagtgggtagatattggagtggatgttttgttttttatgggggtgttggagtttgagttaggtttattgatgtttagattttttatttggttattggtaatttttttataaatttggtattttgggagtttaagtgaattattttatgtttagggtttgttattgtgggttggatttttatagtttatggtgatgtttgattgttttatgggggatggatttttattttagtttttgtttaagagtggtgtttagggttagttttgagtgagggatatgtggggtttattgtagtttttgtttaggagtggggtttaggttagttttgagtgagggatatgtggggtttatatgtggttgtttgtttttgtagagtttattgttagttggtttgattttttgtatgaggaattgaagagaatttgaagttagatttatatagttgagaagttggtgttttgtttataaattgggaaagtgtgaaaattatttaagataattattatagattaattatgttgatatatatatttaaatgtagaaatttatttttgatagttaaattttgattttagaagaaaatttttttgttaataattttgtgtatatatttggtatttttagttttgtatgtatttgtgggttgtagtttatgttgtttatttttagtggatgtagttgtttatttgggggtattggttttttaggttttaatgatgttaatagtgtagtttagaaaatggtttgttagtggttttattgtaataatgttagggatattatatgatttttatgtaggttatattatttgggtttgaggtagtagtgggttattttgatttattttgtaggatttattttgtaatggtttgtggttaagttttgggaagtggttgattttttttgtttttattttatttttttttttgtttatggttaggatattgttgtttgatttttataatattgtgtaattgtaatgtaatgtggttttgttttaggtgatttgtgggaggggtttttatgttagtgttgggaaggttgttggggtttttatatttgttttattatggtggtgaggttatgataatttggttgggagtatgattttggtgtttgttttgggagtatggatgataagttttggaagttggtagtgtgtaaagtattggtaagtttgttattgttaaaatgttaaatattaatgttttatattgatgtgaagtgtttaatatagttgggtttgggggtagttaggaggaagttggttatttgtggaggaggggttggttttggatttttgtaggatttttttgaggtagggtttgaagtttgtatatgtggtttagatttgtttttgttttttttttatattgagttttttatatttattgaatattttgtttttttaagttagagtagtgtaaattgtgttttggatgtttgttttttgttttgaagttatgatggattgttggttttttttgtagtgtgagggttttggtgattagaggattttttttggaaggtatttttgttgtgttttttggggtattttttaattgtgtattatgtttttgtttagtgtgtatttgtgtttatgtagatgatgtttgtaatgtagttttgtttgaaatatgagaatatgtggtttaaattttgatttgtaaggagtggggttgtggttgtttggagtatgttgtagatattgttttttatgttgttgggtgggttttgtagaagtttttttagtgattttatgtttaataggtagtatttatttttagaattttttggtattgatttatattttgaagtatataggaaattttttgtttttttgtttagttttatttagattaggtgaaagggtagttttaatggtggtttttatggattatattattagagagtattgtgtaagttaaatggtttaataatgaatgaaaattttgggtgtaaagagtaaatatgttttggttttttttattaatgtttgtttttggttggaaagaaattaaagatttaagatgggttgtttttttagattggttgtgtttgtttgtgtttagtaatttgtgtagttggtagtgtgtttggtgttatgttaggaggttgtggttgttgtgggttttttggaattgtgttttttataaagtttttttaaaaggtttttttaagtttttattgtttttggtaaatgttttttggttgggtgtggtggtttatgtttgtaattttagtattttgggaggttgaggtgggtggattatttaaggttaggagtttgagattagtttgtttaatatggtgaaattttgtttttattaaaaatatataatttagttagttttgttggtgtatgtttgtaattttagttattagg

SEQ ID NO: 2278 - DNA, 2482 bp, Artificial Sequence
  chemically treated genomic DNA (Homo sapiens)
gtggggggtttgagagtaattgtttttataggggttgttatgtttagatttatggatttggtatgtgttttattagttaggtttaatgatgttagttattaagtatgttttatttgtgtggttggggggttaggggtatttgatattggagttgtttttggttaaggttgttttatttgtggtgttaggtaattttttttttttgggggttttgtgatgggggagaggttgtttgtttagtatttatttttgttttttattgtttatagtattttagtttgagaggttatagtttaagaaaagagttttttattttatgttgtttgatatttttatataagtaaaataaaatgtatatttttatatattgtgatttgggtgggaggtggtgttttggaataaatgttgttgttgaattttgtaaatatgatggggtggagatgggggtggtgggtggtaggtgtttattagggaggatttggtttggtttgttttatgggttggttgtttggttggtttggtggtgtggagagagattttgtatgtatatatatttggttgttgagtatgtttttgtgtttgttgggggttagtagggtttaagtattgtttatagtattagtgttaggtttaggggggtgaggttgtaggtgaggttgggtagggtatttgagttttttgagttattagttttgttatttttgttgtttgtttggtttagatggtagtggttgtgggtgtggtttttgtgtgaatagtttggtttttggtgagggtttgaggtggggaattttggtggtttggagtttttgggttgtattgtagtgagtgggggtttagtagagttaggtagagttttaaagggtgagttattgatgtgttgtgggttagagttgttgtttggtgggttgttattgggtggtatgtgtttttttagtgtattgtttgttgaagttggttttttaggttttagtattgaggttttgttagtggtatttggttggtagtatttgggaagttttagtggttttttattggtggttttgttggtttagatgggatggtaagggttggtggttatagtgtagttttgtaggttattggtagttaggtgtttgaggttatggttagttaggtgttgtgggaggttgtagggtattttggaggaggagttgtggaatttttgtagttaggtttagagtgggtgtgtttggtagttatatatttaggggttgttgttgagttttaggtattgtagggtatgtaggggggttagggttttagtgggtagtgttgatagattgttggtaaatagatagagtgttatgaggtggttaaggttatggaaggtatgtgggtgtatatgggttatgtggttttggtgtagtaggagatggttgaggttgtgtagtttatggaaggtgtgtttgggtatgttggagatgtggttgttgtgtaggaagaggtgtgtgaggttgtttaggttgtggaaggtgttattaggtagtgtttgtagtgtgttgttttgtaggtagaggtattgtagggtagttaggttgtggaatagttttgggtttagtttttgtaggttgtagtggtttaggtgtagtgtgtgtaggtggtttaggttgtggaatgtggtagggtttatagattggagttgtgtattattgttgaggtttagttgttttaggagggttaggttagtgaaggtagttgtattaatttgggttagtatatttgagtgtagttataggatggtgaggttgtggtaggtatggaagttggtagttggtatatgtgagatgtggttgttgtgtaggaagatgtgttggttggtagtagggatgtttatgggtatagtttgtaggttttgttgggggtagtttgttgttattttgggtttattgtagtatatgtaggtatttgggtatggggttgttatttgttaggtttgtagttatagtatttatgttagtagttggttttttgtgggtagaagatagagtggttagtaggaagggtaggggtattggagaagttggaggttttgttagagttaggtgggttttggagattgggttttaggaggatttggggttgggtttaagatgtggttattatttttgggaattgtagtgttgggatttttgttttataggttttatggatgatgttgggttagaatatgttttggagttatgtattttattttggaagttatatttgtagattttttatattatatttaggagtagtttattgggttattaggggtatttatttgaaggttttttggaatggatattggtgattgtaggtatttttttaggattttagtgaatatagagtttgtattgtaggagtttttggggggttttagtgggggttttatttatagggtttaggaaatattgtaatggggttggggtttttttgggtatgtttattttaaaaatgggtgtttggatgtttgagggtg

SEQ ID NO: 2279 - DNA, 2482 bp, Artificial Sequence
  chemically treated genomic DNA (Homo sapiens)
tgtttttgggtatttaggtgtttgtttttgagatagatgtgtttagagggattttagttttattgtagtgttttttaggttttgtgggtggaatttttattgggattttttggggatttttgtaatgtgggttttgtgtttattggagttttgaggaggtatttgtagttattagtgtttattttaggaggtttttaagtgagtgtttttggtgatttagtgggttgtttttgggtgtggtatggggagtttgtagatgtggtttttagggtggagtgtatggttttaaggtatgttttagtttagtattgtttatgaggtttgtgaagtagggattttaatattgtgatttttgggggtggtggttatattttggatttagttttaggtttttttgagatttaatttttggggtttatttggttttagtaaaatttttagtttttttagtatttttgttttttttgttaattattttgttttttgtttatagggagttggttgttggtatgggtgttgtggttgtaggtttggtaggtggtagttttatgtttaggtgtttgtgtatgttataatgagtttaaggtgatgataagttgtttttagtagggtttgtaggttgtgtttgtgggtatttttgttgttagttagtgtatttttttgtatggtaattgtattttgtatgtgttagttgttagtttttgtgtttgttgtaattttattattttgtggttgtatttgaatgtgttggtttgaattgatgtggttgtttttattggtttggtttttttggagtagttggattttagtgataatgtatagttttggtttgtggattttgttatattttatggtttgggttgtttatatatgttgtatttggattgttgtggtttgtaggagttgggtttggggttgttttgtggtttggttgttttgtagtatttttatttgtaggataatgtgttgtaggtattgtttgatgatattttttgtgatttgggtaattttatatatttttttttgtatggtaattgtatttttagtgtgtttgagtgtgttttttgtgggttgtatagttttgattgttttttattgtattagaattgtgtggtttatgtgtatttgtatgttttttgtgattttggttgttttatgatattttatttgtttgttaataatttattagtgttgtttattgaggttttggtttttttgtgtgttttgtagtatttgaggtttaatgataatttttgggtgtgtgattgttgggtatgtttattttgggtttggttgtagaagttttgtggttttttttttgaggtgttttgtagttttttgtaatgtttggttggttgtgattttaaatgtttagttgttaatgatttgtagggttgtgttgtggttattggtttttattattttatttggattggtagggttattgatgaggagttgttggggttttttaagtgttgttagttagatgttgttgataaggttttagtattggagtttggaagattagttttggtaggtaatgtgttgaagggatgtgtgttgtttggtgatagtttgttgggtaatggttttggtttatggtatattaatgatttattttttgggattttgtttggttttgttgagtttttgtttattgtagtgtggtttgagggttttgagttattagggttttttattttgggtttttgttggaggttaggttgtttatgtaagaattgtatttgtagttattgttgtttgggttaggtaggtagtgggggtggtgggattggtgatttagaaggtttaggtgttttatttagttttatttgtagttttatttttttgggtttggtgttggtgttgtggatagtgtttgggttttgttgatttttagtggatataagagtgtgtttagtagttaggtgtgtgtatatatggggtttttttttatgttgttaagttagttgggtggttgatttgtggggtaggttaggttaggttttttttgatggatgtttgttgtttgttatttttatttttattttattatgtttatagggtttggtggtagtgtttgttttagaatgttgttttttatttagattgtggtatatagagatatgtattttattttatttgtgtaaaaatattggatgatgtggaataaagagttttttttttaagttgtggttttttaggttagggtgttgtgggtggtgagaagtaggggtgggtgttggatgggtagttttttttttattataaggtttttagaggaagggagttgtttggtattataggtgggatagttttggttaagggtagttttaatgttaggtgtttttggttttttagttgtatagatggagtatgtttggtggttgatgttgttgagtttggttgatggagtatatgttaggtttatgggtttggatatagtagtttttgtggggatagttgtttttgggttttttat

SEQ ID NO: 2280 - DNA, 2395 bp, Artificial Sequence
  chemically treated genomic DNA (Homo sapiens)
tataggttgatatattttatttgtttttttattttagggttttgtgatttattggtaagggtggagttttgtttatttggttaaaatgaagatgttaaggagggaggtagttgtggttaggtggtattaggtggtgttagtttattagtagagaagtttgaagagttggtttggaagaatgattattaagttgaaggttttatatggtgtttgggggtattgtttttttgttttgtttgttgttttttttgtttttattttatttttatttgttagtatgtttttgttttgttttattgggatttaggtttttggattttatttgtttatattttttgttttgttttgtagttatttttttttttttatgtaagggggtttttatagttttgggtttttagtgattattttagaatgatttttttttaatggttttatagtttttttgtatgggtaggatgtttaattgtagagagatgggtaagaaagtattattattaagaatggaagtaattgggtatgggttgtagtttatttggtgaagtggttattatttagagtaaggagtttgtttgtgagatggtgttttggagttgtgagttggaattttgttggtttatatttgagtagtttgtggggaatgaggatattggtttagtttttgttatttttgagtttttttttttattgttttttgtgagttaagattataagttatttatttttttttatatttttatagttttatataggtttggtgtgtagtaaggaatgaaatgggagttttttgatattttgttttttttgatagttttttgtttgtatttttttttttattagttattttttaagttgttgtttagaattaggtgttggggtttgatatgtatattatttagaatgattgagtatttattatgtgtgagttttataggaaagtgttggaatgggtttgaatgtaaggatgttggttttaggttgttatagatttgtggggtggggaggatagataagtgaagggtagttatagtttagggtattaggggttattgtaggttaggttggggtgtatttagggttgggtatgggaggggtgttgtgtttgttatatgttgttttttttttagttttttggggttttttgtttagtttttttgaggttttttagtagttttggatttgtttaggagggaggaagtattgtttatttatgtagttgtttttagaggagtagtttgaggaagagtttaggaagtttttggtggttttgtgttttataagtttgttggttttgttgttttttgagttatttgtgtttttttttttttgtatttgtaggtttttatttgtgtagggaagaattaggggtttttttgggtttttaagagtttttgaaaagtggggtttgggtagagaggtgttttgaggagggaattttggggattgtaggggatattgtgaggagtattttgtgggaggttgaggaagtaaagttttgggatggagggttttatatttattttagttggtgttattatgtagtttttttagggagtttttgggtgggaattaggatttgtggattagtgatttattgtagtaggaggtgtgtgtattagaggatgggtttagttgtggtgttggggataggtgttttatgttgttggattttttttttaaggttttgtgggataattatgagggtagaggtagggagtagggaggtgagtttagttaggagtatgaaggaaagttatagtttgtggttttgtttagtgtagggtgtgggtttttttgttgttaggtaatttgtagttgttatttttttgatttttttaatgttggtatgtttttttttgttttttttgaattttattagtagatgggtaagatgggtagtggtagttagggatggagttatatttaaattttataatttattgaaattagatagatttgatttggttttagagttagttaaagttttagggtttgttttttgggttttatgtttgtgagttgggtaggatgattaggtagttgttgttatagtttattttttagtggtttgaggattgtgtttgtttttagttatgttgttggttagttgttgaggttggataggtggtgagatatgtaggtgtggggttaggaaggatggtaaggttgatatgtttgtttagagtagggggggtttttgtgagtttagtttgtagttttggggtttttggtttggtttatggttgaagttgtttttttttattttttgtttttttttttttttttttttttttttgagattgagatggagttttatttttgttaatttaggttggagtgtaatgttatgattttgtttattgtaatttttgtttgttaggtttaagtgattttt

SEQ ID NO: 2281 - DNA, 2395 bp, Artificial Sequence
  chemically treated genomic DNA (Homo sapiens)
gagaattgtttgaatttggtaggtagaggttgtagtgagtgagattatggtattgtattttagtttgggttgataagagtgaaattttattttaattttaaaaagaaaaaaaggaaagaaagaaaataggaagtggagagaggtagttttaattataagttaggttggaaattttaaaattgtaggttgggtttataggaattttttttgttttggatgggtgtgttagttttattattttttttggttttatgtttgtatgttttattatttgtttggttttagtagttggttagtgatatggttgagaataggtgtagtttttaggttattgggaaatgggttgtggtagtagttgtttggttgttttgtttggtttataggtatggggtttagaagataggttttgaggttttggttagttttgaggttaggttaggtttgtttggttttagtgggttgtaaagtttgaatgtggttttatttttagttgttgttgtttgttttgtttatttgttggtgagatttagagagaataggagaggatgtgttagtattgggagagttaggggaatggtagttgtgagttgtttagtaataagggaatttatattttgtattaggtagggttgtaggttgtggtttttttttatgtttttggttgggtttatttttttgttttttatttttgtttttatggttgttttataggattttgaagaggaaatttagtaatatgaagtgtttgtttttagtgttatagttgggtttgttttttgatgtatatattttttattatagtgagttgttggtttatgagttttggtttttatttaggagttttttggaggaattgtatggtgatgttaattggggtgagtgtggagttttttgttttggggttttgtttttttggttttttgtgagatattttttatagtgttttttgtagtttttgggattttttttttagagtatttttttgtttagattttattttttagaagtttttggaggtttagaagagtttttggtttttttttgtataggtgaggatttgtgggtgtggaggaggagaggtatgggtggtttagagagtagtagggttagtgggtttgtggggtgtaaggttattgaggattttttgggtttttttttgggttatttttttgaggatgattatgtgggtaggtgatgtttttttttttttgagtagatttgaggttgttgggaggttttaggaaggttgggtagggagttttggggagttggagagagggtagtatgtggtaggtatagtgttttttttatgtttggttttgggtgtgttttagtttggtttgtggtggtttttggtgttttgggttgtgattgttttttatttgtttgttttttttattttatgagtttatggtaatttaaggttaatatttttgtatttaggtttattttagtatttttttgtggggtttatatatggtgggtgtttagttattttgagtggtgtgtatgttagattttagtatttagttttgaatagtagtttgaggggtggttggtgaggagagggatgtaaataggaagttgttagaagaaatagaatgttaaagagtttttattttattttttattgtatattgggtttgtgtggggttgtggggatgtgaaggagggtgggtgatttgtggttttggtttatagaagatagtgaaggaagaggtttgaaagtgatagagattgagttagtgtttttgttttttgtaggttatttggatgtggattagtagagttttagtttgtggttttgaagtgttgttttatgggtgggttttttattttggatggtggttattttgttaggtgggttgtaatttgtgtttagttatttttatttttggtgatagtgtttttttatttatttttttgtagttgggtattttgtttatgtagagagattgtaggattattggggaaaggttattttagaataattattgggagtttagagttgtggggatttttttgtgtggaagggaaggagtagttgtagagtaggatagagggtgtgggtaggtgggatttaaggatttgggttttggtagggtaggatagaggtatattggtaggtgggggtggggtaggggtagggaggatggtagatgggataaaggagtggtgtttttaaatattatatggagtttttggtttgatggttatttttttaggttggttttttagatttttttattggtgggttggtattatttggtattgtttgattatagttgtttttttttttgatgtttttgttttaattaggtgagtgagattttatttttgttaataaattgtaaggttttggggtgaagggatgggtaaagtgtgttaatttgta

SEQ ID NO: 2282 - DNA, 2390 bp, Artificial Sequence
  chemically treated genomic DNA (Homo sapiens)
ttagtgggggttaagtggagttagtttggtgttgttttaagggggtttggttgggattgtttttaggagggtgatgggttttaataagaatgaatagttaggaattggggttgtaggaggagtgaggggggattatttgtgagaagtagtttgtaggtgagatagtgttattgatggggtggggaggggtattttagaggtgtttatggggtattagttggatttatttagtaggtgtggagtgggttatgatagattttagtaaatatgttgtatttttggttttggttttttttttttgaagattgtgagaggaggtgttattttaaattaagtttagaattttgataattatttagggttgggtattttaatatttgaaattgtgaatatttttgtgattaaaggagtttaaaagaatttttgttatttgagagagaaaagagaagtttaggaatttgttttagattttatttaagtggtggaaaaaatgggtttttttagggtgtatagggataggttggagggtaaaggaaatggtgtttttttttttaatagttatttttattttgttgggtgtatgtgtgtatttaaaaatttttttagaaaaaagttggtagaaaaaggaatgtattatttttaagatagtagtttaagttatgaatgtattaagaatttgttttgagatgatttttggtagttggtaaaagtgtaattttgagaagaggttgtgaaatatttttaatgaaatagaaggatttttaaattgaagaatgttgtagaaggtattaagtgtggtgtttttgttttatagatgagtagtttggggtttagtgggtgaagtggtttagttggttggtgtagagtttagtttagtatttagattttttgatttgggaagagttatttttttttgaggttagttgggatgtgtgaaggaaattaggttttgtggagaaagttatttggattttttagtaagggaaagtttaagtaaagaaaatagttggttaagaggaaagatagtggtggtaatgttgagagagtgttgaggaaagagtggagagtttgtagttaagatgaatatttatagtaagtttttaatagttaaggatttgaaagttattattgtttagttggatatgagagtaagaatttagtatattttgttgggttttgttagttgtgtagagtataaggttttaggtaagttagtgttggggtaaaatattgtttttgttgaaagtagagttaagaatggaatggaaaaagattgaggtttgtatagtgtatgtatggggattttaaaatggatttgaaaatattttataatgtaattttgggagattgtaatataaaaaggaaggaatttaatgtaggtgagttttaatagatattatggtgtgtttttgaaatagatgaaaattgaattgttttttaaatattttgagagggttattaatgataggaatttttttgtttgattattaattattattttgtttatatagttaggatagttgtggagtaggttggtttagagggatttttagggtaggtttaggttagtgtttagtttggttttgaattgtgttttgtagagttttatagtaggttttgtaggaggttagggtattttttttagaaaatttaagttttttagttggataggtttgatttttagttttgtttttagtttttgtttaattatgtaattagggtaagttatataatttttttgagtttgttatttatataatataggagtgttattttgtagggttgttatgaagtttaaataaataatgtgtgtaaaatatttagtatatagtaggtttttattaaatgttatttttttattttttgtttgtttgggagggtagtgattagtgtggattgtttttgtatttgtttgtagggattttttttgggtaggtaggatggttattgtggtgtttaggtagaagagaggaggagatgagtttggtgttagtttttggttgtgttttaagttgtgtttgtttatattttttttttaattatagtttttttaattgagttgttagtggtgtttttgtgagttttaatttaggggggattagttaatttgtatagataatagtaagtgtttattgtagtttttttaagagtagtttatatttatttatttattttaatattttaatagagtttaatttgtagtttattggtttttggtgatttttgttttggaggttggggtgggttttaatttttgagttttattaagtgttttagggaatatggaatattggggtgtagggataattttataaatgaatggaggaagggagaatattgaaattttgtttgttagggtattattgtttattgttttgtataaaggtgtg

SEQ ID NO: 2283 - DNA, 2390 bp, Artificial Sequence
  chemically treated genomic DNA (Homo sapiens)
tatatttttgtgtaaagtagtaggtggtagtgttttagtaaataggattttagtattttttttttttttatttatttgtgaaattgtttttgtattttaatattttatattttttagaatgtttgatagaatttagaaattaaaatttattttaatttttaaaataggagttattaaaggttagtgggttatgggttaaattttgttgaggtgttgaagtgggtgggtgggtgtgaattatttttgaagaggttgtagtaagtatttgttattatttgtgtaagttaattagttttttttgagttgaggtttatagaagtattgttggtagtttggttaagaaagttgtaattaaaaaggaaatataagtaaatgtagtttgagatgtagttaagggttggtgttaagtttattttttttttttttttgtttaaatattgtagtgattattttgtttatttaaaggaggtttttataaataagtgtaagaataatttgtgttgattattgtttttttaggtaagtgaggagtggggaagtaatgtttgatgagggtttattgtgtgttaggtgttttgtatatattatttgtttaggttttataatagttttataaggtaatatttttgtgttgtatagatgatagatttagaaaggttgtgtagtttgttttggttgtatagttaaatgagggttagaaataggattaggagttaggtttgtttagttggaaaatttgggttttttagaaggggtattttggttttttgtggagtttgttgtgggattttgtagaatataatttaaggttagattgaatattagtttgaatttgttttgagaatttttttaagttgatttattttatagttgttttgattgtgtaagtgagatgatgattagtgattagatgaaaggatttttgttattggtaatttttttaaagtatttggaaaatagtttaatttttatttattttagaagtatgttgtggtgtttattgaggtttatttgtattgaatttttttttttttatgttgtgattttttaagattgtattgtggagtgtttttgaatttattttgaaatttttgtgtgtgtgttatgtaggttttagtttttttttattttatttttaattttatttttgatggaagtagtgttttattttgatattggtttgtttaggattttgtgttttgtataattagtagggtttggtaggatgtattgaatttttgtttttgtgtttagttggatggtgatggtttttaagtttttggttgttgggagtttattataaatgtttgttttggttataaattttttattttttttttggtatttttttagtattgttattattgtttttttttttggttaattgttttttttatttaggtttttttttgttagaaagtttaggtaattttttttatgggatttggttttttttgtatattttagttggttttgaggaaaggtagttttttttaaattagagaatttggatgttgggttgggttttgtattaattagttgggttgttttatttgttgggttttaaattatttatttgtgaagtgaaggtattgtgtttgatgttttttgtaatgttttttagtttggaaatttttttgttttgttggggatattttatggtttttttttaaggttgtatttttgttagttgttagggattgttttaaaataggtttttagtgtatttatagtttgagttgttgttttgaaagtagtatatttttttttttgttaatttttttttgagaaagtttttgaatgtatatgtgtatttaatagagtgagagtggttgttaagagagagggtgttattttttttgttttttagtttgtttttgtgtattttggaggggtttgttttttttattgtttagataaaatttagggtaagtttttgaatttttttttttttttttaggtaataaaaatttttttgggtttttttagttataaagatatttatgattttaggtattaaagtgtttagttttgggtgattgttaaaattttgaatttgatttaaagtggtatttttttttatagtttttgggagggagagattggagttaggagtgtagtgtgtttgttggggtttgttgtggtttattttatatttgttgggtggatttggttggtgttttatgggtgtttttgagatgtttttttttattttattagtggtgttgttttatttgtaggttgttttttataggtggtttttttttattttttttgtagttttagtttttggttgtttatttttattgggatttgttatttttttggaggtggttttagttgagtttttttaagatagtattaggttggttttatttggtttttgttgg

SEQ ID NO: 2284 - DNA, 2444 bp, Artificial Sequence
  chemically treated genomic DNA (Homo sapiens)
tgaggttatgaatataaatttagttttatatgttttggaattgtatttgaagatgtggttttaaggtagttttatatttagtgttttgggtggggtgggggggtagttttatatttagtgtttggggttgggggggtagttttatatttagtgttttggggtggggggggtagttttatgtttagtgttttgggaggggtagttttgtgtttagtgttttgggagaggttgttttagttagtgtttttaaagttgttgttagttgggagaggatggtaggtttttttttgggttttgggaggttgaattagttaaatgggagaatggggagatgggggagaagggggagatgggggagatgggggagaagggggagatgggggagatgggggagatgggagtaatgggagtaataggagtaatgggagggttttattattttgattttatttttaattggtttgttttggatatattgtttaatttttagtagttattttattagtttattttattagggggttttagggagatattttttaatagatatagaagtgtaggaggagaatgagggtttttgttttaattttaggtttaaggttattttgtttaggtattgggttatggtattttaagggtgtttttgttgatatattagttttgaagggttagttattttttagaaataatgtttttgaggtggggagggttttaagttagtattgtatttgttagatatggaatagagtaggaattgaagtagggaatgtaggtttaagttatgttagagataggttttttgttttagattgtggttttggttaggaaaggaggtgtgagtgtgtggttggagaattttatattaaatattttggttttttgagtggaaattatattggtttaggaaaaggaagggggtgagaaggttggttggttggatggttgttttaagtaatgtgaaaagtaaatttatgaaattattttttgaaaataaagtgtgagggttgtgttattttggttgtagtagggttgtatttgtttttttaattaatgtattattttttttagaaatagaataaagataaaagtggatgtataataaattattttagtttgttagtgttttgagagatgaaaaattttgtttagagataggattgtgggtttataaaaaaattataaagtttaggtattttgttaagtttttagaatgttgttgggttgttttttttttttttatgtttagttgtgtgtggttgttgggatagtgtttattttggtaggtgatgagttagtgtgggaatttaggggttgttttagttttgttggggtgttgagttgtagggagtggtttgtattgattttttttttttttatttatgttatttaaaagtatattagaggggttttgagatgaaatttgtatattttttagagtttttttagattaatgtgtggatgagaatgtgtttattgtggggatgtgtttggttgtggatgtgaagaaatttttttgtaggagtagtgattttgttatatgggttttgtatatggagtttttgttagtttggggttttggttttgggaagtatttgggaggtggtggggaaggttggttttggttggtttgatatatgttttggggtttgttttttatgggttaggtttggtgttttatttattattgttgggaagttatggaggttttttaagggtgatttgtgaggtgggggtgtttgtttttttttttgaggtaagaggggtttggttttattgtttgttgtaaaaaaggaggagtagtttaggtttgtatgtggttttgagtagtttgttggaaggttttagtttggtttttttattttgtttttttttttagggttggtttagttttatagatattgtttttatttatgagttggaggtggtttttttggtttatgtgttatattttttttggtttttgtaggtgttttattttatttagattttgttttttaatgggtggtatttttaattatttatttttttttttggagatgttaaatttttttgattttttttttttgtttgttttataattggttggttttgttttttttttttttttgtgtttagtgttttggttttagttttgggtttttattttattttttaggtttgtgtattattagattgttttgattttttgtttgttgtttatttgttgttaggtttttttttttttttttttttttttgagatagggttttattttattgtttaggttagagtgtagtggtattattttagtttattgtaatttttgttttttgggtttaagtgatttttatgttttagttttttaagtagttgggattataggtgtgtattattatgtttagttaatttttgtatttttagtaaagatagggttttattatgttggttaggttggttttgaattt

SEQ ID NO: 2285 - DNA, 2444 bp, Artificial Sequence
  chemically treated genomic DNA (Homo sapiens)
gagtttgaggttaatttggttaatatggtgaaattttgtttttattaaaaatataaagattagttgggtatagtggtatgtatttgtaattttagttatttgggaggttgaaatatgagaattgtttgaatttgggaggtagaggttgtagtgagttgagatggtgttattgtattttggtttggataatagagtgagattttgttttaaaaaaaaaaaaaaaaaaaaaagagtttggtagtaggtggatgatgggtagaagattagagtagtttgataatgtgtaggtttgggaggtggggtggagatttagaattgaagttagggtattgggtatggggagaaaggagggataggattaattggttatggagtaggtaggaaggaggagttaggggagtttgatgtttttagaagggagaatgagtagttgaaggtattatttattgagaggtagggtttgggtgagatgggatatttgtagaggttaaggaaggtgtggtgtatgagttagggaggttgtttttaatttgtgggtggagatggtgtttgtggggttggattggttttgggaagggaaatggaataaaaagattaggttggaattttttggtgagttgtttagggttatgtgtagatttgagttgtttttttttttttatggtaagtggtgggattagattttttttattttaagagggaaggtaggtatttttattttgtaggttatttttgagaagtttttatggttttttagtagtggtaggtggagtattaggtttggtttatgaaggatgagttttgaggtgtgtgttagattagttagggttaattttttttgttgttttttaggtgttttttgaggttgaggttttgggttggtgggggttttgtgtgtggggtttatatggtagggttgttgtttttgtggaggggtttttttatatttgtagttgggtgtatttttgtaatgggtatgtttttatttgtgtattggtttgggaaggttttgagaagtgtgtggattttattttaaaatttttttagtgtgtttttgagtggtgtgaatgggggagaggggagttggtgtaggttattttttgtaatttaatattttagtgaaattgaggtggtttttgggtttttatattgatttgttgtttgttggagtgagtgttgttttggtagttatgtatggttgagtatggagaaggaaagggtgatttggtagtgttttaggggtttggtagagtgtttgggttttatggtttttttgtaaatttataattttatttttgggtgaggttttttattttttagagtgttggtaggttgaaatgatttattatgtatttgtttttgtttttgttttatttttggaaaaggtggtatattggttagggaagtaggtatgattttgttgtagttaggatggtatagtttttgtattttgtttttaaaaggtggttttgtgggtttattttttgtattatttgaagtagttatttagttaattaatttttttattttttttttttttttgagttagtgtgatttttatttaggaaattagggtgtttggtgtagagttttttagttatatgtttgtgtttttttttttgattgaggttatagtttgaggtaaagggtttgtttttggtataatttgagtttgtgttttttgttttggtttttgttttgttttgtatttgatagatgtgatgttgatttggggttttttttattttgggggtgttgtttttggagggtggttggttttttgaggttgatgtgttagtaggggtatttttagggtgttgtgatttagtgtttgagtaaagtggttttaagtttggggttgaggtgggggtttttgttttttttttatgtttttgtgtttgttaaagggtatttttttgggattttttggtagggtggattgatgggatggttgttgaggattagatagtgtgtttagagtaggttggttgggggtggggttagggtggtgggatttttttattgtttttattgtttttattgtttttattttttttattttttttatttttttttttttttttattttttttatttttttttttttttttatttttttatttttttatttggttggtttagttttttgggatttagaggggagtttgttatttttttttagttggtggtagttttgggagtattggttggggtagttttttttagagtattgggtatgaagttgttttttttagagtgttgggtgtgaagttgttttttttattttagagtattgggtgtgaagttgtttttttaattttgagtattgggtgtgaagttgtttttttgttttgtttagagtattgggtgtgaagttgttttggggttatatttttaagtgtagttttggggtatgtgggattgggtttgtgtttatggtttta

SEQ ID NO: 2286 - DNA, 2346 bp, Artificial Sequence
  chemically treated genomic DNA (Homo sapiens)
tttttttttttatagtaggatttgagttatatgtgagttgggaagaggattgttttgttagtggtatggaagtgagaggggttaattttttagattattagttttattattataggttttattggttttagtatttagttttattatttaatttgttagttttaaaattaatttttttagtattttttgagtatttatttgttttaatgttaagttaaggatagatttggtttttggttttttaggattttgtttttattgggaaggttggatagtggggagttggtagtttttagtaggtggggtttggaattttttttgtaattttaaaggaggtttaagagaggttgtttttgggaaatttgaaatttagttatatggggttaagttattaggttgtttttttttattgtggttttttgatttatttgttagagtttggatttttttttagggttaaagttttttttttagtttttttttttattgttttttagggggttttattttgagttagaaaaggtgtttgagatagaggttattttttttttatttgtttttgagtatggttttttttgagaggttttgggtttgtgtgatatttttatggatatattgggaaagttagttgtttttttgtttttatttaggaggttggggttatagtagttggggttttagttttttggttttttggttttttttttatttgtttttttggtaggatttagtatgttttgggatagagtttatttgatatgggatagtaggaggttgtttttgttaaaattgggtgaaagtggtgtttttggtatggtttttttagttagaggggttatggtggtttttgtttttggtggagtttttggagtttgaaagagatggaagtttgggggtaaggatggagtttagagagaggtaggtaaatatattatttagaaaaggtaaagtttattttagtgttgatagagagagggtgagttttgtatagtaattttaaaaatatgttattttttttatttaagaggtaagaattggttgtaagttatggggttattaaattggttgtagttatagtaagtagaagaggttatggtttaggtttttttagattttttttgggatatatggttttttgggggggtttggtgaaattatttggattaggagttattgtatatggttatattaggtttgttgtagaggtaggtagttaaggttatgtggtaggtggtgatttttttgtggtatgtggtaatgagaggttgtgagagatttatttttttggtttggaatagagtatggagtttttttgggttttttttgaagttatttttagttaggaagtttatgaaaggtatgttgatggtattatggatatggtttgagtttagttttgggtagggtagaggatatagtttaggggatgtatgaggggtggggattaatggggtttggaggattttattagttatagttggaaggatagatagttttgtaaataaaaataatatttttgttttgtttggagtttaatttatttttagttttatttattattattttttatgatttaagatgtttgtaattttttttttaatatttgttttgaagtagagatgtttaaaattatatttgtttgagaagatagtggtatgagttttagttttattaatttttattttgggtaaattattttatttttttgaattttagtttttttatttgtaaaatgggtttagtggtatatatttattttatagttatgttgagaagagtaaatgggataatttattgtaaatgttatgtgttgagaatatagtggtgaaaggtagagatatagttaggttttttgggagattttagtttaataagaaaggtagatgttaaatagataattatataattaattagatatgtttttattttatagatgaatttgttgagttttggtaaaataatatggtttatttaaggttatatagaaagatgaaggtagatttaggattatattggggtttttggttttttgttaagtatatagttgtagaaagagtaagtgatttggtgttagatgtgaggttaaattttattggagtaagttatgttagttttttgagttttagtttttttataggaaaaatggaaatgagagtatttattgtgtattggttgttgtatgaagtgggtggtataaggaaagtgttggttttggaggttggtttatttattttgttatgttgtgtttttagttattttattatttatggagggggtagggggagaatagggatagtgtgggtttttttggttttttttaagaatttggatggaagtagagtggag

SEQ ID NO: 2287 - DNA, 2346 bp, Artificial Sequence
  chemically treated genomic DNA (Homo sapiens)
ttttattttgtttttatttaagtttttggaggggattaaaaaggtttatattgtttttattttttttttattttttttatgggtggtgaagtggttgggggtgtagtatggtagggtgggtgggttagtttttaaagttagtgttttttttgtgttatttgttttgtgtagtagttaatatatagtggatatttttatttttattttttttatggagaaattgaggtttagagagttgatataatttgttttagtgggatttgattttatatttgatattaggttatttgttttttttgtaattgtgtgtttaatagaaaattagaggttttgatgtaattttgggtttgtttttatttttttgtgtggttttaggtgagttgtgttgttttgttaagatttagtggatttatttgtaaaatggggatatatttgattagttatgtggttatttgtttagtatttgttttttttgttagattggaattttttagagggtttggttgtgtttttgttttttattgttgtgtttttagtatatagtatttgtaataagttgttttatttgttttttttaatatggttgtgagataggtatgtattattgagtttattttatagatgagaaaattgaggtttagagaagtgaaatgatttgtttaaggtaaaggttagtggagttgagatttatgttgttgtttttttaagtaggtgtgattttgggtatttttattttaagataggtgttaggagaggagttgtaggtattttaagttatgagaaatgataataggtggggttgggaataaattgagttttaagtagagtaaagatgttatttttatttgtaaagttatttatttttttagttatagttgatggaattttttaggttttattagtttttattttttatatattttttaagttgtgttttttgttttgtttaggattggatttgggttatatttgtggtgttgttaatatgttttttatggattttttgattgaggatggttttgagaagggtttagaagagttttgtgttttgttttagattaagaaggtggattttttgtagttttttattgttatgtgttgtaagggagttattgtttgttatgtggttttggttgtttatttttgtggtaagtttgatgtggttgtgtatgatggtttttggtttgagtggttttgttgggtttttttagagagttgtgtgttttagggaaagtttgagaaggtttgagttgtgattttttttgtttattgtaattgtggttggtttagtgattttatgatttatagttggtttttattttttaggtgaaggagatgatatgtttttagaattgttgtgtaaggtttattttttttttgttaatattggaataaattttgttttttttgagtagtgtgtttgtttgtttttttttgggttttatttttgtttttaaatttttattttttttaaattttggagattttattaaggatagagattattatagtttttttggttggggaagttatattgaggatattatttttatttagttttggtagaaatagttttttgttgttttatgttaggtggattttgttttagagtatgttgggttttattaggaagataggtgggaagggaattagaaagttagagagttgaagttttagttgttgtagttttagttttttgggtaggggtggagggatagttggtttttttaatatgtttatagaggtgttatatagatttagggttttttagaagaggttatgtttaggagtaggtgaaaggaaggtggtttttgttttgagtattttttttggtttagagtaagattttttggggagtagtggagggaggggttggagaaagagttttggttttgggagaaggtttaggttttggtaggtgaattaggaagttatagtagaagaaagtaatttgatagtttggttttatgtggttggattttaagttttttagaaatagttttttttagattttttttggggttgtaagaagaattttgggttttatttattggggattattggttttttattatttagtttttttagtgaagataggattttggagggttggagattaagtttgtttttggtttggtattggggtaaataggtgtttaggagatgttgaggaggttggttttggggttggtaggttgggtgatggggttgaatgttgaggttggtgggatttgtagtggtgggattggtagtttggagggttgattttttttatttttatgttattaataaaatagttttttttttagtttatatgtggtttagattttattgtgggaagaagaa

SEQ ID NO: 2288 - DNA, 2400 bp, Artificial Sequence
  chemically treated genomic DNA (Homo sapiens)
ttattttaaatttatgttttagttgttttttatttaaaatggaaataataatatttattaaataataatatgtataaaatatttagtagatagaagatatttaataaatagtaggtttgtttttattattttttgtaagagttttttgttaattatttggtttatttgtatgtgtaggttaaattttttatgataaattggattgtgttttgtttttattgttattgttttatatagttttattttgtttgatattatttggggtttagaaattttttttggttgggtgtgatggtttatgtttgtaatgttaatgttttgggaggttgaggtgggtggattatttgaggttaggagtttgagattagtttggttaatatggtgaaattttgtttttattaaaaatataaaaaaaaaattagttgggtgtggtggtgtgtgtttgtaattttagttatttaggaggttgaggtagtagaattgtttgaatttaggaggtggaggttgtagtgagttgagattgtgttattgtattttagtttgggtaataagagtaaaattttattttaaaaagaaaaaaaaaaaaaaaggttaggtatggtggtttatgtttgtaattttagtatttttggaggttgaggtaggtggattataaggttaggagtttgagattagtttgattaatatggtgaaattttgtttttattaaaaatataaaaattagttaggtttggtggtgtatatttgtaattttagttatttaggaggttgaggtaggagaattgtttgaatttgggaagtggaggttgtagtgagttgagattgtgttattgtattttagtttgggtaatagagtgagattatattttaaaaaaaaaaaaaagaaatttttttgtgtgtaggattttgatgttgtaaagagataaagattgatgttgttaatttttggtttgagtgggtagtgtgtatagttgtagtgttttaatagtttgtttttttttttttgtttttttagttgtttttgggatattttagtatgtggatgagtagtttttgttatgtttttttttatttgtggttttggtgattatgttttggtttttgattgtttaatgttgggtttttgtttatatttgtggtagggttttggattggtgatgtgttattttaatttttggtgtttggttttttggttaattttgatttttggaattagtgggattagtaatatattaaggagttttgtttttttattagagttttggaatttgagattagttggtgatgatttttgaatattgttattgttgtaaatattttataattttaggttttggtattgagttattttttatgggtgatattatgaaattttgttttagttagttttgtaggttttgattttgtagagggaagaggtagaaagagagaaattgttagagtataattttatttgagtttaatattatagaaataaagggatgtattaaatggtatttttggaaatttttatgtttttaaatattttttggtaagttgtttttgaagttagtgggggttttttagatagagaggttttttttttaaattttagtgttgttttgttttttttttttttttttttatttttttttttttttttttgtagagatgtaagaaattgttgttttataaaaattataattgtagtagttaaagttggggttattttgtgaatttattagagatttaaagattttttattggttttgggttgtgtttagtgtttttggttttagagaataatttgaatgattttttggttttttggtataaattatttttggtgagatatgtggtttaatttataggttttttattagttttttttttaaaattatgtttatttgtttttttttgttagagaatatatagttgagaatattgttgaagttgagattgattattgtgtattaggaaagatttggagttaggattttggtgggatttggagttttgaggtagtaataattgaataagtagttttgttttttaggttgtagaagtttgaatgtatttttttttagaatttgttataggaaattgggggttttgttaggttagtttaattgtatgtaaaagattattatttttagaagttaagttgttttttatgaagaggtaaggaaaggggaaatttatatgtgattttgattttggtatggtttgatagagttttttgaaaattttttgtatgtgtgttaaaattagggaagtatgtgattgttaagtaggtaatttttgatgatttgtaaagttaggtggtagggttttggggagttttagtataatgatattgtgtggtttttttttttgtggaattgaggggaaattattttttttaatattttgatttgattt

SEQ ID NO: 2289 - DNA, 2400 bp, Artificial Sequence
  chemically treated genomic DNA (Homo sapiens)
aaattaaattaaggtattgggaagaataatttttttttgattttataggagggaagattatataatattattgtgttggggttttttaaggttttgttatttggttttataaattattaggggttgtttgtttggtagttatatgtttttttggttttagtatatatataaggagtttttagggaattttattaagttatattaaaattagggttatatgtgggttttttttttttttgtttttttataaaagataatttggtttttgaggatggtggttttttgtatgtagttgggttgatttgataaagtttttagttttttgtggtaggttttgggagaggatgtatttaagtttttgtagtttaggggatagggttgtttgtttagttattattgttttggagttttaaattttattaaagttttgattttaggttttttttaatgtatagtagttagttttagttttggtagtatttttggttgtatgttttttggtagagagaggtagatgaatatagttttagggagaaagttgatgggaaatttgtgagttaagttatatgttttattaggaataatttatgttaggaaattaggaagttatttaagttgttttttgaggttaaagatattgagtatagtttagagttaataaaagatttttgagtttttggtgaatttatgaagtgattttagttttagttattgtaattatgatttttatgggatagtaattttttgtatttttatagaggaagaagagggggagtgggaggggaaggaaagagaatagagtggtattgggatttgaaaggggaatttttttatttgaggagtttttattggttttagaagtaatttattaaggggtatttaaagatatgaaaatttttagaaatattatttggtgtatttttttgtttttgtaatattaaatttaggtgaaattatattttgatagtttttttttttttgttttttttttttgtagagttaggatttgtagaattggttgaaataagattttatggtgttatttatgagagatgatttaatgttaaggtttgaagttatagagtgtttatagtggtggtgatatttaggggttattgttaattggttttgagttttaaagttttgatgaagaaataagattttttgatgtgttattgattttattgattttaggagttaagattagttaggaagttaaatattaggagttggggtggtatgttattagtttagagttttgttatggatgtaggtaggagtttagtattaggtaattaggagttagaatatgattattagggttataaataggaagaggtgtgataggaattgtttgtttatatattggggtgttttagggatagttggagagatagaaaggagaaaataggttattagaatattgtagttatgtatattgtttatttaggttagaagttgatagtattaatttttatttttttataatattagaattttatatataaaaagattttttttttttttttttgaaatgtagttttgttttgttgtttaggttagagtgtagtggtatgattttagtttattgtaatttttgttttttaggtttaagtgatttttttgttttagttttttaagtagttgggattataggtgtgtgttattaagtttggttaatttttgtatttttagtagagatggggttttattatgttggttaggttggttttgaatttttgattttgtgatttgtttgttttagtttttaaaagtgttgggattataggtatgagttattatgtttggtttttttttttttttttttttttgaggtggagttttgtttttgttgtttaggttggagtgtaatggtatgattttggtttattgtaatttttattttttaggtttaagtgattttgttgttttagttttttgagtagttgggattataggtatgtattattatatttggttaattttttttttgtatttttagtaggaatagggttttattatgttagttaggttggttttaaatttttgattttagatgatttgtttattttagttttttaaagtgttggtattataggtatgagttattgtgtttagttaaaaaaaatttttaaattttaaataatattaggtaaaatgaaattatgtggaataataataataaggataagatatggtttaatttattataaaaggtttggtttgtatatgtaaataaattaggtgattaataggaaatttttgtaggaaataatgaaagtaagtttattatttgttaagtattttttatttgttaagtgttttgtatatgttattatttggtggatattattatttttattttgagtaggaagtagttgaaatataggtttgaggtga

SEQ ID NO: 2290 - DNA, 2500 bp, Artificial Sequence
  chemically treated genomic DNA (Homo sapiens)
aataggggtttttgggttttttaataggaagtattagattaggtagttagtagataattattggtggattatagggttattagagtgagatttatttatagataaagattggttagtgatgaagtttatttgggtgtaaaggttgagttgagaggtttttattaattggagtgtgttagtgagggtgagtagaaggtggtttttagggagaatatgggtagggtttggagttagtatttttttagggttggaggaagtagatttaggatttgtttgattgggatggggtttttttttgttatttttgtttttatttgtttagttttgtttttttgttttgagagatgtttttaggtttgggtagatgaagttaggggttttttgtttttttggaaggtttttttttgtttggagtttatgaaagattagtaggtaatgtggtaataaaaaagattttggggtagaggggtgttatgagaggtgggtttggtgttgatatttaattttgtgttttttttttgtaggatgttggtggattgtgtgtttttggtggaggtggatgatatgatgattatgggtaagaagtttgattttaagtgtgtttttatttatgtgtagttgttttataattatttgtgatgttatgaattgtgtttgtgtggtaagaatgtttagtttgtttgtttgtatggttagttagtggtaagttgttgtttttattttttgggtattgttttttgtttgtgtgtttgtttattgttgttttgtttgttgtgatatttttttttttatatatatatgtagtgttttgataaattattggtttttaatgattttgatttttttttgtgttttttgggggtggggagggggtttgaattgaaggtagttttgtaaggtttttaattttagtagggatttttagaggttttttttttgattttttattttatttgtttgtagtaatgaaggagttgagttttagttaaggtaggagggaatttagtggagttggggaaggaagaaagtggggttgggagaatttttttaattttatttttgttggtttggggatgggtattggtttttagtaagagaagtatttttgggatgttgagtgttttattttgtttttaggatttaggtaggtaggttttagttttgttgtgtttttggatttataggttagtgtggtttgaagttttttttgggggttttgtgggtgtttatatgtatttggggggtatttgtgtgttgggtgttgttttgtggtagaagttgagtttttgtattagtgtattgatttttttgtgggttattttattgagtgggatgtgttgaggtggaggaggggtggggttagtaggttgggttttgtttttggttttgtttttagtttattttttatggttttatttttagttttttgtagtggtggtttagtagtatgagtttagggttggttttagggaggtgttttattattaggttgtgattggaggtggtgttaaggagtggggtggtgggtagagggaggtggtggtttttgtagttttattgatgggaatagtattgttttttttgtttagagtttattttgtgtttgggaggggttagggtttttgtttatatgtgagaaaattagggtttaaagaagtaaagggtttttttttttattttgtggtagttattattagttaattttttttgtttatttaatatggagattattttagaattttttgggagttattattaattaatttaatttgttagttgaaaattatttgttatttttttttgaagttatgtggagatttttttaggtgtttattttatttttttttttttagaatagaaggatattagaatggaatgttttgtgtgatgaaagtttttatttggggaggaattagagtattagagattatgattttagtttatttgaggtatagatgagatattgaagtttagtgaggttataaagtaagttaggtgtaggttagatttttagtttaggttagatttttagtttagggattttttttttttttttgttttagttattgggattatgttgtttattttttaagaggtttagggggaatagagttagggatttttttttttaaatttattttttttaggtggtttagttgttattttttgtaggtttggagggggataaaatgggataggttaggagttttttatgtttattttagttatatttttaaagttatatttttttatttttgagttgggttgggttgtgagttatttttggattagtagtttttaaggtttgaaggaaatgttggatttttgtgggtagaagggggaattgtgtatataggtggggagatttaggtttagagatattaggggaaaagagtaaggttagagatttatagtgtgtttgttagttttggggtttgtatattttattggttgtggattgatttttaatgtttaggggaaatgattattttgttttttt

SEQ ID NO: 2291 - DNA, 2500 bp, Artificial Sequence
  chemically treated genomic DNA (Homo sapiens)
agaggagtagggtgattattttttttgggtattgggagttagtttatagttagtaggatgtataggttttaaggttggtaggtatattgtgggtttttggttttgttttttttttttggtgtttttaggtttgagtttttttatttgtatatatagtttttttttttgtttataagggtttagtattttttttagattttgggaattgttgatttggggataatttatagtttgatttaatttagggataaggaagtatggttttggggatgtgattggaataaatgtgaaggatttttgatttattttattttatttttttttagatttgtgggggatgatagttgaattgtttaaaggaggtgagtttgaaggaagaggtttttagttttgttttttttgagttttttggggagtgggtaatatggttttaatgattggggtggggaggggggaaggatttttaggttgagagtttagtttaggttgagagtttagtttgtatttgatttgttttatgattttattgggttttagtgttttgtttgtattttgagtagattgaggttatggtttttgatgttttggtttttttttaggtgaaggtttttgttatgtaggatattttattttagtatttttttgttttgggggaggggaaatgggatgggtatttgggagaatttttatgtaattttagaaaggggtggtagatggtttttaattgataagttgaattgattggtagtggtttttagaggattttgaggtggtttttatgttgggtgggtaagagagattgattagtgatgattgttatagaatggagaggagggttttttatttttttgaattttaatttttttatgtataagtggagattttggttttttttgggtatagagtaagttttgagtaaaggaggtaatgttgtttttattagtaaggttgtggaaattattatttttttttgtttattattttgttttttaatattatttttagttataatttggtgatgaaatatttttttggggttgattttgagtttgtgttgttgggttgttgttatgaggaattagaggtgaggttgtgggaggtgggttgggggtgaggttagaggtgaggtttagtttgttgattttgttttttttttgttttagtgtattttatttagtgaaatgatttgtgaagagattaatgtgttagtgtaggagtttggtttttattgtaaggtggtgtttgatgtgtaggtgttttttgagtatgtgtgggtgtttgtgaagtttttagaggaaattttggattatgttgatttgtaggtttgggggtgtggtggagttgggatttatttgtttgagttttggagatagaatgaagtgtttagtattttgggaatattttttttgttgagagttgatgtttgtttttgggttagtagggatggggttggggaggtttttttaattttatttttttttttttttagttttattaaatttttttttgttttaattgaggtttgatttttttgttgttgtgggtgggtggggtgggaggttggaagaagaatttttgaggatttttgttggagttggagattttgtggagttgtttttggtttaaattttttttttatttttaggagatgtagagaggagttaggattgttgaaaattaataatttattaaaatgttgtgtgtgtatgtgggggggagggtgttgtaatagatagggtagtggtgggtggatgtataggtaggagatggtgtttggagagtgggggtggtagtttgttattggttggttatgtgggtgggtaggttagatatttttgttgtgtaggtgtagtttgtggtgttgtaggtggttgtagagtgattgtatataggtgaagatatatttggggttaggttttttgtttatgattattatgttgtttatttttattaggggtatatagtttattagtattttgtagggagggggtatggggttggatgttagtgttagatttgttttttgtggtgtttttttattttaaggttttttttattgttgtattgtttgttggttttttataaattttagatagggaaaagttttttaggaaggtaggaagtttttggttttatttatttaagtttggaggtattttttggggtgggggagtagagttaggtaggtggaggtggagatggtagaagagagttttattttagttaggtaggttttgggtttgttttttttaattttggggaggtgttggttttaaattttgtttatgttttttttggagattattttttgtttatttttattggtatattttagttggtagaagttttttagtttggtttttgtatttagatgggttttattattggttaatttttatttatggataggttttattttagtggttttgtggtttattgatgattgtttgttagttgtttgatttggtattttttgttgagaggtttagggatttttatt

SEQ ID NO: 2292 - DNA, 2470 bp, Artificial Sequence
  chemically treated genomic DNA (Homo sapiens)
gttttttgttttatgaatgttagaagtaagtaaaaatgtttttatttaaattatttttttttttataaaaataagaaaattatgtaattaaaataattttttgtttttttaatgagtttattatttgatttagtaattttttaatatttttatttgttttattgtaagtagttttagtgtatgttggttagatggtttttgggtttatattagtttaattgaattaggagaggagttttagaaggtgtattggatagttatgttagaggttgtgtgtaattttaggttagattagtggttttttgttttatttgaattttaaaataattgtgaaatttttaaaaaatatattgttgttggggttttatttatatagattaaattatttttaggggtaggttttgggtttgagtttttttgtttttgtttttgtgttttttaatttttttagttgttttttttgtgagtgaaggttgagaagtatagttgtttttgtgaggaatttagtttttagagagagtttgtttgttgttttttattttttagagaggttgtagggtgtttagattttgtaggtattgttgttttttgttaagtttgatgttgttatttaattaatatttgtttatattaattagttgttatatgtattgaaggggagtggttttttttgaagtttttagttgttgattatataagatttggtttgaagtgggatttttggaaatttaattaagataatgatttttaggtttttttaaaagtttattttttaggtataggtaggtaatgaaataatttaattgtggttttttttataatattttttattttatagtattgatggagtaggagggtgtggataggtttttttgggtttttggtgttttttgttaggtgttaaaataaagaggattattgtgttttttggaattggtttaaatgtttatgtttaagattaagatttagggaaatgtatttttgtttgatatttattagtttttgattgtgaaaagggtattaatttgtgtaatggtgttgtgatttggttgtggattttagtttttaaagttgggtatttttaattaggagaaattaagtggggttgttatatattttgagaataagtaatattatttaaatttaggtagttttaattattaatttaattgttgaatttttgttgttatatgttttttaaatagattagtataattttaattaggatttaaaatgtattatttttgttttggaatttagaatttgtagttgatgggagtttttggaggtttaatgattttaattatggtgagaaatatttttttttggtggggaggggtgtggttggtggtgaggagggtatttttttgggttggagaaggttggatggtagtttgttttgaaagttttggtttgttggattgggggtttgggggtggggggaatatagagaagtagggttggtggaggggaggagggattttgtagggtggtatatgatgggtgggagtggggaggaggagggtttttggtgtggggaggagttgtgggaggggggatgttggttgtagggttttggagttttgagttgtgtttgtggttttagtgttttgattttttgttagggaaatttggaaggttaggttgggttgtagttaagttttggagtgaggagttggtgggtggagttggtagtattgtgttatttatttttattttttaattttttaagtagtgaagtttgtttggttgttttggttttttgtttttgtttttgttgttgtttttgtttttgtttttttttattttttgtgtgttggttttttgtaggttgtagattaaggggttttaagttttgaaagtaagttagttaaatgttttgtaagtttggtttagtaaaattatgtatgttgtatatattttaaaagaaattagatatttttttaaagttgtgtgtgttttttttttttattttttttatttttattttagtataaattatttaagaattataggtgattttttttgttggtttgtgagtgttagggtttagtttgtttttttttttttattattattattatttttgtttttggtattaggatttttttattggttatttgtgtgtttttggtgtgtgattttattttttatggaatgaaaagtttttgttggaaaatagggtttttggtgaggtaggttttgggagtttttttgtttagtgagaatgttttgtgttatgtagtgatttatgttttagagaatagtagttgattagaatgtttaagagtttggtgtttgggtggttattattaagtgaagaatttgaggaggaggaaaggaaaaagtgaggagtaaggatttaaaatttatttagtggtttttagagggagggggataataggatttaaagagtttgggttttttggtttggggtaggatttgttaagagggatttgtgggtgttagg

SEQ ID NO: 2293 - DNA, 2470 bp, Artificial Sequence
  chemically treated genomic DNA (Homo sapiens)
tttgatgtttataggttttttttggtgggttttattttaggttagagagtttaggttttttgagttttgttatttttttttttttggaggttattaagtggattttaaatttttattttttatttttttttttttttttttttgagttttttatttagtagtgattatttaggtattaggtttttgaatattttggttagttgttgttttttgaagtatgagttattgtatgatataggatatttttgttgggtaagggggtttttaaggtttgttttattaagggttttgttttttgatagaaattttttattttataggaaatgaggttatatattaagagtatatgggtaattggtgagaaaattttggtgttaggaatgggggtggtggtggtggtagaagaggagaggtaaattagattttaatatttatgaattagtagggggaattatttgtggtttttgggtaatttgtattagggtggggatgaggagggtggaggaaagggatgtatatagttttaaaaaaatatttggttttttttaaagtatatataatatatatgattttattaagttaaatttgtagggtatttggttagtttatttttaagatttggagttttttaatttatggtttataggagattaatatataggaggtaaagaggggtaggggtaggggtagtggtaggagtgggggtgagaggttagggtggttaggtgggttttattgtttggggggttgggaggtgagggtgggtggtgtagtgttgttagttttatttgttggttttttgttttagggtttggttgtagtttggtttgattttttaggtttttttggtaggagattaaagtgttgaagttataaatatagtttagaattttgaggttttgtggttaatatttttttttttgtggtttttttttgtgttaggagttttttttttttttatttttatttgttgtgtattgttttgtagggtttttttttttttttattagttttgtttttttatgttttttttatttttgaatttttaatttagtgggttgggatttttggggtgggttgttatttggttttttttgatttgggaaagtgttttttttgttattggttgtgtttttttttattgggagaagatattttttgttataattaaagttattaagtttttaaaggtttttgttggttgtaggttttgagttttggaatgaagatgatgtattttaagttttagttaagattatgttgatttatttaggagatatgtagtagtgagaatttagtggttaagttagtggttaaggttgtttaagtttaaatagtgttatttatttttaaaatatgtagtagttttatttaattttttttaattaaaggtatttgattttagaggttggagtttgtggttgggttgtggtgttattgtataggttggtattttttttataattagaaattagtgggtgttaaatggaaatgtatttttttagattttaattttaaatatagatgtttaggttagttttaagaaatataatgattttttttgttttaatatttgataaggagtattaaaaatttaggaaagtttgtttatatttttttgttttattgatattgtggggtgaaagatgttatggaaaaaattgtagttgggttgttttattatttgtttatgtttggaagataagtttttggaagaatttggaagttgttattttggttgagtttttagaagttttattttaggttaaattttatatagttagtaattagaaattttaaaaaggattatttttttttaatgtatatggtaattaattaatataaataagtgttaattaggtggtagtattaggtttaatgaggaataatagtgtttgtaaagtttggatattttatagtttttttggaggatgagaggtggtgggtaggttttttttgaaggttgagttttttataggggtagttatgttttttaatttttgtttatggaggaggtaattggggagattaaaaaatataaaaataaaaataaaaaaatttgagtttaggatttatttttagagatgatttgatttatatagataaaattttagtagtaatatattttttagaagttttgtagttattttaaaatttagatagggtagagaattattgatttaatttaaaattgtatatggtttttggtatgattgtttagtgtattttttggagttttttttttgatttagttggattgatgtagatttagaggttatttaattagtatgtattgggattatttataatgaggtaaatgaaggtgttagaaaattgttgaattaggtggtaaatttattgagaaggtagaagattattttgattatatgatttttttatttttatgaagaggaaggtaatttggatgaaagtatttttgtttgtttttaatatttgtgggataggggat

SEQ ID NO: 2294 - DNA, 2491 bp, Artificial Sequence
  chemically treated genomic DNA (Homo sapiens)
aatgtaaaaatgttttgaagaaagagatattgagtattggaattaagtattttatgtttttttttttgtaatattggggattaaggattattatttgtatttttggtgaagaaattgaggtatagagaagataaattatggttttttggttataaagtaagtagtagagtttagagtttgaagttaggtttgatatttaagttttgtagtaaattttttattgaggtaggtaagttttgttttgtagagagtggtaaattagggaaaaaagaattaaatgtgtttgagtttaatagaatatatatattatatttaaagagaaagatattttttttataaaaagtttgaggataaatgagattttatgtgatgtgttttgtattaaaaaaaaaaagttagattatataagttagattggtgttgattaaagaagagtaaggtaataaatatgtataagaagaaggaagtggttggttttattttgggtattatttaagttataggtaggggaggggataggttttgtatggggatagttttttgatttgtttttttttttttttatttttttttttttattatttttttttttaaaatttaaaaaattttaagtaggaaaaaagggagttaattaaaaaagagaaaaatatttttgagattaatgaagtttttataatttatagtgatagatagggatttgtagaatagtaatttgattaaataaggatataagggatttaaaaggattttttagttgtgtaaagtgtgtttatatgtttgaaaaatattgtatttatttggtttttaaatttgaaaattttttgatgggggagattgtttttatttggaaattaggaagaaattataaggtaaggttatggggttttggtagggttggggattttatgttgggtggaaattttaagaagttagttaagggtttgtaggaggggttttggtagagagaagtattagaatgtaagggtaggtaaagttatttttatagaaggtgattgtgggttgagtttgaggttttttttagatggggaagagagaatagtatattttttttgtttatgttttggtattttatttaagaattagttgtttgttagttatttgttattggagatagttttgttggtggtttttagaaaaagtgaagtagttagaggatgaattgttatttggggaatatatttgtatataggataggaatggatgggagtggggagtgttttggggttattgtttaaatgttatttttatggtttttaagatttgtattagtagtttagttgttgatgaattataatttttggataagttgtagaggttttttttgttttatgtgtttatttttgttgtttatattgggggatttatgttttttggggttaggaggagaaaataatgagttattggggataagagaaaaataaaaatgttttgtatgtgtaaaattatttaaaatggaggtttttagaggatatttaaattttagttaattagttagaaagggttttgttgggggtatattttatgtgtttttgttatttttggatgtagtaaagttagaaatgtttatattttttggagggattatttgtgtaaataggataggtttttttgagaaggttgtttgtttttttgggattttgaatttgagaagaaatggttttggtttggtgtggtggtttgtgtttgtaattttagtattttgggaggttgaggtaggtagattataaggttaggagattgagattattttggttaatatggtgaaattttatttttattaaaaatataaaaaattagttgggtgtggtggtaggtgtttgtagttttagttatttaggaggttgaggtaggagaatagtatgaatttgggagttggagtttgtagtgagtggagattttgttattgtattttagtttgggggatagagtgagattttgttttaaaaaaaaaaaaaaaaaaaaagaaatggttttgtatttttgatttgggaggtttaattaagtagaggaattgttggttgtaaattttttaaagtagaggattttttgggaggttgaggtaggtgattatttgaggttaggagtttaagattagtttggttagtatggtgaaattttatttttattaaaaatataaaaattagtggattgtggtgggttgtatttgtaattttagttatttgggaagttgaggtatgagaattgtttgagtttgggaggtggaggttgtagtgagttgagattgtgttattgttttttagtttgggtgatagggtaattttattttaaagtaaataagtaaagtagaggattttgatggttatttttaagtttatagttatttgtatattttatgtggtgaagtattggtggggggtttaggaagttttgtatgagttggttgtagttgttatgattttaatttttatgttattttttgtatttagttatagagttgtatttttagaga

SEQ ID NO: 2295 - DNA, 2491 bp, Artificial Sequence
  chemically treated genomic DNA (Homo sapiens)
tttttggagatgtggttttgtggttaggtgtagagggtggtgtgggagttggaattatggtagttataattaatttatgtagggttttttgggttttttattagtgttttattatataaagtgtgtaggtagttatgaatttgggggtggttattagggttttttgttttatttatttattttgagatggagttgttttgttatttaggttggagggtagtggtataattttagtttattgtaatttttattttttaggtttaagtaatttttatgttttagttttttgagtagttgagattataggtatagtttattatggtttgttaatttttatatttttagtagagatggggttttgttatgttggttaggttggttttgaatttttgattttagatgattatttgttttagttttttaaaggattttttgttttagaaggtttatagttaatagtttttttgtttaattggattttttaagttagagatgtaggattatttttttttttttttttttttttttgagatggagttttattttgttttttaggttggagtgtagtggtaagatttttatttattgtaagttttagtttttgggtttatgttatttttttgttttagttttttgagtagttgggattataggtgtttgttattatgtttggttaattttttgtatttttagtagagatggggttttattgtgttggttaggatggttttgattttttgattttgtgatttgtttgttttggttttttaaagtgttgggattataggtgtgagttattgtgttaggttaggattatttttttttaggtttgagattttaggagaataaatagtttttttaagaggatttgttttgtttgtataggtgatttttttaagagatataaatatttttggttttattgtatttaaagatagtaaagatatataaaatatatttttagtaaaattttttttggttagttggttgggatttgagtgttttttaaaagtttttattttaggtggttttgtatatatagggtatttttgttttttttttgtttttagtgatttattattttttttttttagttttaggaagtataaattttttagtatgagtggtaggggtgaatatatggaatgaggggggtttttgtagtttgtttgagaattataatttattagtggttgagttgttgatgtaagttttggagattatgaggatggtgtttgaatagtagttttagggtgttttttatttttatttatttttgttttgtgtgtaggtgtgttttttgaataatgatttattttttggttgttttgttttttttgaaagttgttaatagagttgtttttgatgataggtgattaatgggtagttgatttttgagtgagatattgaggtgtgggtaggagaggtgtgttgtttttttttttttatttgggaagggttttaggtttagtttatagttattttttgtgagggtggttttatttgtttttgtattttaatgtttttttttgttagggttttttttgtagatttttggttggttttttggggtttttatttaatatgggatttttagttttgttagaattttatggttttgttttgtgatttttttttagtttttaaatgggaataattttttttgttagaaggtttttaggtttgggagttaaataaatatggtattttttagatgtatggatatattttatataattggagagtttttttaaattttttatatttttatttaattaaattgttgttttgtaggtttttgtttgttattgtggattatggagattttattggttttaaggatgttttttttttttttaattagttttttttttttttgtttaaggttttttgggttttggagggaggggtagtgaagggagggaagtagagaaggaagaagataagttaggagattgtttttatgtagggtttatttttttttttgtttgtaatttgggtgatgtttaaggtagagttagttatttttttttttttatgtgtatttattattttgtttttttttaattaatgttagtttggtttatataatttaattttttttttttagtgtaagatgtattatatgaagttttatttgtttttaaattttttgtaagaaaagtatttttttttttaagtataatgtatatgttttgttaaatttaagtatatttgatttttttttttttaatttgttattttttgtaaggtgaggtttgtttattttagtgggaggtttattatgggatttaggtgttagatttggttttaaattttaggttttgttgtttattttgtagttggagaattatagtttattttttttgtgttttagtttttttattagaaatgtagataataatttttagtttttagtgttgtagggaagaggatgtagaatatttggttttaatgtttaatgtttttttttttaaagtatttttgtatt

SEQ ID NO: 2296 - DNA, 2478 bp, Artificial Sequence
  chemically treated genomic DNA (Homo sapiens)
tttttgtagttaggtatgttttggtttgagaagttaagtaagaatgttatgtagaatatttaggaagttttttttaaaggagaggggtatgttttttttttttttgtttttttatttgttgtttggaatatggttgtgatgttggggttttagtagttattttggattatgaggtggtttagaggaaggaagttaggagttgagaatagtagagtaaaaatgtggtttttgatgattgtttagttattatattagttttgatttttttatttttggattttttttatgtgggagtgaaataaatttttattttaagttgttattttttttgttttattatgtgaagttgaaataaattttgatagatttttatagtatataaagatgaggttatatattttttatttatatttgtgttataatttgtttttaggaggagattggaaagtagggttagatggtttagaggttttatggggttgaggttagtaggtttggttattgggttttatgggatgaaggtagaaaaggaagttgagtttggtgtttgagatggttttttaattatgttatttgatttgtgattttgtggagggtaaggttttttttgttatttttttagtattatgtttgaatttttgggaagttgttggaagggaataatagaatttgttttattttttttttttttttgtatgagggatagggagaatttttgattgagatttatatttaattttgaaggaaagaggaatgtgaatgtggattggaaaattattgtggggtgtttgttaggttttgggggtgggatatggagggtatttagggatattagggtagatgtttaatggtggagttttgttgtgtattgtaggggtagggtttattttgtaggttttttggaaggtttaatataggttagagatgttttttagagtttgtaggagagtttaggtgtggggagagggtttggagtagtagtagtagtgatggtagtgttttaaggaatttgggtttaggtattgattttgaggagttggtgatgtaggtatggggtatttatgtagggttttagtaatttttgggaaggagaatttggggtttgaaggtgaggtgagtggatttaggattggataatttgggggttttagggaagtgagatttgaagtagttaggttatattgggtttttggtagtaggtagagggttttttgtgggaagtttttggttgttggtatttggtagttgttttttgtagaggtattgggtgtagagttgtgtttattgttttgaaatttgtgatgtttagtagttttgttttagttttattatagtttttgaatgtgtgttgtattggtttttagtagtgtataattttgggttgaatatgtagtagagtagagtaaaaagatggtgtttttgtgttggtttttttttagatataagataagaaggggtgaggagggagtttttgaatatgagggttggggtgggtttttttttgttttgtttttgttttgtttagttttgttttggttttattttttaatttgttttgttggttttgaattgaggagggagtttgttagaatttgttataaagatgtgtatttgttttttgattattgtgtgggttgtttaaaaatgtgtattatattagttattttatttatatttttttattggtaatttggaaagaaggtaggtttttatttttattttatagattaggaagtggagatttggggaggtaaagtgatttgggttttgattttaatatattttaggttatattattttttagggaatgtaatgagatggttgggtagatatgggttaatttgaaaatagtttgaggaaaaaaagagattttagtttgtgttttttagtaagttattataatgaatagtgttaaaaaaaatttataaggttgtaattatatttagtaattagaatattatattgtgattattttatttaggtgttattagattgaaaataagatatttgaatatgatttagttttaatgtgtttgaatattataaaggtgaatggtaggtaataatgtgtaatatattttgggaaagttgaattttaatataatattatgtaagatagatgagtatagggttaagttgtttttattttttttttatattatttggtatgtatgatgtgtgttttttaggtatttaagattttatgagttgttaatttgtttaattagttgatttataggtggggaagagagggtgtggggtttatatgattttttatattatatattatagggtaggattattagtttggttagagtttttatttttgatttattttgtagggaggggtggtatttaagttgtttttttttgaggatatttttttgttgtttaatggggtggagaaagtttttaaattattagaaaatgaagttttttttttagtttttttgtagggagatatttgatttgattttt

SEQ ID NO: 2297 - DNA, 2478 bp, Artificial Sequence
  chemically treated genomic DNA (Homo sapiens)
ggaggttaggttaaatgtttttttgtagaggagttaaaaaggggattttattttttggtgatttgggagttttttttattttattaggtagtagaaagatgtttttgggggaaggtagtttgggtgttgtttttttttgtaaggtgggttagaggtgggggttttggttgggttggtggttttgttttgtgatgtgtggtgtgggaggttatgtgagttttatatttttttttttttatttgtggattagttgattgggtaaattggtagtttatgaagttttgggtatttggggagtatatattatatgtgttaaatgatgtaaaaaaaaaatgaaagtagtttaattttgtgtttatttgttttatatagtgttatgttaaaatttaatttttttaagatgtgttatgtattgttgtttattgtttatttttgtgatatttaaatatattggggttaaattatgtttaaatgttttgtttttaatttaatagtatttaaatgaagtaattatagtgtagtgttttaattattagatataattataattttgtgaattttttttaatattgtttattataataatttattagaaaatatagattgaaatttttttttttttttaaattatttttaaattggtttatatttgtttggttattttgttgtattttttgggaggtggtgtggtttgaagtgtgttggggttaaagtttaagttattttatttttttgagtttttattttttaatttgtgaagtggggatagagatttgttttttttttgggttgttagtggggaggtgtaaatgagatggttgatgtaatatatgtttttaaatagtttatataatggttagggggtgggtgtgtatttttgtgatgagttttggtaggttttttttttgatttagagttagtggagtaggttgggaggtgaagttggagtagggttgggtgaggtgggggtgaggtgaggaggagtttattttaatttttgtgtttaaaagttttttttttatttttttttgttttgtgtttagaaagaagttggtgtggagatgttatttttttattttgttttgttgtgtatttagtttaaaattgtgtattgttggaggttaatgtggtgtatgtttaaaagttatgatgaggttggaatagggttgttaagtgttgtagattttaggatggtgagtatagttttgtgtttagtgtttttgtagggagtagttgttaaatgttagtggttagaaattttttatggggagttttttatttgttgttgaaggtttggtgtgatttggttgttttagattttatttttttgggatttttaagttatttagttttgggtttatttgttttatttttagattttgggtttttttttttaaaggttgttggagttttgtgtggatgttttatatttgtattgttagttttttagggttagtgtttgagtttaggttttttaaggtattgttattattgttgttgttgttttgagttttttttttatatttgggtttttttgtaggttttgaagagtatttttgatttatgttggattttttaaggggtttgtaaagtgagttttgtttttgtagtatatagtggggttttattattgggtatttgttttgatgtttttgggtgttttttatgttttatttttagagtttaataaatattttgtagtggttttttaatttatatttatgttttttttttttttggggttaagtataaattttagttagggattttttttattttttatgtaaagaaaggaaggaagtagggtaggttttgttatttttttttggtaattttttaggaatttgggtgtggtgttgggaaggtggtaaaagaaattttgttttttatagagttatagattagatggtgtaattgaggggttgttttagatattaggtttagtttttttttttgtttttattttatggggtttaatggttaggtttgttgattttagttttataggatttttgggttatttagttttgttttttagtttttttttagaaataagttataatgtaaatgtggataggaaatgtatggttttatttttatatattatgagggtttgttaggatttgttttagttttatataatggggtggggaaaatagtagtttaaggtgaaagtttattttatttttatataaaagaagtttagaggtaggaaggttagagttggtgtggtggttggataattattagggattatatttttgttttgttgtttttaatttttggttttttttttttaggttattttatgatttaaggtggttgttggagttttagtattatagttatattttaggtagtaggtggaaaaataggagagaaaagggtatgttttttttttttaaaggaggttttttggatgttttatataatatttttatttagttttttaggttagaatatatttagttgtaagag

SEQ ID NO: 2298 - DNA, 2292 bp, Artificial Sequence
  chemically treated genomic DNA (Homo sapiens)
aaggggttgtagttttggtttttggtgagaggattgtagtgttggggttggttaataagtattttttattttgtaggaggttggtgtagtatttgtgagtatttgtgttgaatttttttgtggattagatattgtgtttttttgtttagagttaggttggaaaaggaaaatttgttgttggtgtgtatgtgttttaaatttttagtttgggtaagggtatgggtgttgtgaataaaggagttatttttgttggttttttttagaaattgtttatagtttgtaaaaaggttgtgttttttggttttggttgtggttgtgtaggagtttgaatattattttttttagaagttgaggtttttaggttaggtttattttgttttaaatgggtagtattggttttgttttatgtataggttttaggtggatagagttgttgtaggtatgttgttagggggataggttgttttttagttgtgtatggtagtgtgttggaaagaataaggtttgtgggtgtttttgagttgggtttggagttttgttttgttattttttagttgtgtgattggagtttttttgtttttttttgaaaatgggtttggtggtttgtttttaggtttttaattattgtgtggagttatatttgtagaaggttagtttataatagatatggtaattaatgtgatttttgtattttttttttttggggttaggagtaggtttaagaggtggttaggttaaatttttgtagggttgtgggtattgttggttttttaagttttgggattttttgggggttgggtggattttaagttttgtttatttgttttttttttatttttattatttattttgtttttttggttttttttttttttgttttgttttttattggttttttgttttttttgtttggagaggggaatgtgaaggaggtgaggagggagtagtgtaggaggatttgggttttttttttttttttttttttattttttgagggtttaattagttggtgaaggtttttaattagtaaaggaggaagtagttggggttggtgagggtgaggttggtagttaggtaggaaggtagtaggaggaggaggaagtggaggtggtattttttgagaggtgtatgtttagtgagttgtgaagatggtagggttggtggagtggttgttgtatttgattttttttttttttttaggatatgtgatggtgtttagtttggagttgggataaggtttttgtagttgatatttttataggagaagttttgggattggggtagtagtaaggtgtttatgttatatattgttttttgaggaaatgtggtttagtgattttttgattgtggattttgtgggaaattttgttaataaatgttaaagatatattttgaggtagtgtggatgtggtttgtttttatttaatagtatggtttgtgtggtttttttttgggattatttgtgtttttatatatttgtttagtgtttgtgagtttttgtgtttggtttttgtgtattagatatgatgtatttagagttaggtagtaggagggagttttgttttagaggaagtttagttatgttgttatggagagggtgtgttttttttgatgtattagttgttgttagaggaggtttatggtagtgggtgtttggagttatagtgtttgagttatttgagtgtgtgagtggtaagggagaaatatttaaattgtgtaatattagggatattgaagtaaagatggagtttggtgtttatagatgaatggtagtatgaatgagtgtgtgttttttggggttgttttaagttattataaatgtgggggtttaaaataatatatattaatttttttgtagtttggagattagagtttagaatgggttttgttgggttgtgtttttttggaggtgttaaggggaaattttttttttttgttagtagtgagaggtattatattttttggttgatgttatttgtatttttaaagttagttatgtggtgttttttattttttttttttgttttttttgtgtttttgttgtttttgaaggatttttgtggtgattttggatttgtttggggaatttaggggttttatttttaggttagtagatgagtgtttttaattttgtttgtagatttagtgtttttttgttatgttattgttatgtttatatgatttagggattaggaggtgtgtgtttttggttgggtgggagtgtgggatattattttgttttatataattagtatttttttaatatttgggggataattttaaattggttat

SEQ ID NO: 2299 - DNA, 2292 bp, Artificial Sequence
  chemically treated genomic DNA (Homo sapiens)
gtgattaatttaagattattttttaaatattagagagatattagttgtgtgagatagaataatgttttgtatttttatttagttgaagatgtatattttttaatttttggattgtgtaaatgtgatgataatatgataagggggtgttaagtttgtagatggaattaaggatgtttatttgttgatttagaaataagatttttggattttttgggtagatttgaggttattataggggttttttaaagatagtagagatgtagaggaggtaagagggagagatgggggatattatatggttggttttaaagatgtaggtgatgttggttaaggaatgtggtgttttttattgttggtaaaggagggggatttttttttagtgtttttaggaggatgtagtttagtaagatttattttggattttgatttttagattataagaggattaatgtgtgttgttttaagtttttatgtttgtggtgatttagagtagttttagaaaatgtatatttatttatgttgttatttgtttgtagatattaggttttgtttttgttttagtgtttttaatgttatatggtttgggtattttttttttgttatttatatatttaaatggtttgagtattgtggttttaagtgtttgttgttgtgggttttttttgataatggttggtgtattgaggggagtgtgttttttttgtaatagtatggttgagttttttttggggtaaagtttttttttgttgtttggttttgaatatattatgtttggtatatgggaattaaatatggagatttgtagatattgggtgggtgtgtgagaatatgggtggttttggggaaaggttatgtgggttatattgttgagtgaaagtaaattatatttatgttgttttggagtgtgtttttaatatttattgatggggttttttatagggtttgtagttaaagaattgttgaattgtgtttttttgagagatggtgtgtggtatgggtgttttgttgttgttttagttttagagttttttttgtaggggtgttggttataggaattttattttagttttaaattggatgttattatatattttaaaaaaaggggagagattagatgtggtggttgttttgttagttttgttatttttatgatttattgagtatgtgttttttagaaggtgttgtttttgtttttttttttttttgttgtttttttgtttggttgttggttttatttttattggttttggttgtttttttttttgttggttaagaatttttattagttggttaagtttttggagaatggaaaagggaaagaaggagagatttaaatttttttgtattattttttttttattttttttatgtttttttttttggatggagaggatagagggttgatgagaggtggagtagggagggaaggagttggaaggataaggtgggtagtgaggatggaggagaggtaggtggatagaatttaaggtttgtttggtttttagaaggttttggggtttaggaaattagtagtatttatagttttataggggtttagtttgattattttttagatttgtttttgattttaggaaggaaggatgtaaaggttatattggttgttatatttgttatgagttgattttttgtaggtgtgattttatatagtggttaagaatttgggaataaattattagatttatttttagagaggagtaaagaggttttagttatatggttgagaagtggtaggataggattttagatttggtttaggggtatttataggttttgttttttttgatatattgttatgtatagttggggggtagtttgtttttttgatagtatgtttgtagtagttttgtttgtttggagtttgtgtatggggtaaggttaatgttgtttatttgggataaggtgggtttaatttagggattttaatttttggggaaaatgatatttagatttttatatagttgtagttggggttagggaatatagtttttttgtaagttgtgggtaatttttagaaaaggttagtaagaatggtttttttatttatgatgtttgtgtttttgtttaagttgaggatttggagtatatgtatattggtggtaagttttttttttttaatttgattttgagtaagaagatataatatttgatttatgaagagatttaatatagatatttataaatgttgtgttggttttttgtaggatgaagggtgtttattaattagttttggtattgtagtttttttattagaagttaggattgtagtttttt

SEQ ID NO: 2300 - DNA, 3056 bp, Artificial Sequence
  chemically treated genomic DNA (Homo sapiens)
gaagtgtatatatggggttatttttattttatagggttgtttttttgttatttagtagttgtgatgaggatattgtgatttttgtggataagtttggtaaaggtttttgaggtatttatgttttgagttattttagtttttttgtttttggtatgttttgaaggtttgattatgggggtgatagtttttgagaaggtggtttttgtggtatttggtagtggattgtaatagtgtttgttattttatttgtttaataagtggttattaggaagttttggaataaagtttagaagaattgggataggggttgttagggttgttagtggggatagggtggggtataggaagttgtaggatagatttagaatatggggttttgttgggtaagagggtgataggtagtagttttagtaaattgaggaattttttatgggatttgaaagttgaagatgggtagggagttttgttttgatttttaagaggttggtatttttgtatttatattgtggttttgtgttttttgtgtttttattgtgtttttgtgttttttgtgtttttattgtggttttgagttttttgtgtttttattgtggttttgagttttttgtgtttttattgttgttttgagttttttgtagttatattgtggttttgtgttttttgtgtttttattgtgtttttgtgttttttgtgtttttattgtggttttgagttttttatgtttttattgtggttttgagttttttgtgtttttattgttgttttgagttttttgtagttatattgtggttttgagttttttgtgtttttattgtgtttttgtgttttttgtgtttttattgtgtttttgtgttttttgtgtttttattgtggttttgagttttttgtgtttttattgtggttttgagttttttgtgtttttattgttgttttgagttttttgtatttatattgtgtttttgtgttttttgtgtttttattgtgtttttgtgttttttgtgtttttattgtggttttgagttttttgtgtttttattgttgttttgagttttttgtagttatattgtggttttgagttttttgtgtttttattgtgtttttgtgttttttgtgtttttattgtgtttttgtgttttttgtgtttttattgtggttttgagttttttgtgtttttattgtggttttgagttttttgtgtttttattgttgttttgagttttttgtatttatattgtggttttgtgttttttgtgtttttattgtgtttttgtgttttttgtgtttttattgtggttttgagttttttgtgtttttattgttgttttgagttttttgtagttatattgtagttttgagttttttgtgtttttattgtagttttgagttttttgtgtggtttgtgttgttttagagtttttggtgtggggtggggtatataggtagggattaatttatggagtttttagtttgttttgtagtgttttttataaaagttatggatttttttttgtttgttatatgttgtgtttattattgtgatggttttttttatggggatttttatatgatagagagtaaggtgttagttaaggattattgggtagttgggggttggtggtgttaagtagtaggaagtagtttagttggatgaggagtgttggttgtagagatttttttgttgggttttgttatttggtaggatttttatggaggagttgtatttatattttattaaaatttttaatttttgtagaataaagttgagttttagagaagggaagagatttgtttaagttattaataggttaataattatgggggtttagatagggaagtttaagtggtttgattgtagtttattattggtagttaagtttaagtagatgagtttttggggtagaaggaagagttaaatggttttgtgaatatggaaggtaaagaaaaattttattttattttaaggaagtatgtagtaagatgttaaaaatagatattttggtgatatggagttgtagggggaaatagtgtgaggattttggaaggagtaaggtatgaaggattgtatgtgtggttttgtgttgatgtgaggagtaagtgtatggagtttttatagtaggaggggggatgggaatgagttgtaggttgttgggtggagagtttttttattggaatgtttgagaggaggtgaggatgttgggtttttttatgtttttttttgggttttatgttgttttgtgaaagggaagggaattatttatttggaatatgaaggaagaataataaaattttattgtttattttagagaagatatggttatagaggttgtatgttatattgtgggtgttatagggagtttgtttatatagtgtttttatattgtaggtgttatagggattttgtttatatagtgttttttgattgtaggtgttatagggattttgtttatatagtgttttttaattgtaggtgttatagggagtttgtttatatagtgttttttaattgtaggtgttatagggattttgtttatatagtgtttttatattgtaggtgttatagggattttgtttatatagtgttttttaattgtaggtgttatagggattttgtttatatagtgtttttatattgtaggtgttatagggattttgtttatatagtgtttttatattgtaggtgttatagggattttgtttatatagtgttttttaattgtaggtgttatagggagtttgtttatatagtgtttttatattgtaggtgttatagggattttgtttatatagtgttttttaattgtaggtgttatagggattttgtttatatagtgtttttatattgtaggtgttatagggattttgtttatatagtgttttttaattgtaggtgttatagggagtttgtttatatattaaattgaaggttttatagggatttagtttatatagtatttttatattgtaggtgttatagggattttgtttatatagtgtttttatattgtaggtgttatagggatttagtttatatagtgtttttatattgtaggtgttat

SEQ ID NO: 2301 - DNA, 3056 bp, Artificial Sequence
  chemically treated genomic DNA (Homo sapiens)
gtggtatttgtagtgtgaggatgttgtgtagattgggtttttgtggtatttgtagtgtgaggatgttgtgtagatagggtttttgtggtatttgtagtgtgaggatgttgtgtagattgggtttttgtggagtttttagtttgatgtgtagataggttttttgtggtatttgtagttggaggatgttgtgtagataggatttttgtggtatttgtagtgtgaggatgttgtgtagatagggtttttgtggtatttgtagttggaggatgttgtgtagataggatttttgtggtatttgtagtgtgaggatgttgtgtaggtaggttttttgtggtatttgtagttggaggatgttgtgtagataggatttttgtggtatttgtagtgtgaggatgttgtgtagatagggtttttgtggtatttgtagtgtgaggatgttgtgtagatagggtttttgtggtatttgtagttggaggatgttgtgtagatagggtttttgtggtatttgtagtgtgaggatgttgtgtagatagggtttttgtggtatttgtagttggaggatgttgtgtagataggttttttgtggtatttgtagttggaggatgttgtgtggatagggtttttgtggtatttgtagttggaggatgttgtgtagatagggtttttgtggtatttgtagtgtgaggatgttgtgtagataggttttttgtggtatttgtagtgtggtatgtagtttttgtgattgtgttttttttggggtggatagtgaggttttgttattttttttttatattttagatggatgattttttttttttttatagagtagtgtggagtttagggaaaagtgtggaggggtttggtgtttttgtttttttttaggtattttggtgggaaggttttttatttagtaatttatagtttatttttgtttttttttttgttgtggggattttgtgtatttgttttttatattagtgtaggattatatgtgtagttttttatgttttgttttttttagagtttttatattatttttttttgtaattttatgttattgggatgtttgtttttgatattttgttatatgtttttttggaatgaagtggggtttttttttattttttgtgtttatagggttatttgatttttttttttgttttagggatttatttgtttggatttagttattgatgatgggttgtagttgggttatttgggtttttttgtttgggtttttatgattattgatttgttggtgatttgggtaagtttttttttttttttgggatttagttttattttgtagaaattggaggttttggtgggatgtgggtgtagtttttttgtgggaattttgttgggtggtagggtttagtagaggagtttttatagttagtgttttttatttagttgggttgttttttgttgtttagtattgttagtttttgattgtttagtgatttttaattgatgttttgttttttgttgtatggaggtttttgtggaagaaattgttatagtggtgggtatggtatgtggtaggtaggggaggatttatagtttttataaagaatattgtaaagtaggttggagattttatgagttggtttttgtttgtgtgttttattttatattaagggttttgaggtagtgtaggttatgtaggaagtttagggttgtggtgggggtgtgggaagtttagggttgtggtgtggttgtgggaagtttagggtagtggtgggggtgtgggaagtttagggttgtggtgggggtgtgggaagtatagggatgtggtgggggtgtgggaagtatagggttgtggtgtgggtgtgggaagtttagggtagtggtgggggtgtgggaagtttagggttgtggtgggggtgtgggaagtttagggttgtggtgggggtgtgggaagtatagggatgtggtgggggtgtgggaagtatagggatgtggtgggggtgtgggaagtttagggttgtggtgtggttgtgggaagtttagggtagtggtgggggtgtgggaagtttagggttgtggtgggggtgtgggaagtatagggatgtggtgggggtgtgggaagtatagggatgtggtgtgggtgtgggaagtttagggtagtggtgggggtgtgggaagtttagggttgtggtgggggtgtgggaagtttagggttgtggtgggggtgtgggaagtatagggatgtggtgggggtgtgggaagtatagggatgtggtgggggtgtgggaagtttagggttgtggtgtggttgtgggaagtttagggtagtggtgggggtgtgggaagtttagggttgtggtgggggtgtgggaagtttagggttgtggtgggggtgtgggaagtatagggatgtggtgggggtgtgggaagtatagggttgtggtgtggttgtgggaagtttagggtagtggtgggggtgtgggaagtttagggttgtggtgggggtgtgggaagtttagggttgtggtgggggtgtgggaagtatagggatgtggtgggggtgtgggaagtatagggttgtggtgtgggtgtgggagtgttggttttttggaggttaggataggattttttgtttgtttttagtttttaggttttatggagagttttttgatttattgaggttattgtttgttgtttttttgtttagtagggttttgtgttttggatttgttttatagttttttatattttattttgtttttattagtaattttagtggtttttgttttagtttttttgggttttgttttagggttttttggtgattatttgttaagtggataaagtaatgggtattgttgtggtttattgttaggtattatagggattatttttttagaggttgttatttttatggttaggtttttaaggtgtgttgaaggtgggagggttgggatggtttaagatgtgagtgttttgggggtttttgttagatttgtttgtagggattatgatgtttttattatggttgttgggtggtaggagggtagttttgtggggtggggatggttttatgtgtgtgtttt

SEQ ID NO: 2302 - DNA, 2500 bp, Artificial Sequence
  chemically treated genomic DNA (Homo sapiens)
ttgaggtaatttatgttgttaatgtagagtgaaggttagatattttataagaaatatgtaaatgtttttagatttagaaattttttttttattttatttgtttttttattttaagggaagttaatattttggaattttgtgtagatgttattaagaagaagaagaggggtttagaggtatgtagaatttagttgaaaaagaataatttatttatgtttgaagttttaaattagttttaattatttttgttaagagttgaggaagggatttaggagaaaggggattaaatttattttttttttttttatgaattttagtataatttgttttaagttaatttttattgaatgttgtgggttgattgttattttaagttatttgttttttttaaatattttaagaagtgttttgatttattttatagatgaagaaattgagatttaaagaggttaagtaattttttaagtggtgaatataggtggtagagaagattgaagatttaaattttggttgttagtttttaaaatttgaatttattattgatttttatggtattggtttggattagattatttttaatattttttttaattttgagattttaggattttttgatgttaggatattataaatttattataatttttttaaatttgttaaattaattttagatttttatgattatagatatgatatttttagaattaatatttaaattaaggtaggattattatatagaaaatataattgagtagaatttatttttgttatgttgttttttttagaattgattttaaaatatagtgttatgtttgttagagttagttatttgtaatgtgttagaattttgattttaggtaagtgttaggagttaaaatgtaggtttttttaaatttttaagtagttgtggtgttaagttgattttgatgagttgagtttttattgagtagtttaaatgattagattgtaattaggggttttatttttttatttatgaagtattagggtagttaaggggaaagattgatgtagaaggaatgaggtttttatgggttgggtttaaaagatttagagtgagtgtttagttgaaatatttgttaaaattttaaggaatatttatataaaaataagaagttgtttggtatagaagttagggtaggggatgttttttgaaggttatattttatggtaggtatatagtagtatgtttaaatatggtttttgttaaggttagagaggtattatttatatagaagaagttattattgtgattttatttattttgtgtttttattgtgtaattgaatgttgagtgtggatggtattttttttagtatttggttgtgttattgtgtttagttggtaagttttgggggagaagagaggtttagaaggaagattatttgagtttattagaataatgtgtgtttttaataaggtaggggtgtttaaatttagtaggtttaatagattaagttatgttatgaaggttttgtggattatttatttttgttaattagttattatttaaaagatgagaaaatgttagtttataggttaaatgggaggtatttagaagagatattaatgaagagatgtttggttttgtattaattattgtaggtaaattaatattaaatgttaggaagtaaagtagaggtatttttttattataaatttttgggataagtttagagattattagtagtttagggtttgtgtatgttgagaattgaggggataatagaattgtgtaatattttggtgttttattgtttttgttattaaattttatagtttatagtattgttttggtatattgggtttgtgtaatatttatggatttgatttggaattataaagtggatttagtttttgttatatttatttattttagtgattttgggtatatattgtgtttttgaaggaggtatagtggttataaatggaaatagtatttgtttgtttttggggattttggttatagatttttgaggtttttttgggagttagtttaagataatgggtaagagtatggattttgaaggtagagttttttgtttggaattttagttttgttattttttaattgtgtggttttaataagttatttagtttgtttgtgatttaggttttttatttataaaatgggtataatagtttttattttatagggttgttatggtgatttgtgggttaatattaaaggagattttttaattttagtattattgatatttggggttggataattttttgttttgggggttgttttgagtattatgggatgtttagtaatttttttattttttatgaattgttgtgataattaaaattgtttttagatattgttatatgttttaaatattttttaggggggtaaaattgtttttagttgagaattattgtattagattatgttgtagatataaatagttaaatattagtaattttatgtggtttaatttaataattataaagtatttaatagttaaaattt

SEQ ID NO: 2303 - DNA, 2500 bp, Artificial Sequence
  chemically treated genomic DNA (Homo sapiens)
gagttttaattgttaaatattttataattgttagattgaattatgtgaaattgttgatatttggttatttgtatttatgatataatttaatatagtggtttttaattggaggtaattttgtttttttaggaaatatttgggatatgtggtaatgtttggagataattttggttgttataatagtttgtagagggtagggaggttgttaaatattttataatatttaggatagtttttagaataaagaattatttggttttaaatgttaatggtattgaggttgagaaattttttttaatattagtttatgaattattatgataattttatgaggtaggaattattatgtttattttatagatgaggagtttgagttataggtaggttaagtagtttgttaaggttatatagttgggaaatggtagggttaggattttaagtagaggattttgtttttagagtttatatttttatttattattttagattggtttttaggaaagttttagaagtttatgattaaggtttttagaagtaggtaaatgttatttttatttatggttattgtgttttttttagaggtatagtgtgtgtttagagttattggggtgaatgaatgtaatagaagttgagtttgttttgtgattttaggttaagtttatgagtattatataagtttagtgtgttaaggtgatattgtgaattgtgagatttggtaatgggggtggtggggtattaaggtgttgtataattttgttatttttttagtttttagtgtatataagttttggattgttggtggtttttgggtttgttttaagggtttataataggaaaatgtttttattttattttttggtatttggtattaatttatttatagtaattaatataaagttagatatttttttattggtgttttttttaaatgttttttatttggtttgtgagttggtgtttttttattttttaagtggtgattggttggtgggggtaggtggtttataagatttttatagtataatttggtttgttggatttattgagtttgggtgtttttgttttgttaaaagtatatattgttttgatggatttagatggttttttttttgaatttttttttttttttaaggtttgttaattgagtatggtaatgtagttaagtgttggaagaagtgttgtttatatttagtatttaattatgtggtgggggtgtggggtgggtagagttatgatgatgattttttttatgtgaatggtgtttttttagttttaataggaattatgtttaagtgtgttgttgtatgtttgttatggagtgtggtttttgaagaatattttttattttgatttttgtgttgagtaattttttatttttgtgtgggtgttttttgaggttttggtaaatgttttaattaagtatttgttttaggttttttggatttagtttatgggaattttattttttttgtgttagtttttttttttgattgttttagtgttttgtgggtgagagaatgaagtttttggttatagtttggttatttgaattgtttagtaagaatttaatttattgaaattagtttggtattgtagttatttggaagtttgaaggaatttgtattttagtttttagtatttgtttagagttgaaattttgatatattataaatgattggttttgataaatatagtgttgtgttttagggttaattttgaaaagaataatatggtaaaggtagattttatttagttgtgttttttgtgtaataattttattttgatttaaatattgattttaaaagtattatgtttgtaattatagagatttagaattggtttgataaatttaggagagttataataggtttataatgttttgatattagagaattttagaattttagagttggaaaagatgttaaaggtaatttaatttaaattaatgttatggagattagtggtaaatttaggttttggaggttgatagttagagtttgaatttttaattttttttgttatttgtgtttgttatttggaaagttatttaatttttttgggttttagtttttttatttgtaaaatgggttaaagtattttttagggtgtttgagagaagtaaatgatttagaatagtagttagtttataatatttaataaaagttagtttagaataagttatattgaaatttgtaaggagaggaggaatgagtttggtttttttttttttaagttttttttttagtttttaataagagtagttaaagttggtttagaattttagatataagtgggttgtttttttttagttgggttttgtatgtttttgggtttttttttttttttttggtagtatttatataaagttttaagatgttagttttttttggagtgaagggataaataaagtaaaaaagaagtttttgagtttggggatatttgtatattttttatgaaatgtttggtttttattttatattgatagtatgagttgttttaa

SEQ ID NO: 2304 - DNA, 2780 bp, Artificial Sequence
  chemically treated genomic DNA (Homo sapiens)
tatgtagtttaagattgttagtaatttttttgtgaaaggtttttgggattgtgattttgaggattggtgagtgtttttttttgagagagtgagtgttgggtgtttggtgtaggtgttgttttgatttgttttttgtttgtaggttttggaattattggtttggtgtattgttgtttatgagtgtttttgtgtgtttgtggaattttgtggtttttttgatgtagtttagtggtatggagaaaggtagggttggggttgtgggatttgggttttggttttgtgtgtgttttattttgggttggtggttttgtttgattttgtttgtgtttttggggtgttttaggtttttgtgttggttgtataatggttgtggtggtgggtaagtgtgtatttgtttgtttggtttgatggttgtgttttgtttgttgttgttgttgtttgtagaggggtgtgggttttggggagggtttggggtgttggtgatttggggttttgggtatgttggtattgattggttggggaatattgagggtggttaagagttttttttttgttagggttttgtatggggtgttggagttttttggtggttttggttggttgtgtttattttttggttttttttgtagatgtggttgaggtttggtgagaattttagtgtgatgtgggtgggttagtagtgtttggggatttggtgtattttttgtagttgttggtttgggtgttaagttttttgttgtttggggttggtggtgttggtggtttagttttgttgtttggtgtgtttggaggttggtttagttttttgaattttgagttgtgtttggaggtgtttggtgtattggagttgttgtattattatttttataaatatttggttgttgtttatgattattattttggggttaagagttggttggtgttttatttgttgtttggtttgtgtggttatggttattatttgtatgtgtatttgtattattattattattttgtgagtttagttgttgtggttgttgttgttgttgttgtagttgttgtggttgttaatatgtatttgttggttggagttgtgttgtttggtttttatgattattgttttagataatatgggttttgttgtgtttttgttttggttttgtatagttttgaagtttgttgggtttggttattttgttttaagggtaagtaaggaatatgtttttttagttttaggggttattgtggttttttttttttttagttttgaagttatgggggtttttttgttatttttagttttttgggttattgaagtatttggttttttagtttttggagttattgtgggtttttttttggttttgagggttaagggggtttttgtttgttagtgttaaagtgtttggttggaggtggaaggaagtgatatttattgttttttttgagattgtgttgtttgtggtttggttggtagttgtagtgtagatagtttgagagttttgtttgtaggtggtgtagatatatgtagatattgtagatattgtagatattgttttggtgttgatttgataaatggttttgttttttttggaagttgtttgtgtgtttatttatttgtgtttagttagattgtgttgggaatttttgggatagtgagtttggggtagtttagggtttttagggtttttttagttttaatttttgttgattgtaggttggttttggttttatagtgttttgtttgttatgttttttgttttttgtttgttttataggggtttttattgttttttttttttttgaggttttttttgttaggtttgtgtattttttttatttttttattgttttgttttattttaatttttttagggttggtggtattgtttaggtgtgtattttgtttttttatttaaattttttttatttgtagttgtttttattttgggatttgggtttgtgttttggtttgtttttgggatagatgtttgtgtttttttatggaagttgggaagaagggttatgatagatattgttggttggtgttgggagggggagaagtttttgattgggatggggttatggaaagataaaaataggtagtattgttttgttagtattttttttgttggtttagtttaggtttgtatgttttttttttagtgattttatttgttgtgagtgtttttatggagtgatttggttagggggtataatgatagtagttatgagttattttgagatttgtgtatgaagtattttttttaggttaggtggttaagggatttttttttgttaatttaatattagggatggggtgagaggaattttttgatttttttttttttgagtgtaagtaggaagggttgatagttggttagtgttaaggttgttgatttggatataagatgaatgggaagtgtatgtggttgaggttttgttttttattttttgtgtttgttttagtgtgtttgtggtaattgttgttttttaggttatttggtttattattttatgtggtagtggtagtttgagtgttatttttttgagggtatagttaggagtttttagatgtttatttttgtggatttgttttttgtatatatgtttgttttggtggtgtgaagtgagtggggttttagtaattgaatggtaggaattatttttagaggttagtttagggtgggagggggtttttaggggttatttaaagttttaaagggtatttagtattagagagtgaggatttttgtagtatttgtttaggttttgtgagtatggttttggagatgtatttg

SEQ ID NO: 2305 - DNA, 2780 bp, Artificial Sequence
  chemically treated genomic DNA (Homo sapiens)
taaatgtatttttaaagttgtgtttatggagtttgggtagatgttgtagaggtttttattttttggtgttagatgttttttgaggttttggatggtttttggagatttttttttattttagattggtttttgggaatggtttttgttatttaattattaagattttatttattttatgttgttagagtaaatatgtatatgaaaaataggtttgtgagggtggatatttggaaatttttggttgtgtttttggagaggtggtatttaggttgttgttattatgtggggtgatgagttgagtggtttagaaggtagtagttgttataaatatattgggataggtatgggaggtgggggatagagttttggttatgtgtattttttgtttattttgtgtttaagttagtagttttggtgttgattggttgttagttttttttgtttgtgtttaggaagggagggattaaagagttttttttgttttatttttggtgttgagttaatggggagaggttttttagttatttggtttgggaaaaatgttttatatataggttttaagatgatttatggttattgttattgtgttttttggttaggttattttgtagggatatttatagtaaataaagttattaaggagggaatatgtgggtttgggttaggttggtaggggaaatgttagtagaatagtgttgtttgtttttgtttttttatgattttattttggttaggggttttttttttttttagtattgattggtagtgtttgttatgatttttttttttagtttttatggaaaagtataagtatttgttttgaaaataggttagggtgtaggtttaagttttagaatagggataattgtaggtgggaggaatttaagtaaaaaggtaggatgtatatttgggtggtattattagttttggggaggttgggatgagatgggatggtgggaaggtggggggagtgtataggtttggtaggaggggttttggagaggggaggggtagtgggagtttttatggggtgggtagagggtaggaggtgtggtggatagggtgttgtgggattgggattgatttatagttggtagggattggggttggggaggttttgagggttttgagttattttgggtttgttgttttgaagatttttaatgtgatttaattgggtataaataaatggatatgtaggtggtttttaaaagaggtgaaattgtttattaagttggtgttggggtggtatttatagtatttatagtatttatatgtatttatattgtttgtaggtggggtttttgggttgtttatattgtaattgttggttgggttgtgggtgatgtggttttggggagaataataaatattatttttttttgtttttgattgggtgttttggtattggtgggtggggatttttttggtttttggggttggggaaggatttgtggtggttttagggattggggaattggatattttgatagtttaaggggttgggggtggtgagggggtttttatggttttgaggttggggaaggggagagttgtggtggtttttggggttgggggaatgtattttttgtttgtttttggggtagggtggttgggtttggtgaattttggggttgtgtaggattggggtgggagtgtgatagggtttgtgttatttggggtaatagttgtaggagttgggtggtgtggttttggttgatgagtatatgttggtggttgtggtagttgtggtagtggtggtggtggttgtggtggttggatttatggggtggtggtggtggtgtggatgtgtgtgtgggtggtagttgtggttatgtaggttgggtagtgggtagggtgttggttggtttttggttttgagatagtggttgtaggtggtggttggatatttgtaggggtggtggtgtagtggttttgatgtgttgggtgtttttaggtgtagtttggggtttgggggattgggttggtttttgggtgtgttgggtagtgggattaagttgttggtgttgttggttttgggtagtgaggggtttagtatttgggttagtagttgtggaggatgtgttgggtttttgagtattgttggtttgtttgtgttgtgttggaatttttgttgggttttagttgtgtttgtggagagggttgaggagtgagtgtggttggttggggttgttgaggagttttgatgttttatgtgaggttttggtggagagaaggtttttggttgtttttggtgttttttgattagttggtgttagtgtgtttgagattttaagttgttggtgttttgagttttttttggggtttgtgtttttttgtgggtggtggtggtggtgggtggggtgtagttgttgggttgggtgggtgagtgtgtgtttgtttgttgttgtggttgttgtgtaattggtgtgaaagtttggagtgttttgggggtgtaggtgaggttgggtgaggttgttggtttggggtagagtgtgtatagggttggaatttggattttatgattttggttttatttttttttgtgttgttgggttgtgttggggaagttatggggttttgtgagtgtgtgaaggtgtttatgagtggtagtgtgttgggttggtggttttggggtttgtgggtgggaggtggattagggtggtgtttgtgttaggtgtttggtgtttatttttttgggggaggatatttattagtttttagggttatagttttggaagttttttgtgaagggattgttggtaattttgagttgtgtg

SEQ ID NO: 2306 - DNA, 2333 bp, Artificial Sequence
  chemically treated genomic DNA (Homo sapiens)
gtgtaaaaggaattgttggagggttttaatgatttaaattgaaaataatgataaaaagtttttaaggtattttttatttatatagtttaaaaaataattatgaaaaggaataagataatttaatggtttgattaatgaggtgttggttattgtgttgtgtgttggggtaggatggggttttatttggggtttgtatttttaagtttttatagagttttatattgattttaaggtggggttggttggagggatatttaagtttagtaaatataaatgtaaattgtatttttttgtgaaaaagatttgaaaaatattgtagtatttttaagttgtaatttaaagattgatggggtatattagggtttttgagatttttatgagagagatggtagtgaggtattggaggaggtttttgtaaaaggtttttttttttttattatttttgtttttatttgtattattatttttgagttagtgggtatgtgattatttatgtttgggaaaatttttttttagggtattattaaaagatatttttagatgaaattgatgttgagggaggaatttttgtttgtgttgtttttatttgtttaggtttgtaggggtgtgggtgtggggttatgtgggtgtgtttgggggtttgtggaggatgggggagggttgtaggagaattttttttgttttttaattttgaaaagtaaaatttaatttatttgtttataaaatattagttattgttttattttagtttattgttattttgtaggtttgggaggattttgttgaaggaaaaaaaaaatgttttaagtatttaaatatgttgagttatgtatgtatttgtttatagtgttgtgggttgttttttttttttttttttttttgttttttttttttttttttttttttttttattaaagtatatttattaaattgttgagttggaaagatttgtaatgagtttttgagttgtatgattgtgttttttttttttttttttttgttttttttttttttttaaatttttatttgatattaaataaagtaaattttaaatagattaattgttgtatggttttgttttgtttttttagtttgtttttaggtttggtggggggttgggttgtggtggtggtagtggtgggagatgttggggtggttggtggaggtttatgtggtgttttaggtgggatgttagtgttttgaaggtggaggttttggttttttttttttgtggtttgggtatggtatttttttagttttatgtgatggttgtttggtggtattagtatagttggtttattattgaggtggatgagtatagttttaattttatttaggtttttattttttataatattaattagggttgtttttagttattgtatgtgtagatgtaagtgggattggtggggtgggggtgggggtggtgatggttttttggggtgggtgtatggttttgggtgttttttggttttgggggtattgtaataagtattgaatgtttgttgattgtaataattttggaattttaggattattggggttttgagttgggagggattggtaagaagttgtagatggatggtttgtgggttgattttggttgtagttttgttttatttggttaggagtatgttttataaatatttaaagatgaggtggatgtatagaaaattttagatttttggttttattttataaaatttaaaggtttggaaattttaggtttatatgtttttttggtagtgtttggtgggggttatatttttgattttttttttggtatttgggtggtgatttttggtttgatttatgttttttattgtatatatggggagattgagttttagagaggggaaggggtttgttataagttttatggtaggttaggatattagttttgggttttttgttttttttttttgtttttttttttgtttagattttgtgttttttttgtgaaagtagagatgtttttttaaaaggattgggggattttgttgtttgttttttggggtattgggggtgtttaagtagtgaggttttggggagtatatagatttaaggtttttgtgagtagtaggaggatttgttttgatgtttgtgtgtggggttagtttttttttttttggattttttgaggatttggaaagttgtgggtagtttggggtggttttagaggtggttgagtttttggttttgttttgggtggttttttgagtttttggagtttttttttttttttatttttattgttttttttatgagttttgtatgatagagtttatttggtgaggaattaggggtttaggtttgtgaggtgttttattttg

SEQ ID NO: 2307 - DNA, 2333 bp, Artificial Sequence
  chemically treated genomic DNA (Homo sapiens)
tagggtggggtattttatgggtttgggtttttggttttttattaggtaagttttgttgtgtagggtttatgggagaagtaatggggataaaggaggaggggggttttaggaatttagggaattatttagagtagggttaggagtttgattatttttggagttattttaagttatttatagttttttaggtttttgggaaatttagagagggaaaggttggttttgtatataggtattaggataagtttttttgttgtttatgggggttttgagtttgtgtgttttttagggttttattgtttgagtatttttaatgttttgaggggtagataatagaattttttagtttttttggaaaagtatttttgtttttataagagaagtatagggtttggataaaaggaagggtagggaggggaaataaagagtttaagattggtgttttaatttgttatggggtttgtggtgagtttttttttttttttggggtttggtttttttatgtgtataatgaggagtgtaaattagattaggggttgttatttaaatgttaagaaagggattgggaatgtggtttttgttagatgttgttaggaggatatgtgggtttggggtttttaggtttttgggttttataaagtgaagttagaagtttggagttttttgtgtatttattttatttttaaatatttgtaaaatatgtttttggttaagtgaaataggattgtggttagaattggtttataggttatttatttgtaattttttgttggttttttttaatttagagttttgatgattttagaattttagaattgttgtagttaataaatatttaatgtttgttatagtgtttttagaattaggaggtatttgagattatgtatttattttagggggttgttattgtttttatttttattttattggttttatttatatttgtatatgtggtggttggaagtggttttggttgatgttgtagaaggtgaaggtttgggtggggttggagttgtatttgtttattttgatgatgagttggttgtgttggtgttgttgagtggttattatgtgggattgggagaatgttatgtttaggttgtaggggaggagggttagggtttttgtttttaggatgttggtattttatttagagtgttatatggatttttgttggttgttttggtattttttattgttgttgttattgtagtttggttttttgttagatttggaaatagattgaggagatggagtagaattgtgtgatagttaatttgtttgggatttgttttatttaatgttagatgaagatttagaaagagggagagggtggggggagaggaaaaaaaaatatagttgtatagtttaaaaatttattataaatttttttaatttagtagtttgatgaatatattttggtaaaaagaaaagggaagggagggaggggataagaaaaaaaagaaaaaaaaaataatttatagtattgtggatggatgtatgtatggtttaatgtgtttaaatatttaagatatttttttttttttttaataaaatttttttgagtttatagggtgatagtgagttggggtaagataatggttggtattttgtaaataggtgagttaagttttattttttagaattggggaataggaaggatttttttataatttttttttattttttatagatttttaaatatatttatatggttttatgtttatatttttgtaagtttgagtaggtggagatagtatgggtgaaaattttttttttgatattgattttatttaaagatattttttagtggtgttttgagaagggatttttttagatatagatggttatatatttattggtttaggggtggtagtgtaggtaggggtagagatggtgagggaggaggaattttttgtaaaaattttttttgatgttttattattattttttttgtaaggattttgggaattttaatgtgttttgttaatttttgaattgtagtttgagaatgttgtaatattttttaaattttttttatggggaagtgtagtttgtatttatatttattggatttaaatatttttttaattgattttattttggggttagtgtagaattttgtagaaatttggaaatgtaggttttaggtgaggttttattttattttaatatatagtataatggttgatgttttgttagttagattattgagttgttttgtttttttttataattattttttaaattgtgtaaatgggaaatgttttgaagattttttgttgttgtttttagtttgggttattaagattttttaatgattttttttgtgt

SEQ ID NO: 2308 - DNA, 2567 bp, Artificial Sequence
  chemically treated genomic DNA (Homo sapiens)
attatttttgtgttaaaatgtttttgtaattagtagttttggaagataaattgaaatatgtgattttttagggtttagttggttttgggattgaattttagtgtgtgtgtgttttagggtataagtatgtgtgttttaggatatgtggggtgtaagtgttttggggtatatgtgtgtgttttagggtatattgggtgtaggtgttttggggtatatgtgttttaggatatatggaatgtaggtattttggggtatatgtgtgtgttttagggtatattgggtgtaggtgttttggggtatatgtgtattttaggatatatagtgtgtaggtgttttggggtatatgtgtgttttagggtatgttgggtgtaggtgttttagggtatatatgtgttttaggatatatggagtgtaggtattttagggtatatatgtgtgttttagggtatgttgggtgtaggtgttttggggtatatgtattttaggatatatagtgtgtaggtgttttggggtatatgtgttttagggtatgttgggtgtaggtgttttggggtatatatgtgttttaggatatatggaatgtaggtattttggggtatatgtgtgtgttttagggtatgttgggtgtaggtgttttggggtatatatgtattttaggatatatagtgtgtaggtgttttggggtatatgtatgttttggggtatgttgggtgtaggtgttttggggtatatgtgttttaggatatatggagtgtaggtattttagggtatatgtgtgttttagggtatgttaggtgtaggtgttttggggtatatgtgtgttttggggtatattaggatgtagattttttattgggtgtaaagtttttaattttttttttgagttattagagtatggtttttagattggagtagtttttttttgggttaggtagggtgtggattttgttttgaatgtatttagtttttagttgattttgtttttttttttatttattgtataggtaggtgttgtaggttgtagggagggtgtgtgttttggtttttttgttttgtgtttagtttgggaagtgttttaagattattttgggagaggtttgggttgtggtgtttttgtttttttgttttgtgtaaggttggggattttgtttttttggagtgagggtgtttggtaggtattagtggttagtagtagttggggttgggttttatttgaggattgaggtgttgatgaatgtttatgtttggaagatattggttttttggtttatgtatttatttaattttaagttaggttttttagatttttaaattaatagtggattttgtaaattgttgtgttagaggaaaatttaagtgagtttgattgtgggaagtattgttgttatgaaaggtggtggtttagtgttatttgttgggatgtggtagttaagggagttggtgttgggggaggtttgaggttttgggtttttgggaggaaatagagttgtttgtaggaataaaggaggaaaggagggttatggttgtttgaagaatttttatatgaaaggtatgaaattagttggaattattttaaggaaaaaatttttttttaaataggtgtttttgtgtttagtagaagtgggttttattgttattgagtatggtttggggtttgtggggttgtttttagaattggagggaagtaatttagttgtatataagaggttttggggagaggaattttttagggtttggagtttttgtttgagttgtgttatatttgttgggttggaagtttttatttagtgggagaaatataatttttggttttggtgtttgtggtagtaaaatttttatttttgtaaagttattgggtggaggttaggttttgtaagaggtttttttttgttggaggaagttttgggtttttggggattttgtaggaggtagatgttggggatagggtttggtttatgggtagttgtgtttttttttagttttggtttttttgttttttttgttttttttgatttttttattggtttttattgtttatagggtgttgagttagtagtagaaattgaggtggagatagtttttggtttttaaaatttgtgaaggagtttggattttgggaaggtattgaggattgtttaggattttagaaaaggatgatagttaggtttttttttttttttttttgttttttaagttgttgggttttttggggggggggggttttgttgttgttttgagatagagttttgttttgttttttaggttggtgtgtagtggtgtgattttggtttattgtaatttttattttttagttttaagtgatttttttgttttagttttttgagtagttgggattataggtgtttgttattatgtttggttaatttttgtatttttagtagatttaggttttattatgttggttagtttggttttaaatttttgattttaagtgatttatttattttagttttttaaagtgttgggattataggtatgagttattgtgttttattgtgttttttaaatgttgatggtagtttagttgttttttattttaataaatg

SEQ ID NO: 2309 - DNA, 2567 bp, Artificial Sequence
  chemically treated genomic DNA (Homo sapiens)
tatttattgaaatggggggtaattgagttgttattaatatttgaaaaatatggtggggtgtagtggtttatgtttgtaattttagtattttgggaggttgaggtgggtgggttatttgaggttaggagtttgagattagattggttaatatggtgaaatttgaatttattgaaaatataaaaattagttaggtgtgatggtgggtgtttgtaattttagttatttaggaggttgaggtaggaggattgtttgaaattaggagatggaggttgtagtgagttgagattgtattattgtatgttagtttgggagatagagtgagattttgttttaaaatagtaataaaattttttttttttaaaaaatttaataatttgaaaaatgaaggaaggaaggaagggatttggttgttatttttttttgagattttgggtagtttttggtgtttttttagggtttagatttttttatagattttgagggttgaaggttgtttttattttagtttttgttgttggtttagtgttttgtgggtagtgggagttggtggggggattagaaagagtagaggaggtagggaggttaggattggggagggatgtagttgtttgtgggttggattttgtttttagtgtttgttttttgtggggtttttgagggtttagggttttttttagtaaagggaggttttttgtaaggtttggtttttgtttagtggttttgtagggatggggattttattgttataaatattagagttagggattgtgttttttttgttgagtggaggtttttaatttagtaggtgtgatgtagtttgagtggggattttaggttttggaggatttttttttttaggattttttgtgtgtagttggattgtttttttttggttttgaaaatagttttgtagattttaggttgtgtttaatggtaatgaaatttatttttgttaaatgtaggagtgtttatttggaggaagattttttttttgaaatgattttaattaattttatgttttttgtgtaagaattttttgaatagttgtggtttttttttttttttttgtttttgtaaatagttttgtttttttttgaggatttgaggttttaggttttttttgatattggtttttttggttgttgtgttttggtaggtggtgttgagttattgttttttatggtgatggtgttttttgtgattgggtttgtttagatttttttttgatgtaataatttatagaatttattgttgatttagggatttggggagtttaatttaaaattaagtaaatatataaattagggagttagtgttttttgaatatgagtgtttattggtattttggtttttgggtgaggtttggttttggttgttgttggttgttggtgtttgttggatatttttgttttgggagagtaggatttttggttttgtgtggagtagagggatgaaggtgttgtagtttaggttttttttagggtggttttgagatattttttagattggatatggagtgggaggattgagatgtatgttttttttatggtttgtagtgtttgtttgtgtagtgaatggagggaggggtagaattggttggaagttgagtgtatttagggtagggtttatattttgtttggtttgaggaggggttgttttgatttgggagttgtattttggtggtttggggaaggagttgggggttttgtatttagtaagagatttgtattttggtgtgttttgaaatatgtgtgtgttttaaaatatttgtatttggtgtgttttgaaatatgtgtgtgttttgaaatatttgtattttgtgtgttttgaaatatgtgtgttttgaaatatttgtatttggtgtgttttgaaatatgtgtgtgttttaaaatatttgtatgttgtgtgttttgaaatatgtgtgtgttttaaaatatttgtatttggtgtgttttgaaatatatgtgtgtgttttgaaatatttgtattttgtgtgttttgaaatatatgtgtgttttaaaatatttgtatttggtgtgttttgaaatgtgtgtgttttaaaatatttgtatgttgtgtgttttgaaatatgtgtgttttgaaatatttgtatttggtgtgttttgaaatatatgtgtgtgttttgaaatatttgtattttgtgtgttttgaaatatatgtgtgttttgaaatatttgtatttggtgtgttttgaaatatgtgtgtgttttaaaatatttgtatattgtgtgttttgaaatatatgtgtgttttaaaatatttgtatttggtgtgttttgaagtatatatatgtgttttgaaatatttgtattttgtgtgttttgaaatatgtgtgttttgaaatatttgtatttggtgtgttttgaaatatatgtgtatgttttgaaatatttgtattttgtgtgttttgaaatatatatgtttgtgttttgaaatatatatatattggggtttagttttgaggttggttggattttgaaaaattatatattttaatttattttttagaattgttaattataaggatattttggtataagagtaat

SEQ ID NO: 2310 - DNA, 2312 bp, Artificial Sequence
  chemically treated genomic DNA (Homo sapiens)
agtgaatgagtgtttttatttttttttgatatatggtttaagtgtatagtttaatgaattatttgttttttatttagttagtatttgtttagaggttgttattattttgattgttaatagtattaattggttttgtttgttattgaatttttttgtttttttttttttttttttttttttttttgagatggaatgttgtttttgttgttgaggttggagtgttgtgatgtgattttggtttattgtaatttttgtttttaaggtttaagtgatttttttgttatagttttttgggtagttgggattataggtgtgtattattatgtttggttaagttttgtatttttagtagagatggggtttttttatgttggttaggttggttttgaatttttgattttaggtgagttatttattttaattttttgaagtgttgggattattagtatgagttattgtatttggttgtgtttttgaattttttatatatagatttatttgggtttttgtgtgtttagtttttgttttgtgttagttggaggtttttatttgtgtagttgggtgtgattatttattttttttagttgttaatgtttggattttggatttttttttttgttgtgggtttgttgttattgtttattttgttttttttttaggtttttatttttgggtaggagagttgttgattattttgggggtgttttttttgtgtttgaatatttatagttgtttttgaggggttgggagttgggtttttgggagagatgagttatgaattttttatagtttttgtatttggggattttattttaggagagtgttatttatagtttttgttagggtaaaggagttgagtagttattttaagtttagtttattttttttttttggtttttggtaggtatggattagtagttgtgagtagttagagttgatgtttggtttttaggggggtagaggtgttgttattatgagtttgggtaagtttttgtttgtgggttgggtgtttagtttatagggaaagaggtggttgattgtagatatgattagttatttatttggggatttttgttatattatgtatgtgggttgtggtggggatgtttttggggatatgtttttttttagtaattatggtggtagttttgggagtatttattgtttattttgtagttttttggttaagaagttgtagttggtgtggagggtgggggtgtttttttggaggatggtatttttttttgtattttttttggttttattggttattttttttattattaagaatgttatttttttgttttagtttaattaggttgtttatgatagttttgtggttggtaagtttagttttgatagtagttttattagttttatggatggttattttagttatggtgagggtttgggttattttggtttattttttagaggttgaggttgaggtttagaggggtttagtggtttttttaagttttaagtgagttttaagtgattatagaggttaggtttagattttatattatggatggggagggggtgtagtggtgggaataagttgattttttaaaatatttgaggttgagagtgaggaggtggagtttgaattttagttgttttttatttgttgtgtgatttgggtaagtatatttttttttttgggttttagttgaattagttatttatttatttttgttttttttaattaaagttttttttttatgttggaatgatattatggagaggtgaagggtttgggttttagattttaatttagttttgtttgaattttaggaagttagttgatttttataagtttaagtttttgtttggataatgagttttttggggttattgttaagatttagtgttaggagaggtgtaggggggttgatatttagtaggtgtttaggatattggagttgttgttatttgaatttggttttttgtaatttgataaatttgggaaattatttataggaattgtaagttataggtttttttgtttagttagaagtgttattttggttgtttggttagagtttatttgagaattatgggtttttgttgttatttggtggttattttttgttttgtgggagtggttttaatatttttgttttaggtggttgtttagaattgtattgaggattggtttatagaaatttgattttgttttaggtttgtagttttggaagtaggggttggatatgtttgttttttatttttatatagttagattttgattgttggttttattttgtgtttataaattagtttatgtgttatgggtttatttgtagttattg

SEQ ID NO: 2311 - DNA, 2312 bp, Artificial Sequence
  chemically treated genomic DNA (Homo sapiens)
tgatggttgtaggtgaatttatagtatgtgagttggtttgtggatataggatgggattagtaattagggtttgattgtatagaaatgaaggatagatatgtttagtttttgtttttaggattatagatttgagatagaattgggtttttgtggattagtttttagtgtggttttgagtagttgtttggggtaggggtgttagagttatttttgtaaggtagggagtggttattaggtggtagtaggggtttatggtttttaggtgagttttgattgaatggttaaggtggtatttttggttgggtaggaaggtttgtggtttgtggtttttgtgagtggttttttaaatttgttgagttataggaaattaagtttagataataatagttttagtgttttgagtatttattaagtattagtttttttgtgttttttttggtattgaattttagtaatgattttgagagatttattatttaggtgaggatttgaatttatagaggttaattgattttttgaaatttaggtagaattggattggaatttagagtttaggttttttatttttttatgatattattttgatatgaggggaaggttttggttgaagggggtaagaatgggtgggtgattggtttagttaaggtttagagagggggatgtgtttgtttaggttatatagtaagtgaggggtagttagaatttaaattttatttttttatttttaattttaggtgttttggggagttagtttgtttttattattgtattttttttttatttatgatgtggggtttgggtttgatttttgtggttatttggagtttatttggagtttggaggagttattgaatttttttgggttttagttttagtttttgaaaagtgggttaagatggtttaggtttttattgtagttggagtggttgtttgtggagttggtggggttgttgttgaagttgagtttgttaattatgaggttgttgtaggtggtttggttgagttggggtagggagatggtgtttttgatgatgggggagatggttggtggagttggggagggtgtagggggagatgttattttttgggggggtgtttttattttttgtattagttgtagttttttggttaggaagttgtggggtgagtgatgggtgtttttggagttgttattgtggttgttgaggaaggatgtgtttttgaagatatttttgttatggtttatatgtatggtgtggtggaagtttttgagtgggtggttgattatgtttgtagttagttgtttttttttttgtgaattggatatttagtttataggtgagagtttgtttaggtttatggtggtggtgtttttgtttttttgggggttgggtattagttttggttgtttatagttgttagtttatgtttattaggggttgggggagggaggtgggttgggtttgggatggttgtttagtttttttgttttggtggaagttgtaaatggtatttttttaaggtgaggtttttaaatgtagaggttgtggggggtttatggtttgttttttttaggggtttggtttttagttttttagaagtagttatagatgtttaagtgtagagaaagtatttttgaggtggttggtaatttttttgtttagaggtggagatttggaaggaagatagaatgggtggtgatggtaggtttgtgatagaggaggaaatttggggtttaaatattagtagttgaagaggatagatgattatatttaattatatggatggaggtttttaattgatgtggggtagaagttaggtatatggggatttaagtgagtttgtgtatagaaagtttaagaatatagttgggtgtggtggtttatgttggtaattttagtattttgggaggttgaggtgggtggtttatttgaggttaggagtttgagattagtttggttaatatagagaaattttgtttttattaaaaatataaaatttagttggatgtggtggtgtgtatttgtaattttagttatttaggaagttgtggtaggagaattatttgaattttggaggtagaggttgtagtgagttaagattatattatggtattttagttttggtaataagagtaatattttgttttaaaaaaaaaaaaaaaaaaaaaaaaaaaaataaggaagtttagtaataggtaaaattaattgatgttattagtaattagaatgatggtagtttttgagtaggtattgattgaataggggataaataatttattgagttatatatttaagttatgtattaggaaaaaatagaagtatttatttatt

SEQ ID NO: 2312 - DNA, 2439 bp, Artificial Sequence
  chemically treated genomic DNA (Homo sapiens)
tattatttattagagggttgatgtttttgttagataggttatagttagtggaggtattgtttttgattagtttgttgtttttgataaggtagttttggttaattttataaatttgaatgaataagaagggtgtaaggttggggtattagggataaataatttagatatgttagtgtgttgatttgtaaagtatgttagaaggtagttgaggttttagttttagttatagtgtattttaaggttagagtaaaaagttggttggttttttaggtttttttttgtaaggtggttgggttaaaattaaagattttgttgtataatataggtttgttatttttttggtggtggtattagggattaataagattagtatttttagttatattagttagttttattatagttattttataggatggtattttataaattattaagatgggttagaattgattatgagaagtaagttattgatgtttatgtgatgtataagttatagttagtgaagtagtattgataggtatagaaattttattttttattatgggggtttttttttatttttagggagttatttttagaattttatttttttgttgattttagtgtggtgatggtagtttttttgtttagtgtgtgttatagagaaggttatatgagtaggatgttatgttttaatataggttattttgtgtaggttttggtgggttttgtggggtagttttttggtgtgttaatgattggtgatttttggaatggatatatattattttattttagtgtttagtattttttattgatttttttttgttatttagtaattattaattatggttgggttatttgagggagtgataagattattttatgtgtattatttataggttttttttgttaagttggataggttttgggggtgttattttgaatttaattttgaatgggtgttttttaaggtatttattagtttaagtttttttatttatagggattgattaatataattttaagtttttttttgtagttattagtaggttataaagagtaaagggtttaggaatgtgttaagaagttgttttttggttttttgttattttagttatttttgattataaggttgtttttagaaggaaggtagtagagaatggttttatattgtttgatttgggtgttgtatttagtgtttattttgagttttattaatgaatagttgggtttgaaattattttttttttaggtttgtatagtaatttaagttattgtaaagtttatttttgtagtttttgtttttggttattttgatgatgttgattattttattttgtttaaatatttggtttataggtatttgttgtttaagttttttgtgggtttagtttagttttttggttatagtgtttttgtttatttggatttttattaggtgggtttttttttggtgtagaggaagtaggtgtatttaggagaaggtagatatagtttagttttagttgttagtgttttttttatagtagaggaattgtagttttatgtggtttgattgatgttaagtatatggtaaaaagttagtaattttgaataagttattgaattttattaagaggaaggaatttttatttttgttaatagtaataatttaattttggatattggtgtttgagttattgttaggatgagtggataagatttatattataggtaaataattagattttagtttttattagtttaatgtttttgtggttgttttttgggttagttttttttggggtattgtagtggttttattttagttatttatatttgttttagtgataagtttgtttttgagagagtataagttttaagtaagaaaatgtattattgggagtggtggtttatatttgtaattttagtattttgggaggttgaggtaggtggattatttgaggttaggagtttaaaattagtttgattaatatggagaaattttgtttttattaaaaatataaaattagtagggtgtggtggtgtatgtttgtaattttagttatttaggaggttgaggtaggagaatagtttgaatttagaaagtggaggttgtagtgagttgagatagggttattgtattttagtttgggtaataagaatgaaattttgtttttaaaaaaaaaaaaatgtatttaagtataaagtttttatttaaggatagtttggtaatgttttgataaaattttaatggtggatatgtatttttatttgtggtggtttttattatatggggttgtatttagtatttgagattagttaggataattagtaataggatagtaagaggtatttattttaattaagttaataaaaagtttgtttagtttattaattaggtttttaggagagtagttagtattttataattgatttttaggtaggtattttagtgttattggtgagttatta

SEQ ID NO: 2313 - DNA, 2439 bp, Artificial Sequence
  chemically treated genomic DNA (Homo sapiens)
tggtgatttattagtaatattgaaatgtttgtttgaaagttggttgtgaggtattggttgtttttttggaaatttagttgatgagttgagtaggttttttattgatttggttagagtgggtgttttttgttgttttgttattggttattttggttgattttaagtgttgagtgtaattttatgtggtgagggttattatggatgagagtgtatgtttattgttgaaattttgttaggatattgttaggttgtttttgagtgaaagttttatgtttaaatgtatttttttttttttagagatagaattttgtttttgttgtttaggttagagtgtaatagttttattttagtttattgtaatttttattttttaggtttaagttatttttttgttttagttttttgagtagttgggattataggtatgtgttattatgttttattaattttgtatttttagtagagatggggtttttttatgttggttaggttggttttgaatttttgattttaggtgatttatttgttttggttttttaaagtgttgggattataggtgtgagttattgtttttggtgatgtatttttttatttagagtttgtgtttttttaaaagtaggtttgttattagggtaagtgtaggtggttgaggtaaaattattgtagtattttaaaaggaattgatttaaaggatagttataggaatattgggttggtaggggttgggatttggttgtttgtttgtggtgtgggttttgtttgtttattttgatagtaatttaggtattagtatttaaagttaagttgttgttgttggtaaaaatgaaagttttttttttttggtgaggtttagtgatttgtttagagttattggttttttgttgtgtgtttgatattaattaggttgtatggagttgtagtttttttgttgtgggaggagtgttggtagttggagttgagttgtgtttatttttttttagatgtgtttgttttttttgtgttagaagaaggtttatttgatggagatttaggtgaatggaggtattgtggttgagaagttggattgggtttgtgagaggtttgagtagtaggtatttgtgaattaagtgtttgggtaggatgagatgattgatgttattggggtgattaagggtaaaggttataaaggtgagttttgtggtggtttgagttgttgtgtaaatttgggggagaagtggttttaggtttagttgtttgttgatgaggtttagagtgagtgttgggtatagtgtttgaattggatagtgtagaattattttttattgttttttttttgagaatagttttgtggttagaagtggttgggatagtggagggttaggggataattttttaatatgtttttggattttttgttttttgtagtttattgataattgtaaaggggagtttggaattatgttagttagtttttgtgaatgggggagtttaaattaatggatgttttaaaaagtatttatttagaattgagtttagggtgatatttttagagtttatttagtttgataggggagatttgtgggtaatgtatatgaaataattttattatttttttagatgatttagttatggttggtaattgttgagtagtaggaaggggttagtgggaggtgttgggtgttgaggtgaagtaatgtgtatttattttaggggttattagttgttggtatattaagaagttgttttgtaagatttattgaggtttgtgtaaggtggtttgtattggggtatggtattttgtttgtgtagttttttttgtggtatgtgttgggtagaaaggttattattattgtattgagattaataagaaggtgaggttttgagagtggttttttgggggtgggaagaggtttttgtgatggggagtggggtttttgtgtttgttagtgttgttttattgattgtagtttatgtattatgtggatattagtggtttgttttttatggttagttttggtttattttgatgatttgtaaggtgttattttgtagagtggttgtggtggggttgattggtgtggttggggatattagttttattggtttttgatgttattattaggggggtgataggtttgtgttgtatagtaggatttttagttttagtttagttgttttatagaaaggaatttggagggttagttagttttttgttttgattttgggatatgttgtgattgggattgaggttttagttgttttttagtgtgttttgtaggttagtatattggtatgtttgggttatttgtttttaatgttttagttttatattttttttgtttatttagatttataagattggttagggttattttattaaggatggtaagttgattaagaataatgtttttattgattatgatttatttgataagagtattaattttttggtaagtaatg

SEQ ID NO: 2314 - DNA, 2453 bp, Artificial Sequence
  chemically treated genomic DNA (Homo sapiens)
atatatttttagaaggataagggagagtggatgttggaaagatagagtgagagattattattagggaaagattttatttttggaaggatattaaatttgggggggggttggtagtggagttgttgtttttttttttgtatttaatagttttaattttggttttttttatttttagttttttttttttttggtttttttattgttggtttttgtaagttttttttttattttttgtttaatatattttttagtttaaagtaaattatttttttttattttttatattttttagttttttttttttttttattgtaggttttagtgtttttgttttttttttggtgtatttgttatttgtattaattttttttttgttgtgtttagttatataaatgttaaagttattaatatttagttttataagttttattttgttttttttatttttttaataaaatgtttgtattttggttaggtgtggtggtttatgtttgtaattttagtattttgggaggttgaggtgggtagattatgaggttaggagatggagattattgtggttaatatagtgaaattttgtttttagtgaaaatataaaaaaattagttgggtgtggtggtaggtgtttgtagttttagttatttgggagattgaggttggagaatggtgtgaatttgggaggtggagtttgtagtgagttgagattgagttattgtattttattttgggtgatagagtgagattttattttaaaaaaaaaaaaaaaaaaaaaaaaaagtttgtattttgttttggtttgtgtttggtatttttgttttggtggttgtattgttttggggttattggttttggtttggttgtagtattttatggattttggtgagaaagttgagttttttttttagtttttgagtttgtttttttagttttttagttgattttgattttgtttttttaagtaagtgttttgatttatatgtaaggttgattatatttagtagaagtaagatgtttttagtggttgtatttatgattatggtttttttgtttattgtttgggtggggtttttaataatttttttaatttgtttattgtttttagttgagatttgtttaatgatatgtgggggtggggtatatgtttttaattgagggttggttttggtttgtttgatggtatggatgttttttttaattttttgtgtgatttggtattaattgttaattaaggtaagaatattgggtgtgtttttatttataaatttttttattatttttgttatattggtgttgttttggtttaagttgtgggtttgggtttgtgtttgtaatttgtttattagttttattatattgtaggtaattttagttatagtagttgttgtttttagatttatgttagtgtttaagagtataaaattgattttttttgtgaagggtgttagatttaggttgaggagggttaggatgttagaggtagtgttaatagagttggatattatattggtaatggtggtgtttttgtggatttgtttaattttttttgtaagggtatggagtttttttatgtgatttttaagttttttttttaattgaggaaatttttttaaaaattattgtttgtgttgttggtttttattgtggtggtttttgttttttatgattatgtgatttgtaagtttgtttagagttttatggagtttatttgttttatttttgtataaggaaaggttaaaggattaagaaatgtagtttttttatttgtgaaatgagttttatgtgatttttattttgtgtaaattgtagagtttttattattaattaaatagaaataaattttataaatggaattaattattttttaaatttaaatatattttgtttattatagatattttttagtatttattttatatggaaataaatattttaaaggtattttagatgtttttttatggtaggtgtttgataaagatgtttttttatttaagggtaggttaatattgtgattgttaaagtgtttggagagggaaaattttgtagatgaataaagagtagtgagagtgagataaagagattttattattaggatggtaggaaagtgaagtatgaattttatttaaagagaggttttttttttgtttttagtttttgggaagtgatttttaggtttttggaatgttttgtttggtaggaatatttttttttgtttggtgatttggttatgggatagtatagtgatgtgatggatgatagggtttggggttatttggtgttttttttgatttttagaggatttggggattaaaggtgtgagattttagggaagggttggagattttagttatgagggtagtttgtgatttagttttagtagatattttggatattaaggtatgggttgagaaagaaggattttttttttgattaattttagttgggttttttagagt

SEQ ID NO: 2315 - DNA, 2453 bp, Artificial Sequence
  chemically treated genomic DNA (Homo sapiens)
gttttgaagagtttagttggagttggttaaggagaaagttttttttttttaatttatgttttagtgtttagagtatttgttggggttggattataagttgtttttatggttagagtttttagtttttttttgagattttatatttttagtttttaagttttttggaagttaggaaagatattaaatagttttaaattttattatttattatattgttatattgttttgtggttaaattattaggtaaagaaagatgtttttattaggtaggatattttaggggtttggagattattttttaggagttgaggataaagggaaggtttttttttgggtaaagtttatgttttatttttttgttattttggtaataaggtttttttgttttatttttattgttttttgtttatttgtagagttttttttttttaaatattttggtagttatggtgttgatttgtttttgagtgaggaggtatttttattaaatatttattatgaaagagtatttgaggtgtttttaagatatttatttttatatggaataagtattgaggaatatttatgatgaataaaatgtgtttgagtttgaaagataattaattttatttgtaaaatttgtttttatttgattgatagtgaaagttttgtaatttatataggatagagattgtatggagtttattttatagatagggaaattgtattttttaattttttaatttttttttgtgtagggatgaggtagatgagttttgtaaagttttgaataagtttgtaagttatatggttatgaaggataaaaattgttatgataaagattagtagtataggtagtggtttttgaaagagtttttttggttgaaaagggagtttgaggattatataaggaagttttgtgtttttgtagaggaggttgagtaggtttatagaggtattattattgttaatgtggtgtttaattttgttggtattatttttggtattttgattttttttggtttgggtttggtattttttatagaaggaattagttttgtgtttttggatattggtatgggtttgggagtagtagttgttgtggttgggattatttgtagtgtggtagaattagtaaataaattgtgggtatgagtttaagtttgtaatttggattaaagtggtattaatgtagtaaaggtgatgaaggagtttgtgggtgggaatatatttaatgtttttattttagttgataattggtattaagttatataagggattgggaggaatatttgtgttattagatgagttagagttaatttttagttaggagtgtatgttttatttttgtatattattgggtgaattttagttgaaggtggtgaataggttgagagggttgttgaaggttttgtttaggtaatgagtagaggaattatgattgtgggtgtagttattggaggtattttgtttttgttggatgtggttagttttgtatatgagttaaagtatttgtttgagggggtaaagttagagttagttgaggagttgaagaagtgggtttaggagttggaggggaagtttaatttttttattaagatttatgagatgttgtagttaggttaagattaatgattttagagtagtgtagttattagggtagaaatgttgggtataggttaggataaaatgtagatttttttttttttttttttttttttttgagatggagttttgttttattgtttaggatggagtgtagtggtttaattttggtttattgtaaattttgttttttgggtttatattattttttggttttagttttttgagtagttgggattataggtatttgttattatgtttggttaatttttttgtatttttattggagatggggttttattgtgttagttatgatggtttttattttttgattttgtgatttgtttattttggttttttaaagtgttgggattataggtgtgagttattgtgtttggttaaaatgtagatattttattagggggataaggagggtaaggtaaagtttatggaattgagtgttagtgattttggtatttgtgtagttgagtatagtaagggaggggttaatgtagatggtaagtgtattaaggagaaggtaggaatattggagtttgtaataagggaggagagaggattggagagtgtggggaatgggaagaagtagtttattttggattaaagaatatattgggtgaagaatagagggggagtttgtaggaattagtaatgagaaggttaggaaaagaaagagttgaaaatggagaaaattagagttagaattgttggatataggagaagaaatagtagttttattattgatttttttttaggtttgatgtttttttaagaataaagtttttttttggtgatggttttttgttttgtttttttagtatttatttttttttgtttttttgggggtgtat

SEQ ID NO: 2316 - DNA, 2305 bp, Artificial Sequence
  chemically treated genomic DNA (Homo sapiens)
aggtagttttattgggttggaggttgtgggtgtttatatagggtttggtttataggaagtgtttgaaaggggggttgatttggtgatggttttttttttttttttattattttatatatttttaggaatttatatggtggggatgtattttttgggaaaggtgttggtggtgtagttgatgagaaggtaggttttgtttatggttttgaaagataggaagtgtaagagggtggtggttatgggttttgttggagatgtggggaggtttttgtttggttttttgtaaagattttagtatttatttagtttagttttttgggtttttgtttttttatgtgagatgttttttgtttgtgtttttatatttgagagtttgtaagttatgtggatgtttgttaaagtggagattttagggtttagttttagagattttgatttataggtgtgtgtagagttggtaatttgttttttttataggtttttttaggggttagtgatgtgggatagagggtgtttagtagatttaggtaatgttgaggggtttttgatgtttgatttgggttttaaattttagttgtattatttattagtggtatgattttggataagttatttaatttgtttttgttttagtttttttatttagaaaatagagatgagtttatttttataggagtgtgttgaggagtaaatttaatgaggtttattaaagtattgagtatagggtttgatgtatggtagtagttgatggttgttagggaagatttgattttgttttttttttttattttttttgtggagtagagtagttattaggttagggtttgagttagagtggtttgggtttaaattttgtgaggttttgggtaaattatttagtttttttgaatttttatttttttatttgtaaaatggatttattaggtttggtgagaggataaatagagaaggttagattaattttagagttggtatataggaaggaagtgataatgtgtgttttttttatttttagtatgtgaggttgggagtgggtgtaggtagtttagttgaagtttagaggttaagggatagttttgggtttttttttgttttgtgtggttttgttattttttgtttagagaagatagtttattttttttttttattattgtttttttttgggtttgttattgaggtaattttgaatgattggaatgttaatttttgatttttgtttgttttttttttgattagatataaagtagaagtgaatagggttggggtaggtgagggtagataaggagttatgtattagaattagttgaggttggtggataaatgggtttgtttttatttagatgggttatagttaaagttggggttatagggtttaggttaggagagttgagttttttaaagttttgggttgtttttttgtagaatgggaaggttggataggaggtttttttttagttagaatatgttttagggtgagtttgtaggttggattttaagatgtggttgttggtaggtatgatagattgataaattggatttgtttttttattttgtgtttttttaagagatagtgttttgttttgttatttaggttgattgtagtggtattattatagtttattgtagttttaaatttttgggtttaggtgatttttttattttagtttttttagtagttgggattgtaggtgtatatgttattatttttggtttaaaaaaatttttttatagatataggtttttgttatgatgtttaggttggttttaagtttttggttttaagtaatttttttattttggttttttaaaatgttaggattataggtatgagttattgtatttggtttggatttgttattttatagatgaggaaattgaggtttttaggggataagatagtttgaagttattgggatttgataattgagaagggttttagtttagtttgttttttttttgttgattttataattatttttttattttttagttttttttttttttttttgttttttaatgtttttttgttttttttgttttttatttatattttttatatattttttttaatttggtaggttgaggggaggggagagaaagtggagggggtgttagaaggtatatattataagtaagatagttatttagtttattttaagtgattttatagtatttttagggtataggtttttttttagatgaataagttgaggtttagagaggtgttgtgatttgtttaaggttatatagtggtattaagttagtgatgatagtttaggttagtttggggataaaggttgaattt

SEQ ID NO: 2317 - DNA, 2305 bp, Artificial Sequence
  chemically treated genomic DNA (Homo sapiens)
aaatttagtttttgtttttaggttgatttgggttgttgttattggtttggtgttgttgtgtggttttgggtaagttatagtatttttttgaattttagtttatttatttgggaggaggtttatgttttggggatgttgtggggttgtttgagataagttgagtggttgttttgtttgtagtatgtgttttttagtattttttttatttttttttttttttttttagtttattgggttggggaggatgtgtgggggatgtgggtgaggagtagaagaggtaaggggatattgagagatagagagggaaggaggaggttaaaggatgggagggtgattgtggggttggtaggggaggggtaggttgggttgagattttttttagttgttagattttagtgattttaggttgttttgttttttgggggttttagtttttttatttgtaaaatgataggtttaggttaggtgtagtggtttatgtttgtagttttagtattttgagaggttaagatgggaggattgtttgaggttaggagtttgagattagtttaagtattatagtgagaatttatgtttataaaaaaatttttttaagttaggagtggtggtatatgtgtttgtagttttagttattggggaggttgaggtgggagaattgtttgagtttgggagtttgaggttgtagtgagttataatggtgttattgtagttagtttgggtgatagagtaagatgttgttttttaaaaaaatataaaataaaaggataggtttaatttgttaatttgttatgtttgttagtagttatattttagggtttagtttataggtttattttggagtatgttttagttggaagggggttttttgtttagtttttttattttatagaggagtagtttaaggttttgagagatttagtttttttggtttgggttttgtggttttgattttggttgtgatttatttaggtgggggtgggtttatttgtttattagttttagttgattttgatgtatggttttttatttgtttttgtttgttttagttttgtttatttttgttttgtatttgattggaggaggggtgggtggaagttaagggttaatgttttagttatttaaaattattttggtggtaggtttaggggagggtgatggtaggaggagaggatgagttgttttttttgagtaggaagtgataaaattatgtagggtaggggaaggtttagagttgttttttggtttttgggttttggttgagttatttgtatttgtttttagttttgtatgttgagggtggaggaggtgtgtgttattattttttttttatgtattagttttggggttaatttagttttttttatttatttttttattaaatttaataggtttattttataggtgggaaaatgaaagtttagggaagttaagtaatttgtttaaagttttataggatttgaatttagattattttgatttaaattttgatttggtaattgttttgttttatgggggaggtgagagggaagagtagggttaggttttttttagtagttattggttgttgttatgtattaggttttgtgtttagtgttttgataggttttgttggatttattttttagtatatttttatgaggatgggtttatttttattttttagatggagaaattgaggtagaggtaggttaagtgatttgtttaagattatattattggtaggtggtatagttgggatttgaagtttaggttaggtgttgggggttttttggtattgtttgggtttgttgggtattttttgttttatattattggtttttggagaagtttgtgggaaaagtggattgttagttttgtgtatatttgtggattagaatttttggggttggattttgaagtttttattttaataaatatttatatgatttgtaggtttttgggtgtgagaatatagatagggggtattttatatggggagatggaggtttagagggttaggttgggtggatgttgaggtttttgtagaggattaggtagaaatttttttatgtttttggtagagtttatgattgttgtttttttgtattttttgttttttagggttgtgggtaagatttgtttttttattagttatattattaatgttttttttggagagtatatttttattgtgtgagtttttggggatatgtggggtggtgggaggaggggagagattgttattaagttgattttttttttaggtattttttgtgggttagattttgtgtgggtatttatagtttttagtttagtggagttgttt

SEQ ID NO: 2318 - DNA, 3096 bp, Artificial Sequence
  chemically treated genomic DNA (Homo sapiens)
tttaggttattgttgtttaggaagaggtgttgtagtgatttgtttataggttggaaggttttgttatgtaaggttttgagtgggttgtttgagagttgtagttttaggagggtaggtagtttttttaaggttttagtgggtattttttgtagttgatttttgtttaggtgtagtttttttagtttttgagttgggtttagtgttttaagggatattttggtgatgtggtttttatttaggtagatttagtgtaaggtttgtgttttttttaggtttttaggtgttaggtggtttatagtgttgttttgtaggtgtagggagaagaggttgggtagggtgtgtagggtagtttttggtatttgtaggaaatggttgtgttttaggtataggtagttgaggtggggagtttttttaagggtagtagtgttgaggtttgtgagttggttgttggagaggtataggtagattaggtggtttagtttggttagggtgtttgtttttagttttgtgatgttgtagtgttgtaggtgtagtgatattaggtggtttaggttggggaaggttgtttggggtattgaggggaagtggttttgttttaggtttaggagttgggtgttgttggggaagttgtggggtattgtttgtaggttgtagtttttgtagttgttgtgttgggatttggggatgtatatgtaggtgtgagggtaaggtgtgattgtttgtttttttttggggttgtgtggagggttgtgtggaggggtgtggggtttggttatagtttgtttttttagttttttttttttttgtgttgtgtttttagggtagtgtaggttttagggttgtagggtgtttagagttttgttttgtaggtgttgtggtttttggtatgtgttgtttgagtgtatgtgtgtttgtgttagttatttgagtaggggttgtgtttggtagttgtattatagtggatttttttgtagttgtagttggtgtagttggtttgggttttgtagtgggggtagggtgtttagttggtttttgtggaggttgagggtgtgtaggtgtggatagtgtgtgaaggttttgggatttagggtttgtagggttttgttgtttagtagtagtttttgtaggttgggtagtgttagtttgttttttttgtttgtgtaggtgagtgggttgtggtttagttttagatgggttaggttgtgggtttgggataagataggtttgggtagagtttggagtttgttgtggtgtaggttgagttgttttagggtgggtaggttagttagggttttgggggttagtatgttgagtgtgttgtgtgatagttgtagttagtggatgtgtagtagtttttggaaggttatggtgggtaggtaaattagggtgttgtgggttaggtttagtgtggttagtgtatttagtgttttgaatgtttttggttgtagtttttttagtgtgtttttttttagttttagttgttgtaatgagtttagtttgtttagtgttttttggggtagtttatgtaggtggttggaggttaggttgagtaggagtaggtggtttaggttatggaaggtgtttttggttattagttttattttgtagtggtgtaggtttaggtgtgtgaggtgaggtatgttttggaaggtggttgtggggattatttttagtaaattgttttgtaggtttagttgttgggttagttggggatagtgaggagaaagtggggttgagttaggtagggattttgtttttgtaagtgttgttttttttttggaatattttttttttttgttattttttttatatttttttttatttgatttttgatattttttttaggaagtttttttttttagtgttttgggtattatttattgtggtattttttatattgtgttgtttttgtttttttgtttttttttttttattagttgatgattttgtagagtagagattatattttattttgttatagtttgtttttttattatagggtttgtagtgaatttagtattgatttatgggttatttatttattttatttatatagtaaggattttaaatagattatttttttgttattggtttttattatttttattttatagaagtgtaaattgaggtttaaagagaagtaatttgttaaggttttttgggtaggtggtggtagattaattggtgtttagtttaggtttttttttttgggtttttattttgttttattgttattttgtgtttgtgtttttgttttgttgattttagggatggtgtttggtattttagtgaggttttggtattggtaggtaatgtgttgtttggagttgttatagatgtaggtttgtgggtagtgttgggtggtggtttgtttagttggggttagtagtagaagtataagaagtggtagtattaaggggatatgggtggagttttggggtttgggatggggagggagagtttgttgtgtataagggttgaggttatatgttgttttttatttagttttagttatggtgtagtttttgttttaaaaattttttagagtttttttttttgggtttaggaaagtgttaattattttgagtttttttgttttttattttttatgtagtggaggttttatgattagttttgttttatatgggaggaaattgaggtttagaaaagtgatttggttagtttttttgtttttgtttaatggtttagtgaggatttgttgattgtgagaatgattttagtttagagtatgtttttaggttgtggtgaggttttggtttagggtaggtttggaagtagtttgtttttagattgatatgatgttagtttttaggtggtaggagtataatggtattttttagaaaggagggaggtatttagtttgggtttttgagtttttttttgtttgtttgtttaaatagagataagttttgttttgttgtttaggttggagtttggagtgtagtggaatgattatggtttattgtagtttttattttttgggttaaagtgatttttttattttagttttttgagtagttgggattataggtatatattattatgtttggttaattttttaattatttttggtag

SEQ ID NO: 2319 - DNA, 3096 bp, Artificial Sequence
  chemically treated genomic DNA (Homo sapiens)
ttattagaagtaattaaaaaattagttaggtgtggtggtgtgtgtttgtagttttagttatttaagaggttgaggtgagaggattattttagtttaggaggtgaaggttgtagtaagttatagttattttattgtattttagattttagtttgggtaatagagtaaggtttgtttttatttaaataaataaataaaaaaagatttaaggatttggattggatgttttttttttttttggggggtattattatgtttttgttatttgggagttggtattatattagtttgaggataggttgtttttgagtttattttggattagagttttattatagtttgagaatatgttttgaattggagttatttttatagttagtaagtttttattgagttattgggtagaggtaaagggattaattaggttatttttttgagttttggtttttttttatgtaaaataggattaattataggatttttattgtgtggggggtggggggtagggaggtttagggtgattggtatttttttgggtttaaaggaggaggttttgaggggtttttggggtaggagttgtattatggttgggattaagtgagggatagtatgtggttttggtttttgtgtataatagattttttttttttgttttaggttttggagttttatttatgtttttttggtgttgttgttttttgtatttttgttgttggttttggttaggtaggttgttgtttagtgttgtttataggtttgtatttgtgataattttaggtgatatgttgtttgttggtattagaattttattgaggtgttagatgttatttttgaggttagtagggtaggagtataggtatagagtggtagtggggtaaggtggggatttagagggaggagtttgggttgggtattagttgatttgttattgtttgtttgggagattttggtaaattatttttttttgagttttagtttatatttttgtaaaatgggaataataaaaattagtaatagggagatgatttatttaaaatttttattgtgtgaatggaataagtaggtgatttatagattgatattgaatttattgtagattttgtggtggagaggtgggttgtggtagggtgaggtgtggtttttgttttgtagagttattagttagtggaggagagagagtgaggaggtagggatagtatagtgtgaaaaatgttatagtgggtgatgtttagggtattggagaggaaggttttttggaggaggtgttaggggttggatgaagagaaatatgggaaaggtgataggagaaaagagtgttttggggaagaagtagtatttgtaaaggtggggtttttgtttggtttagttttattttttttttgttgtttttagttgatttagtggttggatttgtagggtaatttgttgaaggtgatttttgtagttgttttttagggtgtgttttattttatatatttggatttgtgttattgtgaggtggagttggtggttgagggtgttttttgtggtttgggttgtttgtttttgtttaatttggtttttaattatttgtgtgagttgttttaggaggtgttggatgggttgggtttgttgtggtggttggagttggaggggaatgtattggaggagttgtggttggggatgtttggggtattgggtgtgttggttatgttaaatttggtttataatgttttggtttatttgtttgttatggttttttaggggttattgtgtgtttgttggttgtggttgttgtataatgtgtttagtgtgttggtttttgaggttttggttggtttgtttgttttgagatggtttagtttatattataatgagttttaggttttgtttgggtttgttttgttttaggtttgtggtttggtttgtttggagttgggttataatttgtttatttatgtgggtgaggaggatgggttggtgttgtttggtttgtgggagttgttgttggatggtggggttttgtaggttttgggttttagggtttttgtatattgtttgtgtttgtatatttttgatttttgtgggaattagttagatattttgtttttgttgtagggtttgggttagttgtgttggttgtggttgtaggggaatttgttgtggtgtggttgttaggtgtggtttttatttgagtggttggtgtgggtgtgtgtgtgtttggatggtgtgtgttaggggttgtggtgtttgtggggtgaggttttggatgttttgtggttttgggatttgtgttgttttggggatgtggtgtaggaagaggaagagttggaagagtgggttgtggttgggttttgtgtttttttgtgtggttttttgtgtggttttggggaggagtgggtagttgtgttttgtttttgtgtttgtgtgtgtgtttttgagttttggtatagtagttgtgagggttgtggtttgtaggtggtgttttgtggtttttttagtgatatttagtttttggatttgaggtggaattatttttttttggtgttttgagtggttttttttggtttgggttatttggtgttgttgtatttgtagtattgtggtattgtggagttggaagtgggtgttttggttgggttgggttgtttgatttatttgtatttttttgataattagtttgtaggttttagtgttgttgtttttgaaggggttttttgttttggttatttgtatttagaatgtaattgttttttgtaggtgttaggggttgttttgtgtgttttgtttagttttttttttttgtatttgtaggataatgttgtggattgtttggtatttggggatttggggagaatatgggttttgtgttgggtttatttgagtggaaattgtattattgaagtgttttttggggtgttgggtttagtttgggagttggagaagttgtatttggataggaattagttgtgagaggtgtttattggggttttggaggggttgtttgtttttttggagttgtagtttttgggtaatttatttagggttttgtgtgatggagttttttagtttgtgggtaggttgttgtagtatttttttttgaatagtagtggtttgga

SEQ ID NO: 2320 - DNA, 2400 bp, Artificial Sequence
  chemically treated genomic DNA (Homo sapiens)
gttttgttgtaatgaaaattatagtaataatgatgatatttaattttgatgggtatttggtatatgtttggtgttgttttaaggattttgtatgtatttatttatttaatttttatataattttatgagggagaggttattattgtttttattttattaatgattatttggagttaggtttgtttaaagttatttagttggtgataggtagagttgggatttgattttaggagtttttggttttttaaatattttttaggttgtttttatatgatagttttttttgggttttgtatttttagttttttttggataaagttttttgattttattttattttgttgtttttatgggattttttgtagggttttgggtgtttttggagttttagtatttaaagttaatttttagtgtttttagatttgtgtgtttggagtttggtgagatgattttgttaggttttgggtgtttgtgtttttatagttttaaagtttttgtattgtggtgggtgtaattagtttggatgaaataaggatattagggtttaagtttgggttttgttatttagtttggtttttttgggttaggtattttttttttttaagtattagtttttttaattatgatatgagataaagtattaggaagtattttgtaggttataatgttattaattgttgttaatttgggttattttgggagttttttatttttgttaattgttgttttattttaagttttgggtagtttttagtggtagatggttttgggtgttttagttttgttttttgttaggttttgtggttttgagtatatttttttatttttttgattttaatttaagggatgttatgagatggagtaagggtgtgtatgtgatatttatttggtaaagttattgttgggttatgttagttgttattattattattgttgtttttggagaattttaagttttttttaaatggattttttttaagtttttggttttttttttgattttggatttaggagtagagtttgtgaagtgttatttttagtatgttgagtttttttatttttttaaataatgtatttttgttattaggtattatgtattagtaaagagaggagggttgatgttagggtttggggatgggatatttaggttggggtgtttagatttttttgttgattattttattggttttgttgttttatttatatagagtttgtttagtttgttggtttgggtgttgatggatgaggatgtttggatttttttttattagttgttttatgatttagagtaggtgttttaggtattttgttggttttgtttgtgtatttggaaagtgtaagtgattagtttttgggtttttatatggttagagttttgggtttttgttggaaaagtattttttttttttgaaaggagagaaggaaaatatagattagttatatttttggatattttaggatgatttgatttattagatgggtttagaaagttatgtttaggtttggagggatagagggtgtgtgttttttaatgtgataataaggattggaagatgaggattgggatattgattttagagagtttggtgttatagtaattattggggatagtttagaagttttgggtgtttggaaagaattgggggtagagaggagggaaaagttgttttatttataaatattttttgagtatttttgggaatgttttttttttggtgtgttggagttttatggggttagttatggttttagttgtattatgttggtttttagagtatattgttttttttttattttaaaaagtttattttttttattaaaaatttaagttatttgtagattgttgggtttttaaagtttaggttgttgttattaagaattttgggaaaagtaggatggagtttttgagttttttattagtttttttttttgtttttttttattaatgtttttaagggttttttttatgtttggtattttttttgtgtatataggtaggtgtgttttaattttagttgtgttatgtggtagttgtaggttttagagtaaggtattttatttttttaatttttagttttttttagttgaaaaattagaaatagttatatttatattagagtttggttgtagggagtagaggaataaatatatttgaatattttggtaagtgaaaggtattgaatgagtgtgtatttttttttttatttgttttttgagtttggttttttggtttataaagaagggagaataattttatttttaaagaggttgtgaggatttggggataagtgtgtttgtttagaggagtaattgtagttatattttagtattttttgttttttttgttttttttgttttttgtaaggggtttttttggatataggagtaggaagttgggtt

SEQ ID NO: 2321 - DNA, 2400 bp, Artificial Sequence
  chemically treated genomic DNA (Homo sapiens)
ggtttagttttttgtttttgtgtttagaggagttttttgtaaggagtagggaaggtagaggagatagaagatgttgaaatgtggttgtaattgtttttttgggtgggtatatttgtttttaaatttttataatttttttggaggtgggattgtttttttttttttatggattaggaagttaggtttagaaagtaggtggggaaggggatatatgtttatttggtgttttttatttgttaaagtgtttagatgtgtttgtttttttgttttttataattaagttttgatgtaaatgtgattgtttttaattttttagttgagggaaattgaaggttggagaggtgaagtgttttgttttggggtttgtggttgttatatggtatagttggaattaagatatatttgtttgtgtgtataggggagatgttaggtatggagaggatttttggagatattggtgggaggaagtagagggaggagttggtggggagtttaggagttttgttttgttttttttagaatttttagtagtagtaatttgggttttggaagtttagtagtttatgagtggtttgaatttttggtgggaaggatgggttttttggaataagggaggaatagtgtgttttggaggttagtatgatataattagagttatagttggttttatggagttttaatatattagggagaaggtatttttagagatgtttagagaatgtttgtggatggggtagttttttttttttttttgtttttaattttttttaggtatttagagtttttgggttatttttagtagttgttgtggtattaaattttttggagttaatattttagtttttgttttttaatttttattattatattgaaaggtatatattttttgtttttttaagtttgaatatgattttttaaatttatttaataaattaaattattttggagtgtttagggatatggttgatttgtattttttttttttttttttagggaaaagagatgtttttttagtagggatttagggttttggttatgtggaagtttaggggttggttatttatattttttgggtgtgtgggtggagttggtggagtgtttggggtatttgttttgagttatagggtgattggtaaaagaagatttggatgtttttatttattagtatttagattggtaggttgagtaggttttgtgtgggtgagatagtagaattggtggggtagttagtagaaagatttggatattttagtttagatgttttgtttttgagttttgatattagtttttttttttttattaatgtatgatgtttgataatagaaatgtgttgtttaaaagaataagaaaatttagtatgttgaaggtaatattttataagttttgtttttgggtttaaggttaggagagggattaggggtttgagaagagtttatttggaaaagatttaaagttttttagaaatagtagtaatggtgatgataattaatatgatttggtggtgattttattaggtgggtattatatgtgtgtttttgttttattttatgatattttttgagttaggattagagaggtgaagggatatgtttaaggttataaagtttagtaagggatagagttggggtatttagagttatttgttattaaaggttatttaaagtttaaggtgagataatagttggtgggggtggggggtttttaaaataatttaaattaataatagttggtggtattatagtttataaaatgttttttgatattttattttatattatagttgaggaaattgatgtttggagagggaaagtatttggtttagaggagttgagttaagtgatagggtttggatttgagttttagtgtttttgttttatttaagttggttatatttattatgatgtaaagattttgaagttgtgaggatgtgagtatttagagtttggtggggttattttattaaattttaagtgtataggtttggggatattgagggttggttttgggtgttgaggttttagaggtatttagagttttgtagaggattttatgggggtagtaggatgaggtggggttggggaattttgtttgagaggaattggggatgtagagtttggaaaaggttgttatatggggatagtttgggaggtgtttaaggagttaggggtttttgggattgaattttagttttgtttgttattagttgggtggttttgggtaaatttggttttagatggttattaataaaatggggataataatagttttttttttgtgggattgtgtgagaattaaatgagtaaatatatgtagaatttttagaataatattaggtatatattaggtgtttattaaagttagatgttattattgttattgtgatttttattataatgaggt

SEQ ID NO: 2322 - DNA, 2495 bp, Artificial Sequence
  chemically treated genomic DNA (Homo sapiens)
atatatttgtgaatgtttgttgggtttatatttaagaggggaattgttgtattattaggtatgtatatattaagttttaaaagatattgttaaagttttttaaagtaattttattaatttatatttaatgaaaattttaattttgtatattttttataatatttagtattgttaatttgtaaaattttaagtatttttataggtggttagttggagttttttgtggtattaatttgtatttttttaatggttgttgatgttgagtaattttttatattatatgtttgttggttatggaggtatttttttttaaaatgtgttagtttgagttttttgtttatttttaattgatttttttttatttgtaggaaatttttaaataaattttggatgttagttttttgtttgatatttataatgtaaatatttttttttgtttaatgtaaatatttttttttgttgtttgttattttattttttttaaagtaagaaaagatttttggttgggtatagtggtttatatttgtaattttagtattttgggaggttaaggtaggtggattatttgaggttaggagtttgtaattattttagttaataaggtgaaattttgtttttattaaaattataaaaattagttaggtgtggtggtaggtatttgtaatttgtatttgggaggttgaggtaggagaattatttgaatttgggaggaggaggttgtagtgagttaagattgtgttattgtattttattttggtttataggagtgaaattttgttttaaaaaaaaaaaaagagtttgttgtttttattgagttttgaagaatgttagtagtttgttgtttaaaattaaattatagggttttatgatgggttaatttgatgggaaagttattattttgatagttgttgtttaggggattggttaagtagttgttttagtttttgtaagagaaggtgttaaagttatagttatagatattaatgtgtttaaattttaggaattggaaaagtatttgggtatttaaatttgtgtttttgatgttataaagaagaaataaattgattagtttgttaatgaagttgagagatttgatgttttttttaatgttgttggttttgtttattatggaattgttttggattgtgaggagaaagattgggattttttgatgaattttaatgtgtgtagtatgtatttgatgattaaggtatttttttttaaaatgtttgtttaaaaatttggtaatattattattatgttttttgtggtttttagtattaaaggagttgtgaatagatgtgtgtatagtataattaaggtagttgtgattggttttataaaatttgtggttgtagattttatttagtagggtattaggtgtaattgtgtgtgtttaggaatggttgatatgttatttttataagaaagaatataagttagaggaaattttgaagaggtatggaatgattttttgaagagataaaagatgggatgatttgtaattgtagaagaaatagttatgttttgtgtgtatgtggtttttgatgaatttgtttatgtaattggtaattttgttattattgatggaggatggagtttgtgattttaggatttttatggtgggaaggaaggtaggttttttttatttatagtgaatttggttatgaagaaaatttattaattattttttttttgttaattatatgttaatgaaattaagttttttttaataatgttattgtttgtaagagtttgattttttaagtatattaatttttttgtaattttttttgaaattattgtaaagaaataaaaatattgaatttatagtaagagaatagtttttaaaataaattttaatttgtaagtatttgtgttagttattttgggttgttataataaattattatagatggagtgttatagataataaatatttattttttagtttggaggttaggaagtgtaagattaaggtgttagtagatatggtatttggttagggtttattttttagtttgtagatggttttttttttgttatatttttatatagtaagagtagagaaaaaaagtaagtttttatgtgtttttttataaggatattaattttgtttatgggggtattatttttatgatttaattattttttaaaggttttattttttaatgtattatattgggggttaggatgttaatatatgattttggggtgatataaatagtttattgtagtatatataattaaaatgtaaatatgaagaaaaaaggaagtttttgttttttttgtggggggtggggttaaggaagaagatagtaattttaggattaggtattgtagtttatgtttataatttttgtattttgggaggttaaggtaagaggattatttgttgttaggagtttaggattagtttagttaatagagagaggttaaggtaggaggattatttgagtttaagagtttgaggttgtagtgagttgtaattatgt

SEQ ID NO: 2323 - DNA, 2495 bp, Artificial Sequence
  chemically treated genomic DNA (Homo sapiens)
gtatgattatagtttattgtagttttaaatttttgggtttaaataatttttttattttagtttttttttattaattaggttggttttgaatttttggtagtaagtgatttttttgttttggttttttaaagtgtaggaattataggtatgagttataatgtttagttttgaaattattatttttttttttaattttattttttataaaaaaaataaaaatttttttttttttttatatttatattttaattgtatatgttgtaatgggttatttgtattattttaaagttatgtgttgatattttaatttttaatatgatatattaggaggtggggtttttgggaggtaattaggttataagggtagtgtttttatgaataggattagtgtttttataaaaagatatataagagtttgttttttttttttgtttttgttatgtgaggatgtagtaagaagaggattatttgtaaattaggaagtgggttttaattagatattatatttgttggtattttgattttgtattttttagtttttagattgaaaaataaatgtttgttgtttatgatattttatttatggtaatttgttatagtagtttaaagtgattaatatagatgtttataaattgagatttattttaaaaattatttttttgttgtgagtttaatatttttatttttttataatgattttagaagagattataaagagattaatatatttaaagaattagatttttgtaaatagtgatattgttaaaaagggtttagttttattaatatgtgattagtaggaaggagatgattggtgagttttttttatagttaggtttattgtggataggaagagtttgtttttttttttattatggagattttaaaattataagttttattttttattaatgatgatagggttattagttatataagtagatttattagaagttatatatatgtagagtatggttattttttttgtagttgtaaattgttttattttttgtttttttaggaaattattttgtgtttttttaggattttttttggtttgtatttttttttgtagagatggtgtattaattgtttttgggtatatatagttgtatttgatgttttgttggatgaaatttgtagttatagattttgtgaggttaattatggttgttttggttgtgttgtatatatatttgtttataatttttttgatgttggaaattatagaaaatatggtgataatattgttagatttttgagtaagtattttaggaaggaatgttttgattattaggtatgtgttgtgtatattgagatttattgagaagttttagtttttttttttataatttaggatagttttatgatggataaaattagtaatattaaagagaatattaagttttttaattttattggtgaattgattaatttgttttttttttgtgatattaaggatatgagtttgaatatttaggtatttttttagtttttgaagtttggatatattaatgtttgtggttatgattttggtatttttttttataaaagttaaggtagttgtttggttaattttttgagtagtggttgttaggatgatgatttttttattaagttgatttattatggaattttgtggtttaattttaagtagtgagttgttggtgttttttagaatttggtgggagtaataaattttttttttttttttgaaatagagttttatttttgtgggttaggatggagtgtaatggtatggttttggtttattgtaattttttttttttgggtttaagtgatttttttgttttagttttttaagtataaattataggtgtttgttattatatttggttaatttttgtagttttagtagagatagggttttattttgttggttaggatggttgtgaatttttgattttaggtgatttatttgttttggttttttaaagtgttgggattataggtgtgagttattgtgtttggttaagaatttttttttattttaaggagaataaaatggtaagtaatagaggaagatatttatattagatagaagaaaatatttatattataaatattagataaaggattagtatttagaatttatttaaaaattttttataaataagaaaaaattagttaaaagtggataagagatttaaattggtatattttaaaagggagtatttttatagttaataggtatataatataaaaagttgtttaatattaatagttattagggaaatgtaaattaatattataaggagttttagttaattatttatgagaatgtttaaaattttataaattgataatattaaatgttgtagaggatgtgtagaattgaaatttttattgagtgtaaattggtaaaattattttggaaaattttgatagtattttttaaagtttaatatatgtatatttgatgatgtagtaattttttttttaggtataaatttaatagatatttataggtgtgt

SEQ ID NO: 2324 - DNA, 2452 bp, Artificial Sequence
  chemically treated genomic DNA (Homo sapiens)
tattagttaagtgagaatagtattatattttttataggttgttgtgagaattttgttttaggttagtgttttgtatatagtgtatgtttaatttatgttttttttttttatatgttggggttttttagtttttttaatggaatttagagttgtgatagttaagggtttagaatttaggatatttgttttattagaatttaggatatttgttttaagttttagttagtagttattagagttgaggttttgtgtgaagtagtattttttttaagtatttttttgttttttgtaaattaaatagaatgatttaattttattatttggtggatgagtttaggattttttagtataagagagatttttttttgttttggtagtgggaagttgtttttttattttttgggaggtgtagagttgggtgattttgggatgggtttttagggtaatgtttttatgtgtgtttatattttttattttttttataggtagtggtgagttttgttaatttttattatgtttagaattgaataggaagtggtaatttggttgttatggtagtgagaggggtaggaatgggtgaggttttttaaggagtattggtatttgtgaggtgggaaaggtatttatatattggtttttttaggatagaggtagggataggatgtggtattagtattttaagaaaaatgtttaaatttagtttaaaatatatatgatgtaatgattgttgttataattaagtagggttttttgatagaggttaagtagagaaagttatttgtgtgaggaaattgagggttttgttttaaagtttgaggaagtttagtagataaaggagttaatgtagagagggtttagagttttattttggtttgggaggtttgggttagttttgtttggggtttgatattagggtaaagagttaagttagttttaattttttttttttttaatttataaaatattaaataagaaaattgttggtaaggagggtaagaaaaaggttttgagtttttgtttttgtatttatttttttttttataagttagttttttttttttttatttgagatgtaattttgtggttatagtagtagtagtagtaggaaggttggggttatggttttatttagttgggtagtgttaggtttggagatttaaggtgagggtttatttgatataggatgtgttatttgggtttgttagggaaggatttggggttttaaaagtgaagttgtttatttagggaagtgaggtagtgtgggatttattgtttttagttaattgtagggatttattgagtttattatgagggtggtgttggtagttgtttttgtttttttttttggaattttaggtaggtgtggttgttttatttagtttggggttttaagttgggaggatttatagttagagggttttttgttttttttaattttttttagaaattggtttttaggatttagtaagggggttggggtgaggtttttggaatgttaggtatagatttttttggaattttttgggtttagagatttaggggtgtgggtttttaggttgagatggagtattttagattttagttttttatatatatatatttatagggaagtttttataaatttttatttatttatttattgtagattttttttgttttttttttttttttttttttaggtttttggttgtttagaatagttatttgtgtttattgttgtaaataattttttataggtttatttgaaattttatttttgttaagtgggaaaaatgtaaattgttaagatttagggtataaattttgggttgagggaggggtttttgtatttttatatataggtgtgtatgtatatgtatttatatttatagttttattttgttttttatttatttttatatatatatatatatgtttatgtatatagttttatatatattttagtagtttttttttttttttatttatatgttttttttttttgtttttttttttgtttttttttttgttgattttatttattattagttttttttagatttttagttttttgtgtaggttttttatagtttttgtagtatttttttttatttattttattttaagatttttttttttttttgtttttagtttatgttagtatgtaggtaagtgttttttatttttttttgtttaatgttattttgtttgtatagttattagttttagtggaaatgatttagtattaggtttaagattatattttttatttattttaaggtttagaattagaagtattaatttttgatgtttggtatttgtgttatttgtttttttagtgtgtggggatttagttggatttttgtgattatgtatgttttttttatttattagtgttatgtttttattttttagatgggattgttaaaaggtaaattgaggtataataaaattttaaatagattattttagt

SEQ ID NO: 2325 - DNA, 2452 bp, Artificial Sequence
  chemically treated genomic DNA (Homo sapiens)
gttgaaataatttgtttaaaattttattgtgttttagtttattttttgatagttttatttaaggagtagaaatatggtattagtgagtagggggagtatatataattatgggagtttagttgggtttttatatattgaaggagtagatgatataggtattggatattaaaaattgatgtttttgattttaggttttggggtaagtgaagggtgtggttttgggtttagtgttgggttatttttattggagttggtggttgtataggtgagatagtattgagtaggaggaagtggagggtatttgtttgtgtgttgatgtaggttggaggtaggggaggaagggggttttgagatgaggtgggtgaggggaagtattgtggaggttgtaggaagtttgtatgagggattaggagtttagagggagttgatggtgagtagagttgataggaggagaggtagggagagggatagagagaggagatgtatggatagggaaaaggagaggttgttggggtgtgtgtgagattgtgtgtatgggtgtgtgtgtgtgtgtgtgaaagtgaataaaagataaagtgagattgtgagtgtgagtgtatgtgtatgtatatttgtgtgtgagagtataggaattttttttttaatttaaaatttatgttttgagttttaataatttgtattttttttgtttgataaaagtaagattttaagtgagtttgtaagaggttatttgtaatagtgaatataagtgattgttttgagtagttaggagtttgggagagagagagaggaaggaatagaaagaatttgtaatgaatgaatgaatgagagtttataagaatttttttgtgaatgtatatatgtaagaaattagggtttgagatgttttattttagtttaagagtttgtatttttgggtttttgagtttagaagattttaggaaggtttatatttgatgttttagaagttttattttagtttttttgttggattttagggattagtttttgggggaggttggggagggtggggagttttttgattgtgagtttttttggtttggggttttagattgggtggagtagttatatttgtttgaagttttgaggaaaagggtggaaatagttgttagtattgtttttataataggtttaatgaatttttgtggttggttgggggtagtgggttttatattgttttatttttttaaatgggtagttttatttttagaattttgggtttttttttggtaggtttaggtggtatattttgtgttgggtgggtttttattttggatttttaggtttgatattgtttagttggatggaattatggttttagtttttttgttgttgttgttgttgtggttatagggttgtgttttaggtgaggggagaaggggttgatttgtggaggagggagtgggtatagaggtaggagtttagggttttttttttattttttttattagtagtttttttgtttagtgttttgtgggttggggaaggaggagattagggttgatttagttttttattttaatattaggttttaggtgaagttaatttaggttttttaagttaagataaagttttggattttttttgtattggtttttttatttgttaggtttttttaggttttaaagtagagtttttaatttttttatataaatagttttttttgtttggtttttgttaggaagttttgtttagttatgatagtaattattgtattatgtgtgttttgaattgaatttgaatattttttttgaaatgttgatgttatattttgtttttgtttttgttttgaagggattagtgtgtgaatgttttttttattttatagatattaatgttttttgaggaattttatttatttttgttttttttgttgttatggtaattaagttattattttttgtttagttttgggtatggtgggggttggtaaaatttattattgtttgtgagaggggtgggaggtgtaggtatatatgaagatattgttttggagatttattttaaggttatttaattttgtattttttagagggtagagaaatagttttttattgttagggtagaaaggggttttttttgtgttaagaaattttgggtttatttattaaataatgaagttggattattttgtttagtttgtaagggatagagggatgtttagagagggtgttgttttatatagagttttagttttagtggttgttggttgggatttgggatggatattttggattttggtgggatagatgttttggattttgggtttttgattgttatagttttgggttttattgggggaattgggaggttttagtatgtgggaaaaggaagtatgagttgagtatgtattgtgtgtaaagtattgatttggggtagaatttttatagtaatttgtgaggggtgtggtgttatttttatttgattgata

SEQ ID NO: 2326 - DNA, 2374 bp, Artificial Sequence
  chemically treated genomic DNA (Homo sapiens)
aagattagtttggttaatatgataaaattttgtttttattaaaaatataaaaattagttgggtatggtggtgggtatttgtagttttagttatttgggaggttgagatataagaattatttgaatttgagaggttaaggttgtagtgagttgatagtgttattgtattttagtttgagtaatagagtgagattttgttttaaataaaataaaaaataagggaagggaaaatgttttatttaattttattatttgggggttgggtataaaatatgagaaaaggaagatttaaaggtgaaaaaatggttagtatttataaaagaaaaggagtggttgtttgtgttttaggtagttgattattttttatttttagaatattttattttttttaaaaaaaaaaatttaagtttttaatattttaaaatttttttttaataaatgtttatatattagaaaagttatgggttgtgggaatgaaatttgtaaaaatagtgtttttaatattgaaaatagggttaagaatattggtttaaaatattaatgatatttttttatttttaaaatgaaaggagttgaagttgtttaggtattgaatgtatttatttgtaggtgagatatattagatggtttgtgaagatttataaaattaattaaggtatgaattttataatttttaagttattaagtttgttattataggaataaaatattggaagttataaaaattaattttggttttatatatttagatttaatattgtttaaaatatttttaattaaaaaataagttagtattaagtatgttgaaaatgttggaagaagaggttaagtttttggagtgggaaggatatgtttttttgtggggaagtgtagtagtgtggaagggggaaagggatggtttttagttgatttattttagattttttatttagtttggtttttgttttttgtagagttgttaagaggatatttttttggaatgttttttttttaggggtttttattttttaagaatttatgagttttggtaataggtgggggtggggagggtaggtttaaggggtggtagttggtttaggataatttatttgggggtagtatgtttagagagattttgtgtaaaatttggggttttttggttttatttattatgtagttatatttgttagtattttttttttgtagggtaattatttttatttgtagtaggtttttatttaggtttgtgagaaatgtatgtttgtttgttggagttttgtgatttatagttgaggatattaggggttggtatttttttggtaagaattggtattatattttttgagttttgatattttggagtttgtagtggtattgtattagaatggagttttttatgggtgtttgtagtattttagggaggttgttaattatgttttgatttggggaaggaaaggaggtgggaattttgggtaggagttgggagtattttttagtttagttgttggtatgggtgtggtatttataataatatgttatttttggatatggggttgagtatatggggtttagagttgtagttttttttgaattttattttttagttttaggagtagtagtaagagtagggtgaggtttatggttgggtagagaaatgttaatttttgggtttgtttgggtattgatgtagtatttgtttgagggtaggaaatatttgttttagaaagttatttggggtgggagaaaggaaatgatgggtatttttaggggtggggaaagggagtttttttaagttttggttggtttagtgtttaggaattgttttgagggtaagggtgggtaagataggatgagaagatttgaagaaagttagaagtttgtaggggttggggtttggttaaggggtgagatgggaggattgtgataattggaggataggagaggaagaggaaagatgatttttaggatttttttaatatagaatttgagggtgtatagttatgaaggaggaaggtagagtgttttgtattttatttaatgttatttttgtttttaattttttgggagtgttttatgattatttaagtttttaggaggttgtatgtagtataattttaaataggaagttttattttgattttgtgttttggattgggtttttttttatttattgttttggatattatagaatttttttatttggatttatattttttagttttgggaaataaatttttattttgataattatatgtttatttttttttttttttttatttttttgtaattttttaattagttggttattgaatgttgtgtgtttattttatttttatattttttttattttattttttatttttttgttttttttgttttgtttttaaggagatttt

SEQ ID NO: 2327 - DNA, 2374 bp, Artificial Sequence
  chemically treated genomic DNA (Homo sapiens)
gaaatttttttgaaggtagaataaaagagataaaaagatggaaaatgagatagaaaagatatgaaaatgagatgaatatatgatatttaataattaattagttaaggaattgtagaaaaatggaaggggagaagaaaatggatatgtaattattaaagtaagaatttgttttttagaattgaagaatgtggatttagatggaagggttttatagtgtttaggataataaatgaagaaagatttagtttagggtataggattaaggtgaaattttttgtttgaggttgtattgtatataattttttaaaagtttgggtggttgtggggtatttttaaagaattgagagtaagaatggtattgagtgaggtgtagggtattttattttttttttttatagttgtgtatttttagattttgtattaggaagattttgaagattatttttttttttttttttttgttttttaattgttataatttttttattttattttttagttgggttttagtttttgtaggtttttagttttttttgggtttttttattttgttttgtttatttttatttttagggtagtttttgagtattgagttaattagggtttggaagaattttttttttttatttttggaggtgtttattatttttttttttttattttaagtgattttttgaggtagatgttttttgtttttaggtgaatgttgtattagtgtttaggtaagtttaggagttgatatttttttgtttagttatgggttttattttgtttttgttgttgtttttgggattagaaggtaaggtttaggaggagttgtagttttgggttttatatgtttagttttatgtttaggagtaatgtgttattgtgaatgttatatttatattagtagttgggttgggagatgtttttagtttttgtttaaaatttttattttttttttttttttaggttagggtatagttggtagtttttttgaggtgttgtaggtatttgtgggaagttttattttggtgtagtgttattataggttttaggatgttaaagtttagaaggtgtggtgttggtttttgttggaggggtgttagtttttggtgtttttagttgtggattgtagagttttagtgggtaggtgtatgttttttatagatttgggtgggggtttgttgtaggtggaaatggttattttgtaggaagaggatgttggtgagtatggttgtatggtggatggggttagggggttttagattttgtatagagtttttttgaatatattgtttttaggtgagttattttaggttagttattattttttagatttattttttttatttttgtttattgttagggtttatgggtttttgaggagtgggggtttttggggaggaggtattttaaggagatatttttttgatagttttgtagggagtggaaattaaattgggtgggaagtttgagataaattagttgaaaattattttttttttttttttatattattgtgtttttttataggaaggtatgttttttttattttagggatttggtttttttttttagtatttttaatatatttgatgttaatttattttttaattagaaatattttaaataatgttgaatttgagtgtataaaattagaattaatttttgtagtttttagtgttttatttttgtaatagtgggtttgatggtttaagaattatggaatttatattttaattaattttataagtttttataggttatttagtatgttttatttataagtaggtatatttagtgtttgaataattttaattttttttgttttaaaaatggaaaaatgttattaatattttaagttaatatttttgattttatttttagtattaaagatattgtttttgtaggttttatttttatagtttataatttttttagtatataagtatttgttaaaagaaaattttaaaatattaaaaatttgggtttttttttttaagaaagataggatgttttaaaaataaaaaatggttagttatttgaagtatagatagttatttttttttttttatggatattggttatttttttatttttaggtttttttttttttatattttatgtttaatttttaaataataaaattaagtagagtattttttttttttttgttttttgttttgtttgagatagggttttattttgttgtttaagttggagtgtagtggtattattggtttattgtaattttggttttttgggtttaagtgatttttgtgttttagttttttaagtaattgggattataggtgtttattattatgtttagttaatttttgtatttttagtagagatggggttttattatgttggttaggttggtttt

SEQ ID NO: 2328 - DNA, 2465 bp, Artificial Sequence
  chemically treated genomic DNA (Homo sapiens)
ttttaataaatatgatgattttaggtagtttttaggagtggaattgtatagtatttgtttttttgttattggtttattttgtttagtattatatttttaatataaatttttgggtttaagtaatttttttattttagttttttgagtagttggaattataggtatatatttttatggttggtagggttttttttattttttgtagagatgggggttttattaagttgtttaggttggttttaaatttttggttttaagggattttttttttttggttttataaagtgttgggattataggtgtgagttattatttttagttaattttttttgtttttaaggtgaaataatatttttttgtatgtatatattatattatgtttatttatttattttttagtggatatttgggttgtttttgtttttgggtttttgtgaatgatgttgttgtgaatataagtgtgttggtttggttttttttttttttaaatttgttttttgtttttttgtattgtgatggtttttttaaggtggatatataagtatttaagttttgatttatattttggagtaattttattgtagtttatattttagtttgtttatgagttagggatgggtattttatgattggtattgtttggttttagagaaaagtttataattttgggggttatagttgaggttttttatggttgtagggaatttgtttttattgtagttagattaatatttagtttagtttttttattagtttttgggaagtttatagaggtattttttataagagatgttattaaaagtttttgattgtatttagtttggaaattaggttttttatagatgataattagtttagaagatgtttttatgagtatggtgatagggtttaaatgtgtttgggagttttattttttttgattttttaatatgtaaatatttttaaaggttatagtaggaggttttattgaaattgaagagttttttttggttaattttttttttaaaaatgttatttggaaattaagtataattttgttaaaatgagtaaggattttatttaaatgaaattaaagagggttattttattttttttatttagtatttaaaataatttagagtgtgagaaattagattgtttagggttatatgtttttaaggattgttttttaatagttttttttttgtttttgttttggggttttagttttttttttttatttttggatttaagtttgtgtggtgttggttatattgattgatagttaggggatatgtatttattagtagggtgtgtttttttggtttttataatgaatgttggtttagttgttagtagtttttatgttaatgtttttttgttagtgaggttaggtttttaggtgttattggagttagaggagggtagttggtgtgtgttaagtagttattaggagttattttatgttaatgttttattttttgtatgttatagttatgtttagttgtaaaagtagttatgttttgggtttttttggtttttttttttttaagaaaaaaaaaaaggaaaggaagaaagtaattaaaggggtgggggggatttaaagtttgtattttagtatgagttattgaattaaagtttagtaattatatgtaaaataaattttttgtgagggtagtaagtttttgtgaggatggttgggattggttgtatagtaaagttaggagaggttttatgaggagaatagtatttagagtttaagggggagaatttttgttttaagtgggaatttggaatagaagtttttttgtttttagttgagaagatgattagattttagttgtttttggggaaagttggtatttatagttggatataaatatagtttgtaggaggaagagtgttagagtaagagatagagtagagatggttatggagatatgggtgtatatggggatatggtatagggaggattttgtttttgtttttatgaaggggaattttaaatgagttatgaagtttttttgattagggattaaggtattagtttgtgttagagataatatggttttgtggttttttattgttgttttgtgtggtgtgggtggtggttttttttttattgtggtaggggaagtttgaatttatttgattatagtattttgtagattgtttggtttttagttttattaggtataggtaatagatttagaattttgaaattattttttaaatttggtgatgtttattaggggttagaagaagaggaaagaatataattaatttatatagtagtttattttttaataaatttttttgttttaggtagtaatttgttttaggatatatagttaattagttggttaaggtgggtttagaatttaggtgttggtgttagggaggtaagaatggtatatggtaattggaatgtgtagttttttttatttatttattattggttttttaaagaaaatgtgaagtagtgt

SEQ ID NO: 2329 - DNA, 2465 bp, Artificial Sequence
  chemically treated genomic DNA (Homo sapiens)
atattgttttatattttttttgggagattggtggtgaataaataaaaagagttatatattttagttattatgtgttatttttatttttttagtattaatatttgggttttaaatttattttggttaattggttgattgtgtgttttggagtaagttgttgtttgagatagggaggtttgttgggaggtgggttattgtgtgggttgattgtgtttttttttttttttttgatttttgatgggtattattaaatttaggaaataattttagagttttgggtttgttgtttgtatttggtgaggttggagattaggtagtttgtagaatgttgtggttaggtgggtttagattttttttgttatagtgggagagaagttattatttatgttatgtagggtggtagtagggagttatagggttatgttatttttgatataggttagtgttttggtttttagttagaaggattttgtgatttgtttggaatttttttttgtgaaggtagggatagagttttttttgtgttatgtttttatatgtatttatatttttgtagttatttttgttttgttttttgttttgatatttttttttttgtaagttatgtttgtgtttagttgtgagtattgattttttttaggagtagttagaatttgattatttttttagttggaggtaggagaatttttgttttaagtttttatttggaataggggtttttttttttggattttgaatgttgttttttttatggagttttttttggttttgttgtgtagttaattttagttgtttttatggagatttgttgtttttatggagggtttgttttgtatgtggttgttgaattttgatttggtgatttatgttgaggtgtaaattttaagttttttttgtttttttaattgttttttttttttttttttttttttttttaaaaaaaaaaaaattaaaaaaatttaaagtataattatttttgtagttgaatgtgattgtggtgtgtaggaagtggagtattggtatgaagtggtttttagtggttgtttggtgtatgttagttgtttttttttgattttagtggtatttgggggtttggttttattgatgggagaatattggtgtgaaggttgttggtgattgggttagtatttattgtgaagattggagggatatattttgttggtgagtgtatgttttttggttgttagttagtgtggttaatattatgtagatttgagtttaggggtggaggagagagattggaattttggggtagaggtaggaggagggttgttagagagtagtttttgggggtgtgtgattttgaataatttgattttttatattttaaattattttaagtgttaaataaaaaaaataagataattttttttaattttatttaggtgaaatttttgtttattttagtaaaattgtgtttaatttttagatgatatttttgggggaaagattaattagagggagttttttagttttagtaaaattttttgttgtggtttttgaagatatttatgtattaggaaattagaaagagtagaatttttaggtatatttgagttttgttattatgtttatgagagtattttttagattagttattatttatgggaagtttagtttttaggttgaatgtagttaggaatttttggtagtattttttatagaggatgtttttgtgggttttttaaaggttaatgaggaaattgaattaaatgttaatttgattgtagtgaagataaattttttgtagttataagaaattttagttatggtttttaagattatgagtttttttttaaggttaggtaatgttaattgtggggtgtttatttttgatttgtgaataggttggggtgtggattatagtagagttgttttgggatgtggattggggtttaaatgtttgtgtgtttgttttagagaaattattataatgtagaagagtaggggataagtttgagaaaggaaaaggttaggttggtatatttatgtttatagtaatattgtttatagaggtttagaggtagaggtaatttaagtgtttattgaagggtgaatagataaatgtgatgtggtgtatatatatagaggaatgttattttgttttaaaaatgagagaaattggttgggagtggtggtttatatttgtaattttagtattttgtggggttagggagggaggattttttgaggttaggagtttgagattagtttgggtaatttagtgagatttttatttttataaaaaataaaaaaaattttgttagttatgggagtgtgtgtttgtagttttagttgtttaggaggttgaggtaggaggattgtttgagtttgggagtttgtattgaagatataatgttgagtaaaataagttggtgataaaaggataaatattgtatagttttatttttaagagttgtttagaattattatatttattgaga

SEQ ID NO: 2330 - DNA, 2459 bp, Artificial Sequence
  chemically treated genomic DNA (Homo sapiens)
tttggttaaggtggggtttaggtgtttgttttttttgagtttgtttaaggtttttatgttgtaagtattagatgttgaatttaggtggttttttattgttttggaggagaaggttgttaggattggttttttttttttgtttttttttttttttataaaaagaatgggtggtgttttgggaaaaagtttgttttaggatattttagtgtgtttattgttgttttatggttatatgtatggttgtttataaattgtatttttattgaggaagaaggtaaaaaatttagagagggtaaggaattatttattttgtatatgtgattatttggattgtttaaatttttttttaaaaaataagaattataatttaaagaaaatgttattttgattattgttagaaatttaaggtgtttaagtaaaatttaaaagtaaaattagagtttattttgttggaatgaatgtaatataaatataattttattatttttaattagaaattttggtttgttattattttggttggtggttttgtaatgtatgtttaaggggaaaaatattagatttttatatgttttttttttattttttttattttttagtttagagtataatttttagaagataatagaaggaagttagttttggggaaatttggtattttatttattgtaggaaggagaagaaatagtagaaatgggttagagagttttattagattaaatgttaaattatttttttttaaagatgtggtagttttttttaagtttttagagagagagagtgagaggagtagattttagagtagttaattgaagtaaatggatataagtgaggagggttttttgtgggagaatttttgagaggtagagggtgagttttttgagagtggtggttttgtagttttttttgatgttgagttgttattttgttggagtagtagtgtagtggttgtggttgtgtagtagtgttatgaaaatgatttattttaattagaatttttggaggtagagggagagttttttttagatgttattattattgttaagtagttgtattttttgttgggaaatttttttaggtaagagaatgtagagatgtttgtttgtagtttgggggaggatgttttattaggtgttggttatgaataggaggtttttttgggtgtgaggggtgtgttagggttgtttatttaggagtggtttgtgggaggattaggtgaggtttttaatggagtttttagtgtgtgtgttgaagaaggttttttggggttttgtaatgtttgtagttagttttttaagggtgtgtttgatttgttaggtgagtttttggttgagggtgtagtgtatatggttagttttgtgtaggtagattgtatagtttgttttaagggttatgtttattttgttaaggtgttaattttggatatttatttgagtaagattgagggggtataagtggatgagttggttgtgattatttttagagtggaagattgtggtgattgggatgatatggagaagaggtttagtggttgtaggttggggaggtggagggggttgtagaaatttattgatttttttggtgtggatgttgagttttttgagagtgttgttagggatgatgtggtgtttgatgatgaggtggtgttaaatgtggttagtgataatgttttggtggaaaagaaagtgaaatttttgtgggtagtttttgatgggggtgttgtttttgttgtgagtttagagtttaagtttagttttggtattaaagggtagttttgaggggagttggattggagtaaatagttatttttggttttgttttttatgaagaggaagggtaggagttgtgtttttgaggttgtgtttgttttgtttgttagtggtttttgggtttttgttaaggagtttttatttaagagggtgtttgattttagtttagttattaagggtattgtggttgagagtggggaggaggtggtgtgggttattttttgtgagtttttggttaagagtagtttgttgttgttggagattaagtttgagtataagaggggtttgttttttaattattttaatggttgggtagagggaggttgaagtagagagttgggtagagtggttggagtgtttggagtttttgatgttgatggtttgaagtttaggaattattttggtgtgggtaggttgatagtgattattaaagtgattttgtaagtagttgtgtaagttttggttgagttgttgtttgtatatgtgttgggggtttgttttgagaggtttggggtatttgtattgtggaagaaatgtttggttattgaatttttttttttatgttgaatttaagatagtgaagggttagtttatatagttaagatttaagatgatatttgtggtagtttttttagttaattttttttttaatataagatttaagtttaatgaatgtaaaaataggatatt

SEQ ID NO: 2331 - DNA, 2459 bp, Artificial Sequence
  chemically treated genomic DNA (Homo sapiens)
gatattttatttttatatttgttaaatttaaattttgtgttaaaaagggaattaattgaggaggttgttataggtgttattttaaattttgattgtgtaaattggttttttattattttaagtttagtatggaggggaaagtttagtgattagatgttttttttataatgtagatattttgagttttttagagtggatttttagtatgtgtgtggatagtaatttggttgggatttgtgtggttatttatagggttattttagtggttattgttgatttgtttatgttgaaatggtttttgggttttaagttgttggtgttagaagttttaggtgttttggttgttttgtttagttttttgttttgatttttttttgtttggttgttgaagtggttggggagtgggttttttttgtgtttgggtttgatttttggtagtagtgagttgtttttgattgggagtttgtgggggatggtttgtgttgttttttttttgtttttggttgtagtgtttttggtgattgggttgggattgggtatttttttgggtggggattttttggtgggagtttgggggttgttggtgggtggggtgggtatggttttgagggtatggtttttgttttttttttttgtgggggatgaagttgggggtggttgtttgttttggtttgattttttttggagttgttttttggtattggggttgggtttggattttgggtttgtagtggaggtaatgtttttgttgagggttgtttgtggagattttatttttttttttgttgaggtgttattgttggttgtgtttggtgttattttgttgttgaatattgtgttgtttttggtagtgtttttagggagtttggtgtttgtgttgggggagttggtggatttttgtgattttttttgtttttttgatttatggttgttggattttttttttatgttgttttagttattgtaattttttgttttgggagtaattatgattggtttgtttatttgtgtttttttagttttatttaagtagatgtttaaagttagtattttagtagggtgggtgtgatttttggggtgggttgtgtagtttgtttgtgtggagttggttgtgtgtgttgtgtttttggttggaggtttatttggtaaattagatgtgtttttggggggttggttgtgggtgttgtggggttttagggagttttttttggtatatatattgggggttttgttaggggttttgtttagtttttttgtgggttgtttttgggtgggtgattttggtgtattttttatatttaggaaagttttttgtttgtggttagtatttggtgaagtgtttttttttggattgtgggtgggtgtttttgtgtttttttgtttggaggaattttttggtgaggaatgtagttgtttggtagtggtggtggtatttgggaaaggttttttttttgtttttagaggttttaattggggtgaattatttttatggtattgttgtatagttatagttgttgtattgttgttttagtgaggtgatagtttggtgttagggggggttgtggggttattgtttttggggagtttgttttttgttttttggggatttttttgtggggagttttttttgtttgtgtttgtttgttttagttggttgttttgagatttgttttttttattttttttttttgggagtttaggagaggttattatatttttgggagagagtggtttggtatttgatttggtgggattttttaatttgtttttattgtttttttttttttttgtagtgaatagagtgttaagtttttttaaaattggtttttttttgttgttttttggaggttgtgttttggattgaaaaataaaagggatgaggagggaatatatgagaatttggtgtttttttttttagatgtatattatagaattattagttaaaatgataatagattagagtttttaattgaaaatgataaagttatgtttatgttatatttattttaataaaataaattttggttttatttttgaattttgtttaaatattttaagtttttggtagtagttagaatagtattttttttgaattataatttttgttttttaaaggaaaatttgaatggtttaaataattatatatataaaataaatagttttttgttttttttaggttttttatttttttttttaataaagatgtaatttataaatagttgtgtatgtgattatggggtagtagtaaatatattaaagtattttaaggtggatttttttttgaaatattgtttattttttttgtaggagggaaggaggatgaagaaaaaaaattagttttagtagtttttttttttagaatagtaagaagttatttgggtttaatatttagtatttgtaatatgaaaattttaagtaagtttggaggaagtaagtatttgggttttgttttagttgga

SEQ ID NO: 2332 - DNA, 2382 bp, Artificial Sequence
  chemically treated genomic DNA (Homo sapiens)
ataaagttattattttttattttttgagaagtttattattttttaataggttaagtgtttttttgtatatttaggggtttgtattttttttgtttagatttgtttttttttgtttattgggttttatgtgtttttatggttgggttaatgattaatatatagatatatttaaagtttttttttatttgtgtttttttttttttttttttattgtttgtttttgtttgtttattttattttatatttattattggtttttatttggggtttgatgttataaaggagtattttgaggttttgttttattttttttagtgtttgggttaattttttttaagtgttggtggtatatatttttttttttaggaggtttagaggtttgattatgttgttgttattgttgtattgaaggaaaagatttttatttaagaagatttgtgttttatattagggttgtttaggtttggataatgattttatagtgaagttgaagtaaagagagtgattatttgtgagataaagatgtaggtgaggtttaggataggggaagaggtttattagaatttgtgtttttgtgatttaagattttttggattgggttaggttagtagaggtggggtagttttattttagatttttttaattttttggatttttgtttttatttttttttgattgtttgggatgagatatttgatggtattagggatttttggggtgtatttagtgttaatggtgttaataggaggatttatgttataagtatttttagtaatatttattaagttttgaggtataaaatagataagttagtgtatgattttttgagatttaaattttagttgaatatatatgatatttaatagaaaggaaaaagaggtatttattataggatatatgttgaatttttgtggggttttagatgtttaggaaagtgatttggagtagaaggtggggggtagtattgtagaattgttttttgtgagttagtgttttgtttagggttttaggttgtggttttttatgaattgggtgtaatattttagggatttttttttttatgttatttttaagagtaggtatttatttgtttgaagtttgtatgaagttttatttgtttattttttattttttttttttttttttgtttttagttagtttttgtgtttaggatatttattaattatgatttttaaggttattagtagtaatagtagaaataaaagaaggtgtatagggttagaagttagggatattttttgtatattgtggagagtaataggtaggaagttgggtgtgtatatatttatttttattggtatggtgaagaaatgttatttaatagtgtgggtgtgggtattgtttaaattttttattttggaataattgaggttaggtttgtagagatttaattaaagaataattttgtgaagagagtgttttttaagtatttagaatataattatttattgaaaaataaaagaagatatttaaaaataaaattaattttgaataaattttttttttttttttgtttttgttgtttttgtaaaaaaaattttttttggtgtgagtaggatggttggaggttatgtgagttttttttttttttttttagtttttttttttttttttttttttgttttttttgtttttttttttttttttggtattttttgtttatttttgtatttttttttattgttattttttttttttttattgtttttaatttgtttaaattttttttttttaaatggttgagatttttttttattaagtatattttagtattaattaaattagttgtaaataggtagtaagtggtttattatgatagatgggttttgtgtgtgtgtgtgtgtgtgtaattgtaataaaatatattgagttatttaataaatatagagtgtttattatatgtattaggtattattatagatgttaattaatgaaattgaaatggttaggtttttatagtggtttatgtttataattttagtattttgggaggatgaggtaggaggattatttgaggttgggagtttaagattagtttgggtaatatagtaagattttatttttataaaaaaaaatttttttttattatattttaagttttgggttatatgtgtagaatgtgtagttttgttatataggtatatatgtgttttggtagtttgttgtatttattaatttattatttatattaggtattttttttaatgttattttttttttagttttttattttgtgataggttttggtgtgtgatgtttttttttttgtgtttatgtgtttttattggttaatttttatttatgagtgagaatatgtggtatttggttttttgattttgtgatagtttgttgagaatgttg

SEQ ID NO: 2333 - DNA, 2382 bp, Artificial Sequence
  chemically treated genomic DNA (Homo sapiens)
taatatttttagtaagttattataagattagaaaattaaatattatatgtttttatttataggtgagagttgattaatgagaatatatggatatagggaggggaatattatatattagggtttgttatggggtggggggttaggagaggggtaatattaggagaaatatttaatgtaggtgatgggttgatgggtgtagtaaattattagggtatgtatatatttatgtaataaaattatatgttttgtatatgtaatttaaaatttaaagtataataaaaaaaaatttttttttgtagagatggagttttattatgttgtttaggttggttttgaatttttggttttaagtgatttttttgttttatttttttaaagtgttgggattataggtatgagttattgtgagggtttggttattttagttttgttaattagtatttatgatagtgtttgatatatgtagtagatattttgtgtttattgagtgatttaatatgttttattataattatatatatatatatatatataaaatttatttgttatggtagattatttgttgtttgtttgtagttagtttaattaatattggggtgtgtttggtgagagaaaattttaattatttaagaggaaagagtttgaatgggttagggatagtgggagaggggagaatggtgatgggagaaaatataggaatgggtagggggtattaggaagaaagggaaaagtaaaagaggtagggaggagaagggaagaggaaattggaggaaaggagaaggagtttatataatttttaattattttgtttatattagagggggttttttttgtaggggtagtagggataggagaggagagagagtttatttaaagttaattttgtttttaaatgtttttttttattttttaataaatgattatattttgaatatttggaaaatattttttttataaaattgttttttaattgggtttttataggtttgattttagttgttttagggtaaagaatttgggtagtgtttatatttatgttgttggataatatttttttattatattagtgagggtgaatgtgtatatgtttagttttttgtttgttattttttatagtatgtgaagaatatttttgatttttagttttgtgtgtttttttttgtttttgttgttgttattaatagttttggagattatggttggtgagtgttttgagtataagaattggttgaggataaggaggagggagaaaggtagggggtaggtgaatggggttttatgtaggttttagataagtgggtgtttgtttttaaggatgatgtgaggaagaggatttttgggatgttatatttagtttatgggagattatagtttgaggttttaggtaaggtattggtttatagagggtagttttataatgttattttttgttttttattttaggttatttttttgaatatttgggattttataggaatttagtgtgtgttttgtgataaatgttttttttttttttttattgaatgttatgtgtgtttagttagagtttaagttttaggaggttatatattggtttgtttgttttgtgttttagaatttggtagatgttgttaaaagtatttgtgatatgaatttttttgttaatattattaatattaagtgtattttaggggtttttggtattattaagtattttattttagatagttagggagagatgggaatagggatttagaaggttgagggagtttgggatggagttgttttgtttttgttagtttggtttagtttagggagttttgggttatagaagtgtaggttttaatgggtttttttttttgttttggattttatttgtatttttgttttataggtggttattttttttgttttaattttattataaaattattgtttagatttggatagttttggtgtgaagtgtaggtttttttgaataaaaatttttttttttagtataatagtgataataatatggttaaatttttgggttttttggggaagaaggtatatgttattagtatttggggagaattgatttaaatgttgggagaagtggggtgagattttaggatgtttttttgtgatattaaattttagataaagattagtggtaagtgtggaatggggtgggtaaatagaggtaggtagtaagagaggggagggaagaatatagatggggaggggttttaggtatatttgtgtattgattattggtttaattatagaggtatatgggatttaatgggtaggaaagggtaagtttgggtagaaagaatatagatttttaaatgtgtagagaaatatttgatttattggaggatgatggattttttaaagagtggaggatgatggttttgt

SEQ ID NO: 2334 - DNA, 2498 bp, Artificial Sequence
  chemically treated genomic DNA (Homo sapiens)
gattattatgtttttatttgttttttatattaatgtgtttatagattttatgtatgggggttttattaaaatatggatttttatttaggaggtttggggtttgagattttgtatttttaataggaggtgaatttgttgttagtttatgaagtatatttttgagtagtgagattttttttagaggatattgagtgagttgaattaataatggtagtttttagtaatttagaatagtgtttggtttatataaatatagttattgttttatagttattaatttatttaattttttaatattattatgatgtagattttattatttttatttgatagtggaggaagttgaggtatagaggggttattaatataattagaggatttttgaagttttgagttttgttagtttttttttgattttaggaagggttttttaaggtttatatttttgattttatgtttattttttataggtttaggggtggttttaaggtggattgagtgagtttaattttttatttgtttttttttagttttgtttttgattttgatgatgatgggggtgtttttttattttttttagttttgttttttgtgttaatagtttttagttttgtgttgggttttgttttggttagaatttagttaattttaggggttgagtttagtatgttttagggtattttttattaattttgttttgttttttgatagtttgttaaggttttgatgtattttggggagtatgatagtaagatgtagttagatgaattttttggtatttttgatatttttttgtaggtttttttagaggtttggtaggatttagaggttatgaggaggaggaaggaggaggaggagtggtgggtgtgtatggaagttatggtgaggggtagtgttaggtttgggattgaggggagatgggtgttatttggggagaatatttttaaattggggtgtgtgggaggagggtagagattgaggaattgaggaatattataggggttggatgttagttttaggagagagaaatttttttttagtttgagggaagagagtggtgtgaagttgggggtttgtatgttttaggtaggaagaaagtggggttaatagatataggtaggtagtatgattatggtttaggagttagtttagggttggggggttgttttggttttagtgtttttttttgagagggtttttatttttggttttttgtttgtagttgaaggagtagagggaatgtgagtggtggtagtggtagtggaaggttttggttgtaggtagtttgttggaggagggaggagagtttgatgatttggtgttggttttgtgttttggggaggtttttgataaggatttatgtaagtttaagtgtagttgtaagtgattagggagttaggttttggaagttatttgggagtgggtaataaattggttaaattattgatttggggaattagttatataggaggttgggagatagggattggtgagaatggggttgagtggaggaggtggtgatatttaaattatttggtgtttggtttagagttttgggttgggttttgggatggggggttgtgtgtggttggattaggtgtttttttatgtttattttaaggggttttttttattttttttttatatgattttttttgtgttttggttttaggtattattttgaggttgttttggatggttttaggttaggtaattttaggttgaaggggttttgttttttattttttattatgggtatttatgtgttggtatagaatagttttagatttagattggagaggtttatagttttgtttagagtttttgtgtagtatggggagtaatgatggagggagtttttgagagggaatttggtgagggaatttagattttttttttttaaggggaggtttaatagaatattgatttgggggtaaattttttttttgaatgggaatagaggaggtattatatattttagttagattagttttggtaggttttagagaatagttaatgttggaaggatgatgtagggattaaagttattaggatagagtagtagtgtttgttttttatgttataagttttttggtttttttttgtatgttttaagtattttttttttttttttttatttttatttttattttgtttattaatttatagttttagaagatttattttgggtttttatagttatggtttattattaggtgtttgatgaatttggtgaggggtttaagatagattttatgtattattatattttatgttttttgggtattttttatgtttttattttttggatatttggttattgttgtgaagttagatagtgattttaaatgttgttttggagttttttatagttttttagtagagggtagtatttgaatgtttagttttattttatagttttttattttatataaattgtttaggtttttttattttttttttaatattagttttaaggtagaagttatagtagtttt

SEQ ID NO: 2335 - DNA, 2498 bp, Artificial Sequence
  chemically treated genomic DNA (Homo sapiens)
gaggttgttgtggtttttgttttgaagttagtgttagagaaggggtgggagggtttgagtaatttatatgaagtagagaattatgggatggagttaagtatttaagtgttgttttttgttgaggggttgtaggggattttaaggtaatatttgaggttattgtttggttttataataatggttaggtgtttaggagatggggatatgggagatgtttaaaaggtatgaggtgtggtgatgtatgaggtttgttttgagttttttgttagatttattaagtatttggtagtgagttatagttgtggaaatttaaggtgagttttttaggattgtggattagtagataggatggaggtgagggtagagaaggaagggaaagatatttaagatatgtagggagaggttagaggatttgtgatatgggaaatagatattgttattttgttttgatggttttggtttttgtattatttttttaatattgattgttttttggaatttattagagttgatttaattagaatatataatgttttttttgtttttatttaagaggaaagtttgtttttaggttaatgttttgttgagtttttttttgagagaagggagtttggatttttttattagatttttttttaggggttttttttattattgttttttgtgttatataggaattttggataaggttgtggatttttttagtttagatttggaattgttttgtgttagtatatgggtgtttatggtaggggatggggagtagggtttttttagtttggggttatttggtttgaggttatttaaggtagttttagaataatatttggggttagggtatagaaggaattatgtgaaggggagataagaggagttttttaaggtaagtgtggggagatatttggtttagttatatatagttttttattttaggatttagtttaaggttttaaattaagtattaaatggtttaaatattattattttttttatttagttttatttttattagtttttgttttttggttttttgtgtggttagttttttaggttaataatttagttggtttattgtttgtttttgggtaatttttagggtttggttttttgattgtttgtggttgtgtttgagtttgtataagtttttgttgaagatttttttagagtgtagggttgatattaggttattgaattttttttttttttttagtgagttgtttgtagttaggattttttgttgttgttgttattgtttatgttttttttgtttttttagttgtgggtggggggttaaagataggaatttttttagggagaggtgttgaggttagggtagttttttaattttgggttaatttttaggttatggttatgttgtttgtttgtatttgttggttttattttttttttgtttaggatatataggtttttagttttatattattttttttttttaggttgggaagaagttttttttttttggggttgatatttaatttttatggtgttttttagttttttagtttttgttttttttttatatattttagtttgggggtgttttttttaagtagtatttgtttttttttagttttaggtttggtattgttttttattatggtttttatgtgtgtttgttgtttttttttttttttttttttttttatggtttttagattttgttgggtttttgagaaggtttgtaagaaggtattaaagatgttaaagaatttgtttggttgtattttgttgttatgttttttgaagtgtattaaggttttggtgaattgttaagggatagaataggattggtggagagtgttttggagtatgttgggtttagtttttgaggttagttgggttttagttagagtagagtttagtgtaaggttggggattgttggtatagggggtagggttggaagaggtgagaagatatttttattattattaggattagagataaggttaaggagaggtaggtaaagagttgggtttatttagtttattttagagttatttttgggtttgtaaggggtaggtatgaggttaggggtatagattttgggaagttttttttgaggttaggaagaggttggtagaatttagaattttaaagattttttagttatgttaataatttttttgtgttttagttttttttattgttaaatgggaataatagaatttatattatagtggtgttggggggttagatgagttggtggttataaaatagtggttatatttatataggttaggtattgttttgagttattgagagttattattgttaatttaatttatttagtattttttaagaaagattttattatttaaaagtgtgttttatggattagtagtagatttattttttgttagaaatgtagaattttagattttaggttttttaaatgagaatttatgttttaataagatttttatatatgaggtttatggatatgttagtgtgagaagtagatagaggtatggtaatt

SEQ ID NO: 2336 - DNA, 2351 bp, Artificial Sequence
  chemically treated genomic DNA (Homo sapiens)
ggttttgtttttttatgttttagtttttttattgataaaagaggtgataattatatttattttatagggttgttgtgaagattgaaataataagggtatggggtgttagttattattattttttagaattattattttttagattgagatttttttgtagtagatggttgatattttaaagttttgtttgttttttatgttataatatggttataagttttttgatagtagggagtatattagtttttgttttttaatatttaagattggtatttagtatatagtagatatttaataagaatgtgttgaatagagttagatagagttgaattttttttttttttgaggagtattttttatttttttttttatttttttttttttttttttttttttttttgtttgatattttttttgtttgtttttttttttattatttttttttttaattattatatttttttttatttttttttttaattattttttttattttttttggggttttatattgatatgtgtgtttttttttttggttgttttatttttagagtatgtttttattttgttttaaatttgtttttaggtttagtttttttgggaggttttttatggtttagttttgaggatattgaagtattagggttggatgggagttttattatttgttttattttagtttgtttattttttagatgaagatgttaaggtttaaagtattaagaaggttgttttatggttatgtggttaatttgttttagagttaggattagaatttgggtttttttatttttggtttaatgttttttatattatggtatttatagaggtagtggtagaaatatagtaggagattattgaatgtttgttagataaatgaatgaatgaatgaatgaatgttattggaagaggagagttatttagataatattatttgtttttttgtagttttttttgatttgttttatttttgttttattttttatatgtttggggtttttagaggaggtttttggtattgttagttttgtttgtgatttttttattatttttggggagttagtggtttttttttttttttttatttttgtgtgtataaaggttatttttattgttttttgtggaaatatttttagaggattgagggtattttttgagaataaagtttttttttggggagtgttggttagggtttttgttattgtggtttgttgtttgtttagagttttgtgttttgataagaataaagtgattttgattggaattttgtagtttgttgttggttttgtttgtttttttgtagatgtgtagttttattttggttttttttttttttaaggaaaggggagttgtttttaattgatggtttttttttaaagtttagttttttttttttttatgttttttttttgtattttatttggtattttttaaatattatttgttgttgtagttttttgttgaattgttttggttttaattttattttttgtaattggagtttgaataatgagttattttataggaagattgatttgggtattagggtattatttagtttgttattataatagttaattttggttatatgtttagttgtgaaggggaaatgggttagtttgttggagttttttaaagtatggagttggtgagtagggggatggggtattgggttgaggggtagaggtggtagatgggtaggaggaggggttttggtttgttttagtaaaaatgtttttatgtttataatatgatattgtgaaagaaattgtaaggattgaaaatggatattatttttttttaaagggataagaagagtagagtttttaggttgtagatgttaggagtggaaaggttttttttaaataattgagtgagtgagttttaaattaaagagtattttagatttattaatattttaggatgataaaatagtggtgtatttttatttgttatttttatattagatttagttgtagaaattttagtggtttttttatttattttttttatagtattttttataatttaatatttttttttttatttattttaagtgaaattttgtttattttttttttaattagattgaaaattatatgagggtaagaattatgtttatgttgtttatttgtttttttagggtttgagatagtgtttggtattttatgatatttaatagatatttgttgaatgaagtgaatgagtattagagggtattggttttatggatttgggtgtgggggataaggtatattatgtgtagtggtttttgatttttttgtatatgtatggtggtttttgattttttttatgtttatggtggtttttgatttttttgtatgtgtata

SEQ ID NO: 2337 - DNA, 2351 bp, Artificial Sequence
  chemically treated genomic DNA (Homo sapiens)
tgtgtatatgtagaggagttagagattattgtgagtatgaggggagttagagattattgtgtgtgtgtaggggagttagagattattgtgtatggtatgttttgttttttatatttagatttatgaaattagtgttttttgatgtttatttattttatttaatgaatgtttattgagtgttatgaagtgttaggtattgttttaggttttggggaaatagatgagtagtatagatatggtttttgtttttatgtagtttttaatttagttgaggaagagataggtgagattttatttaaagtaaatggaaagggaagtgttgggttgtgagaagtgttatgagggaaataaatgggggagttattgaaatttttgtagttgggtttggtatgggagtggtgagtaaggatgtattattattttgttattttgaaatattggtgagtttggaatgttttttaatttggggtttatttatttagttatttaagagagatttttttatttttggtatttatagtttgaaaattttgttttttttgtttttttgaggaagggtaatgtttatttttaatttttataattttttttatagtgttatgttgtgagtataaagatatttttgttgaagtaagttagaatttttttttttgtttatttgttatttttgttttttagtttagtattttatttttttatttattagttttatgttttagaaagttttagtaggttggtttattttttttttatagttgagtatgtaattaaaattggttgttgtaatggtaaattaaatgatgttttaatatttagattaatttttttgtgaaataatttattatttaggttttaattgtagggaatggaattaaaattagaatagtttaataaggaattgtagtggtagatagtgtttgggaggtgttaggtgggatataggagaaaggtatggagaaggagggggttaggttttggggaggggttattagttgaagataatttttttttttttgagaggagaggaggttagaatggggttatatatttgtaggaaaataggtagagttagtaataagttatagggttttaattggaattattttgtttttgttaaaatataaggttttgagtagatagtaagttgtaatgataagagttttggttaatattttttaggaagaggttttgtttttagagaatgtttttggttttttaaagatatttttatagagaataataaaaatggtttttatgtatataggagtgagaggagggagaaaggttgttgattttttaggggtggtggaagggttataggtaagattaatagtgttaaagattttttttggggattttaggtatgtggagggtggggtaggggtagagtaggttaaaaggagttgtagaaaaataagtagtgttgtttgagtagttttttttttttaatagtatttatttatttatttatttatttatttaataagtatttagtggttttttattatgtttttgttattgtttttgtgaatgttgtaatgtaaagagtattgggttaagagtgggaaagtttaggttttaattttagttttgggataagttggttatatgattgtgaagtagtttttttggtattttggattttggtatttttatttgaaaagtgagtagattggaatagaataggtagtgaagtttttatttagttttgatgttttagtgtttttaaagttgagttatgggaggttttttaggaggattgagtttggaggtaaatttggagtagaataggagtgtgttttggagatggggtagttagggaaaggggtgtatatgttagtgtgaagttttgaagagagtggggaaaatggttgaaagaaagagtaagagggagtataataattagagagagaggtggtggagggaaagatagatagagagagtgttagataaagagagggaagaagggagagagggagatgggagagagaatggaagatgttttttagaagaggaaagaatttagttttgtttggttttatttagtatgtttttattgggtatttattatgtgttaggtattagttttaagtattgaggaataaagattaatatgttttttgttattaaggaatttatgattatattataatatgaaaaataagtaaaattttaaaatgttaattatttattgtaaggggattttgatttagaagatagtaattttggaaaatagtaatagttaatattttatgtttttattattttaatttttgtagtaattttataaggtgggtataattattattttttttattggtgaggaaattgaggtatgggggggtaaggtt

SEQ ID NO: 2338 - DNA, 2487 bp, Artificial Sequence
  chemically treated genomic DNA (Homo sapiens)
gaggtgggaggattgtttgagtttaggagttttaggttatagtgtataatgatgattttattggtatatagatgaaaaagaaaaagatatttgaaataaaaataaaaatatagtgtataatgattaggtttgtgaatagttattgtattttagtttaggtagtatagtaagattatattttttatatgaaattttattagaatgaaatttatggtttattatatagatgttgtttatttgttgtaggaaaaattgaattatagatgatttttaaaattattagagtaaattatttaatttatttgtgtatatatttttagattttttatatatgttgtaaaaaaaatagattgtattattttgttggttttttaagttgttttttgtaagtaatgtattgtgagtatttttttatggttataattattatatataaaagaaaaaaataggttttataataaatagttaaaagatattttgatttgaaattaatgaagaagggttttttggttttgtttttgtattttttgtataatgttgaaattggtaattttgtagtaaatattaatattttttgaggatttgttgaagatgaatgtgataaaaaataagaaattttattttttttattatatagttttaattaatattgttggttttgtttgagattaagtaaatgttggttttagtgtttaagtttttttttggggttttatggttttgggtttggtatttttgttgggtattttgtagggtttttgagatgtgttgtgatttatgggattttatggaagtttttttttattgtaagttttttggaggtagggaaaggagttgggatttgagtttagttggttttaagagaagggtggtggtttgtatggtgtgggtggttttgtttattgtagttggggagatgtaggttggttgtttgggtgtggtggtgggaggggttgtgggtttgtggggtggggtggtggttttgtgttgttggatttttatggagatgattttgtttttgttttatttttttttggagttgtggtttgagttggtgtatttgatttttattgtgtggttttaagaggagatagttgttattgtattgggttttatagttattttttagaggtaaagtttgtggtttttgagttgttagttttttttttggggttgtttggggtatattgtttgggttggtttagttttttagtgtagttgtttaggaagattttaagtagtgttgaggggtgtagggttttttttttgtgattttggagttttttagtagttttggaattaattaagattttgaagaggttttggggagaaataaaatttatgtgtagggtagggtttgtattgggttatgttaagtaaatttttattttttttagagaattgatttgggattgaagtaaagtttttgaatattttggaaaatgttgatttttataggtttatattaattgtttttttttttttgatagttttttttttttttttttttatggggtttaaaaatgtagggagtagggtgggggttgggttgggggaatgagggaggaatataaaaaatttattgtgaatataggttttggttataaggatagttttaagagttaatatgttaagatttgatgagtaggataaataaaatagtggtattttaaaatattgatttaaaaatattgatgttgtgtttattaataaattttgtatatgtattagaatataatattttgatattattggtgttaaagtttattgtaatttatgtaattgtatttaagtttgttaaagtttgttttgtaggaattgatatttgtgttttatagaaattttaaaaattatgttttataaatatttattttagtgggaggaagaagggttaaggatttggaagttttatagtaatagttgtattttgtttgttatagttttagttttatagttttaaatttataaattagtgagtatatttattatttgaaaatattagtataagtatggtattttttattattgtttgtaagattaatagtttaggtttttttaaaatatgttattatttttattatttattgtttagtgtgtatttaataaaaattatatattggtatgtagttttatatgttttaaatgtgggatatttaatttaattggaattgttttttatttttgtttttttattaattatatttattttttttttatttttgtttttttgtgtgatttttagaattagatatttttttggaggtatatttaaggaagtaaatttttgataaataaaggaattattgtataatttgtatgtgtgaattgtagaagtatgtgtatgtaggtatatatttttgttgaggagtagtgttttaatttttaagttattttgtttattgtagtggagaaggattagattaatttgtatttttttagttgtataatagataatttgtggaaatatagttaattgatattattgtt

SEQ ID NO: 2339 - DNA, 2487 bp, Artificial Sequence
  chemically treated genomic DNA (Homo sapiens)
agtaatgatgttaattaattgtgtttttataggttatttgttatatagttggagaaatgtaagttagtttggtttttttttattatagtagatagagtggtttagaaattaaaatattgttttttggtagaggtatgtatttatatgtgtgtatttttgtaatttatatatgtaaattgtgtaatgatttttttatttattaaaaatttatttttttaaatatgtttttaaaaaggtatttggttttaaagattgtataaaagaatgggagtagaagaaaagtaagtgtgattggtgaaaaaatagaaatgaaagataattttagttgagttaaatgttttatatttagggtatgtaaaattatatgttagtatataatttttattaagtatatattaagtaatggataatgaaaataatggtgtgttttgaggaaatttgggttattgattttataggtggtgatagaaaatattatatttgtgttggtatttttaaatggtggatgtgtttattgatttataagtttaaagttataaaattaaagttgtaataaataagatgtaattgttgttataaaatttttaagtttttaattttttttttttttattgaaataagtgtttgtagagtatgatttttgaggtttttgtggagtataaatgttagtttttgtagaatagattttaataggtttggatataattgtatgggttgtagtgaattttaatattaatgatgttaggatattgtgttttgatatatatgtaaagtttattaataagtatagtattggtatttttaaattgatattttaaagtattattgttttatttgttttgtttattaaattttagtatattaatttttagagttatttttataattaagatttatatttatagtagattttttgtattttttttttatttttttaatttagtttttattttattttttatatttttggattttataggaggaaagagggagagaattgttagaaggaagaaggtagttggtgtgaatttatgaaaattagtgttttttaaagtgtttaagaattttattttgattttaaattagttttttggaggaggtaagagtttatttggtatggtttgatgtaaattttattttatgtgtggattttgtttttttttagagtttttttagaattttggttaattttagagttgttaagggattttagggttgtggagggagggttttgtgttttttagtgttgtttagggtttttttgggtgattgtattgggaaattaagttggtttaggtgatgtgttttgggtggttttaagaaaaagattagtggtttagaagttatgggttttatttttaggaagtggttatgaggtttggtatagtggtggttgtttttttttggaattgtgtagtgaaaattgagtgtgttaatttgggttgtagttttggagaggggtggggtagggatagggttatttttatagggatttaataatatggagttattattttgttttataggtttgtagttttttttgttgttgtgtttggatggttaatttgtatttttttagttgtagtgagtaaagttgtttgtgttgtgtgagttattgttttttttttgaggttagttaggtttgggttttggtttttttttttgtttttagggagtttgtggtgggagaaagtttttgtggggttttgtgggttgtggtatgttttggaagttttgtgaggtgtttagtagaggtgttagatttaaggttgtgggattttaagaagagatttggatattgaagttaatgtttgtttgattttaaataaagttagtgatgttaattaaggttgtgtgatgaggaaagtggagttttttattttttgttatatttatttttagtagatttttagaaaatgttaatatttattgtagaattattaattttagtattatataggaggtataaaaataaaattaaaaaatttttttttattagttttaggttaaaatgttttttaattatttattgtgaagtttgttttttttttttgtatgtaatagttatggttatgaaaagatgtttatagtatattatttataaaaagtagtttagaaaattagtagaatggtatgatttattttttttgtaatgtgtgtaagaaatttgggagtatgtatataaataggttaaatggtttgttttggtagttttaaaaattatttgtaatttaattttttttataatgaataagtaatatttatgtaataaattataagttttattttagtaaagttttatatgagaaatgtgattttgttatgttgtttaggttggagtgtagtggttatttataggtttggttattgtgtattatatttttatttttattttaaatattttttttttttttatttgtatgttagtaaaattattattgtatattatagtttagaatttttgggtttaagtaatttttttgtttt

SEQ ID NO: 2340 - DNA, 2392 bp, Artificial Sequence
  chemically treated genomic DNA (Homo sapiens)
gagtatttgttttgtgatagtgtaatgttgggtgtttgtggttgtgttgggaaaatagatgtgtatatatattttttatgtggtgggtttagagtgatatgaaagtttttgagggtgttgtgtggggttttgtgggggttttttagaggtggtgggagtgggaagggaaggatagttggagggatgagggtttggtttggttgtggggtgggagagaggatgggtgggatgggtagtggggttgtaggtatttgagatgagatgttttgttggagagtgaggttttttttagttagaaaatgggagttattgaaagtttaaaaataaagaaattatatgggtagtttttaattttggtgagtttgattttggtgagttttgtgtggtaggagatgggttggtaggagtgggaggaaggtttttgtgagtgattattaggatatgaaggtaggaagtttagatatgttgatttttttatatgaagtagaaaggagggaggattttatttttaatagagtagtgattttgaagttatggatttgataaggattttagtagagttgagggaggggggaatttagttgtggtttagatgagtattgtaggtggttgagaggggttggggtgtaattaggggatgttttgggatggaatttagtagatagtttgggttggagatagggtttgggaatgggggtaggaaatggttaggtattgtttagggagagtttgtggtgggagaagaggtgaatttttgtggtgtggggagttggtgttgaagagaaaggtggagttgggggatttttatagaagatatgggtttggtgggtaggagggtattttggaattagggggtagagttgttgggaagaaggagggtttgtgttgtgggaggaggatgaggtgtaaagtttaggaaggaaggatttggagttgggttggagttttggagggaggagagaggggaggttggagttggagtgtttattatggtgattgttgtttttattaggtattgtttaggggttgtttatttttttttagtttttatgggggatgttgtgatttgataggtgaggagagtaagttttttagataggttgtttttttaaggttgtgtagtttttataagtttaaatgtgatttgtgttgggtaattttaaaatattgttgttgttagttttaggtggttttgtagggaggggtttttggtgttttttgtgaattggaattggaggttgattttttagagtgtgagaagttggtgggtttggtggttggggatgtgttgtggtgtgtgtgtattgggttgaagatttgttaggttggatgtttttgttgtgagtggtgtttttagaggttgtggttttttgtagtagttttgggtagtttgtagtagggaaatttttggttgagtgggtttagggggagttttggtggttaagtttgttgtgtggttgtagtagaattttgagtttgggtgagggggaagagtagaagttttttttttatatttttggaggttgggggtgtaagattaaggtgttggtgtttttggggttttttggttgtgtttttggaggttagagggtgttggaggttgtaggaagttttttgtgtgatggttttgattttttttattgggaggagatttggagttagttattttttaatattattatgttggtaatgtttgggttttggaggggatatatttgaattttagttaggtataagtaggtaaggtagagaaatgggggtgtagtttttgggggtttgagagttttagaggagttttttatattttagtgtttagtttttatttgttatggtatttttaggatgggaagggtttttgttgatgagttttttttgttggtatagtttttttttttttttggaagttgatttgagtaagtagttggtttatattatattttttattattttttttttgggttttttttttgattgtttggtatatttgttttgatatttatttgtaaattgtaaggttaggtattttggggtttttttttgattgtgtttttgatattttatagagtgtttgtatgtgagatgtttggtggtttgtgattttatgatggttttgttttatttttgttatgtagtgtttttgtaaatttattatgattttattttgttatgtggtatttttgtagttttttggagttgttttttttgaggtttttagtgattttttgagggttggttaatgtaaggtgaattttagttttaaatttttttggggttagaattttttgttagatatgtttatagtttttgtaatttttttttgatgttatttgttaattggtttgtataatgagttatttagtaaatggtgatgtgttttgtttttgttatagtt

SEQ ID NO: 2341 - DNA, 2392 bp, Artificial Sequence
  chemically treated genomic DNA (Homo sapiens)
gattgtagtaaagatgggatatattattatttattaagtaatttattatgtaagttggttaataagtgatattaaggaaaagttgtaggagttatgagtgtgtttaataggagattttgattttaggggggtttagggttggaatttattttatgttaattaatttttaggaggttattgaggattttaaggggagtagttttagggggttgtagggatgttatatggtagggtggggttatggtggatttgtagagatattgtatgatagggatggggtgaggttattatggagttataagttattaaatattttatgtgtaaatattttgtgaggtgttgggggtatggttaggaagaggttttagggtgtttggttttgtggtttataggtgggtgttggggtagatgtgttaggtaattaaggaggaggtttaggaagggggtagtgaggaatgtggtgtgagttgattgtttgtttaagttggtttttggggaaagggagaggttgtgttagtaagggggatttattggtagggattttttttattttgaggatgttatggtaggtgggaattgggtattgaggtgtggaaagtttttttgaggtttttgagtttttagaagttgtatttttatttttttgttttatttgtttgtatttggttgaggtttgaatgtgttttttttaagatttaggtgttgttgatgtgatagtgttggaggatgattagttttaggtttttttttagtgaaggggattaaggttgttatataagaggttttttgtggtttttagtgttttttagtttttaagaatatagttaggaggttttggggatgttggtgttttgattttgtatttttagtttttagaaatgtgggaaggaaatttttgttttttttttttatttaggtttaggattttattgtggttatatagtagatttggttattaaggttttttttggatttatttgattagaggtttttttgttgtagattgtttagggttgttgtagagaattgtggtttttgaggatattatttatggtagggatgtttaatttggtaggtttttagtttgatatatgtatattgtagtatgtttttagttgttaggtttgttagttttttatattttgaggagttagtttttgattttaatttatagaggatattggggatttttttttgtagggttatttggagttgatggtggtagtgttttggagttgtttgatgtaggttatatttgaatttgtgggaattgtatggttttgggaaaatgatttgtttaggagatttgttttttttatttgttaaattataatattttttgtggggattgaaggaaaatgggtagtttttgggtagtgtttggtgggaatagtggttattgtggtggatgttttaattttggtttttttttttttttttttttaaggttttggtttggttttaggttttttttttttgaattttgtgttttgttttttttttatggtatgggttttttttttttttagtagttttgttttttggttttgggatgtttttttgtttattaggtttatattttttgtaggagttttttaattttatttttttttttaatattagttttttgtattgtagggatttgtttttttttttgttataaattttttttgggtaatgtttgattgttttttgtttttgtttttaaattttgtttttagtttagattgtttgttgggttttgttttagggtgttttttggttgtattttggttttttttaattatttgtggtgtttgtttaggttatagttgagttttttttttttttggttttgttgaggtttttattgggtttgtggttttagaattattgttttgttaaaagtggggtttttttttttttttgttttatgtggaaggattagtgtgtttgagttttttgtttttgtgttttgatggttatttatggagattttttttttgtttttgttagtttattttttgttatataggatttgttgaagttggatttgttgaagttggaggttgtttatgtgatttttttgtttttaaatttttagtggtttttattttttggttgagaggggttttgttttttaatagggtattttattttagatgtttgtagttttattgtttgttttatttgtttttttttttattttatggttaggttaggtttttatttttttggttatttttttttttttatttttgttgtttttaggaagtttttgtaggattttatgtggtgtttttgggagtttttgtattgttttggatttattatatggagaatgtgtgtgtgtgtttgtttttttagtgtggttgtgggtatttagtattatgttgttatagggtgggtgttt

SEQ ID NO: 2342 - DNA, 2475 bp, Artificial Sequence
  chemically treated genomic DNA (Homo sapiens)
tggttttggtaatttaatttgtatgggttgtttagagtagggtttttgagggttttgatttgtttgttttttgttgagtaggattaggttttagagagagtaattataggttgggtgtggtggtttttgtttgtaattttagtattttgggaggttaaggtgggtggattatttgaggttagaagtttgagattagtttggttaatatggtgaaattttgtttttattaaaaatataaaaattagttaggtatgttggtgtatgtttgtaattttagttatttgggaggttgaggtaggagaattgtttgaatttgggaggtggaggttgtagtgagttaagattgtgttattgtattttagtttgggtgatagagagtttattttaaaaaataaataaataaataaataaaagagagtaataattttttttagagtagtagttgttattgggatattggaagtagaggttgtaatttttatttatatttagggttttttttttttttttttaaaaataagaaattaattaaattttaatatatatatttataatagtatatgtatgtgatttgtaagtaaatatgtatgtattagaggtatagttttaaaaatttgttattgatagtagtgtatgtttaaaaatgtttggggattgatttagaaaatgtgttttaagatattaatttatatttaaaattattagtttatttgatgtttagtagaatggaaaataaatgtgtaatatgttatatatggtgtttatattttagttgtttgttttttttttatttttatgtttaatagtttttatgtttattttaggtttggagtatgatgttttgtatgttaatttaaaataaattttttaaggaatttagatttgtaatgtaatgattttgaatgtagattttgggttattattttttgggaatgtttttattatattatgaaattgtatttattgttgtttatatatatatttttgataattaagtaaatttttgaatattttttttaagatttaaaatagtaaaatgaaatttaatattattataaagttattttttggtaaataatttaaggaagataatttttgtatgtattttttttttaatagtttaggttaggtttttatatatagttttttttaaaatatttgagtgtaattatttagtaggttattggttgtaattttgagaaataaagtagtataatgtgatttgtatagagaatgattttatttattatgtttttaattatttatatttgttttaaattaaaatgttttggttgaatgtaggtatttgaaggaaggtttattttagtttagttttgtttttaatgtttgtgatatatagagtatgtgtgtttagggagaggttgtgtttagtgaagtagttgggtttttatttttatagggtgatattttaataggattttagttttttggggagttattttattgtgttattgttgttgttattatgtagggtaatttttttttttttttatttatgattttattttggtttgggtatttttatttgttttgtttattgtttttttttgggttttttgttttttatgagaattattaagtaaaataagaataaaatgagttttgtaaaataaggtattttgtggatatttgtgaggtaaaaagttgttttttagtagtttgtggtagagtaaattttttttggtttgattattgatttatttgttgttttttgatgggttgttttgaggggttgtgagggtaaggttggttaggttagttgttttgatttattatttgatattgatgttttatttattttttttattttgggttatgatataaatattaggttttgttttttttgttgattagtgattggttattagttgagaagtttgtttttatgaaattttgtttttattgaattttagaatagttttggttaaagttgttatataaaaaattaaattttttgaatatgttagttttgtgttgagattattggtttattttttggttgtataaaattagtttgttttatttattagggggttagtttggattttaagtagatttgtagagaggatttggtggatatttagatgggtatataaatgtgtttaggaaatgttgagtaaatatgaatgatttgtttttttagggttgatttatttatggagttaagagaatatgttttgtttatgagtaaggatatttttttttttataaatatagattaattttttttagtgaaaatattaaagtataaaatatatttttagttttaaggatgatattaattatagaatttatgattatgtaagtttttttttttattataagtattaaattaattttggtttttaattttaaaatgtataaaattaattataaattaggttttatttttattttgggatatggaattaagtatattagaattgtagagatatatgtggttatgtttaattt

SEQ ID NO: 2343 - DNA, 2475 bp, Artificial Sequence
  chemically treated genomic DNA (Homo sapiens)
aggttagatataattatatgtatttttataattttaatgtgtttaattttatattttaggataggaataaagtttaatttatgattgattttatatattttagggttaaaggttaaagttaatttaatgtttatggtaggaagaaaagtttatataattatgaattttatgattaatgttatttttgaaattaaaaatgtattttatgttttgatgtttttattggaaaaagttgatttatatttgtgagaaaggaagtatttttgtttataggtaaagtatatttttttagttttataaataaattaattttaaggaaataggttatttatgtttatttagtattttttgaatatatttatgtatttatttaaatgtttattaagttttttttgtaaatttatttggaatttgagttgattttttggtggatgggatagattggttttatgtagttagaagatggattaataattttagtataaagttggtatgtttaagagatttaattttttatataatagttttagttaaagttattttaggatttagtggaagtagaattttatgaggataaattttttgattaatggttaattattaattagtagggagggtaaagtttggtgtttgtgttatggtttggagtggagggggtgagtggggtgttagtattaaatagtaaattgggataattagtttggttagttttgtttttatagttttttagagtagtttgttaggaggtagtagatggattaatggttaagttaggggggatttgttttgttataggttattggaaagtagttttttgttttatagatgtttataaaatgttttattttataagatttattttgtttttgttttgtttgatggtttttgtggagagtagaaaatttaagaggaagtgatggatagggtaggtggaaatgtttaagttaaggtaaagttataggtgggaaaggagggaggttattttgtatagtagtagtagtagtggtatagtgggatggttttttagggggttaaggttttattgagatattgttttatgagaatgagaatttagttattttattgaatgtagtttttttttgggtatatatattttatgtgttataagtattgagagtagaattagattgggatgagtttttttttggatgtttgtgtttagttaaagtattttgatttgaggtagatataaatagttggagatgtagtgggtaaaattattttttgtataaattatattgtgttgttttgttttttagggttataattgatgatttgttaaataattatatttaagtattttggggagaattgtatataggaatttagtttgaattattaagaaaaaaatgtatatgggagttgttttttttaaattatttgttagagaataattttataatgatattgggttttattttattgttttgaattttagaagaggtgtttagaaatttgtttaattattagaaatatatgtgtgaataatagtgaatgtaattttatgatgtaatggagatatttttaagaaataatagtttaggatttgtatttaaaattattatattataaatttaagttttttaggaagtttattttgaattgatatatgaagtattatattttaggtttgaagtagatataaggattgttagatatggagataagaaaagaataagtagttaagatataaatattatgtgtggtatgttatatatttattttttattttattaagtattagataaattagtggttttgaatataaattaatattttgaggtatattttttaggttagtttttaaatatttttgaatatgtgttgttgttaatgataagtttttgaaattgtatttttaatatatgtatatttatttataaattatatatatgtgttgttataaatatgtatgttaaagtttaattgattttttatttttagaaaaaaaaaaaaaaaattttgaatataaataagagttatagtttttatttttagtattttagtggtaattgttgttttgggagaggttattatttttttttgtttatttgtttgtttgttttttgagatggattttttgttatttaggttggagtgtagtggtgtaattttggtttattgtaatttttattttttgggtttaagtgatttttttgttttagttttttgagtagttgggattataggtgtgtattagtatgtttggttaatttttgtatttttagtagagatagggttttattatgttggttaggttggttttaaatttttgattttaagtgatttatttattttggttttttaaagtgttaggattataggtagaagttattatatttagtttataattattttttttggagtttagttttatttagtggaaggtaaatagattaaaatttttagaggttttgttttgaataatttatgtgggttgggttgttagaatta

SEQ ID NO: 2344 - DNA, 2437 bp, Artificial Sequence
  chemically treated genomic DNA (Homo sapiens)
tttttaggtattgaagaagtggttgtgaatgaaaatagataaaattagattgagataatggtatgtaaagtgtgatatgaatatgggggttaggtttgtttaatgtttttgttatttttatatgggatgattttaataagatatttatagttaagttgttagaaataaaggtttttttttttttttttagttattttaataaatttgggttatttattattgttgtttagtttgtattgagtagttttagttaagtgagttatggttatattgaaatatttatttggttatgaattgagtgaaggtgggaggttttttttgttaatttttttttttttttaatatattttttggtaatttttatgtggaaaattttattttattataggtttttttttttttattttttagaaggtggtggttttatttaggagagggttgtagattggggttagttttagggtttttgtggtgttattttttttttgtgagggtttttgttgtgttttggtttgttgttgggaggtgttgtggtattggtgtaggagttgttggtaggggtggggtggggttggtgggatggggtagagggttttgtggtggtggatgtggtgggtttggttataggtaatttgtaggagttgagagtgttgtttggtgtgtgggtggttggaggtatggtgttgggtggtgttgaggttttggggttgttggagttagtgggagttagtttttgtttttgttttttgttttttattgtgttgttggttttggtttttgtggtgtggatgtttggtgtgggagagaaaggtattaggtgattttgttggttttttgggatttttgtttatattggggtgggtgttttaggttggggaggatgttgttgggggaagggggtgttgtttttttggtattttaggattgttgattgtttgtggaggagatttggatattgtgttttgttttttggtttgtggtttttgaaaatgtttggtgtgagggggtttttttggggtgtttttttttttgtttggtattagttgtttttttggaatatggaattttgggtgagggaggtggagaatttttttttggggtttgttttttgtttttttgtttgtttgtagtttgaaggaagggtggtgggggtgggggtttgagtattttgtggtttgtggtgtgtaggagggtaggtttttggtttgtggttgtttttgaatgattttgtttttttttgttttggatgatagtattagggtgtagttgtaggagaggggttgatattttttaggagttttattggtgaagttttagtaagtggtattttttggggtttagagagttggtgtgttgtttggtttgggtttagatattagtttatttaagtttattttgggtttttaagtgtgttgtttttggtagattttggggattggaggggaagtgtagtattatttgtgatttaagagggatttgaatgttttaaagttggttaagaatgttttttttgtgaggtagtatgagatgggttatgtggtagtaaagagttattttgggtttgtgagatggagttttgattttattatttgttaggtgtgtgattttggaaaatttatttttttaaattttagtttttagaattttaaattgtaggtattgtatataattttgtagtattgtgtttatgtagtgaagtgatgggaatgaaatgtttggtattgtatttttgtgtgttagatattttttgtgaatttgttggatgttgaatttatttatgtttaggttttgttaggttagtgtaagtggaaagaatttgggtaatgaagataaatatatttgggtttaaggtggttttatttatggtatattgattgggggttttttatttttaaaatattaatagtagttttggtggggtttttgttgttgttgttttgagatagagttttgttttgttgtttaggttgtaagttttgatttttttagtttaattgatttttttattttagtttgggattattatatttggttaattttgaatttttttattttattagagatagagttttattgtgttgtttaagttggttttgaattttttttgttttagttttttaaagtgttgggattataggtgtgagttattgtattggtttgtagttttgtttttgagtgtagtaggtgtgtttatattgatatatgttatattttgttatttttagtatttgtttagtatatggtaataaaaaattttttaaaaattagggatataaattaaaattggggagtattttttgttttttaggttatattggatatgggggaagggtagaagagggatgaagaggaattaaagagattagaaaataattagttgtagtgttgggaggtataaattaatggtaatttttaaaaatgtgaatttattaatttt

SEQ ID NO: 2345 - DNA, 2437 bp, Artificial Sequence
  chemically treated genomic DNA (Homo sapiens)
ggagttaataaatttatatttttaaaaattattattggtttatattttttaatattgtgattagttgttttttggtttttttaatttttttttattttttttttattttttttttatgtttagtatgatttagagggtagaaaatattttttaattttaatttgtatttttaatttttaaaaaattttttgttattatatgttaaataaatattaaagatgataaagtgtaatatgtattggtatagatatatttattatatttaagaataaggttgtagattagtatagtggtttatatttgtaattttaatattttgggaggttgagataggaggagtttgagattagtttaggtaatatagtgagattttgtttttagtaaaataaaaaaatttaaaattagttaggtgtggtggttttaggttgaggtgggaagattggttgagttaaggaggttaaagtttatagtttgggtaatagagtgaaattttgttttaaaataataataataaaaattttgttaaggttgttattggtgttttggggatgagaaatttttaattagtatattatggatgggattattttggatttaggtgtgtttgtttttattgtttaagttttttttatttatattggtttaatagaatttaagtatgaatgaatttaatatttaataggtttgtaaaaggtgtttaatatataagagtataatgttaagtattttatttttattattttattgtatgaatataatattatgaggttatgtataatatttgtagtttagagttttaaaaattaaggtttaaagaagtgggttttttaaagttatatatttaataagtggtggagttagaattttattttatgggtttgaagtggttttttattattatgtgatttattttatgttattttgtgggggaaatatttttgattagttttgagatatttaagttttttttgggttataaataatgttgtattttttttttagtttttgagatttattggaagtaatatatttaaaagtttaagataagtttgggtgagttgatgtttggatttaaattagatagtatgttgattttttggattttgggagatgttatttgttgaggttttgttgatggggtttttgaggggtattggttttttttttgtgattgtattttagtgttgttgtttagggtggggagggatggggttatttggaggtggttgtaggttagggatttatttttttatgtgttgtagattgtggggtatttggatttttgtttttattgttttttttttaaattgtaagtgagtaggagaatgagggatgagttttagaagaaagttttttattttttttgtttgaagttttatattttagggaggtaattgatgttaggtgaagagggaggtgttttggggggatttttttgtgttgggtgtttttggaggttgtaggttagggggtgaggtgtggtgtttgggttttttttgtgggtagttggtgattttggggtgttgagggagtagtgttttttttttttgatagtgttttttttgatttgaggtgtttattttggtgtaagtgggggttttagggagttggtgaggttgtttggtattttttttttttgtgttggatgtttgtgttgtagggattaaggttggtgatatggtggggggtgaggggtgaagatggggattggtttttgttggttttggtggttttagggttttggtgttgtttagtgttgtgtttttagttgtttgtgtgttaggtagtgtttttggtttttgtgggttatttgtggttgagtttgttgtgtttgttgttgtagggttttttgttttgttttgttggttttgttttatttttgttggtggtttttatgttggtgttgtagtgttttttagtggtgagttggggtatggtagggatttttgtgagagagaggtggtattgtggaggttttggggttggttttgatttgtagtttttttttgggtggggttattgttttttgaagagtgggaggaagggggtttatagtagggtgaggttttttgtgtgggggttgttaggaagtgtattgggaggggaggagaattagtaggaggaattttttatttttatttaatttgtggttaagtggatattttaatataattatagtttatttaattggggttgtttagtataaattgaataataatgatgaatgatttagatttattggggtagttggagaggggaaaggaagtttttatttttaatagtttgattataagtattttgttggaattattttatatggaaatggtaaaagtattgagtgagtttgatttttatatttatattatattttatatattattattttagtttggttttgtttatttttatttatagttatttttttaatatttagaag

SEQ ID NO: 2346 - DNA, 2308 bp, Artificial Sequence
  chemically treated genomic DNA (Homo sapiens)
gaggtgggtggatttttgaggttaggagattagtttggttaatatggtgaaattttgtttttattaaaaatataaaaattagttaggtgtggtggtgggtattggtagttttagttatttgggaggttgaggtatgagaattgtttgaatttgggaggtggaggttgtagtgagttaagattgtgttattgtattttagtttgggtgatagagtaagattttgttttaaaaattaaataaaataaaagtatgatgatatttataataataattttttaaatttttataatatttttttattttaatatataaattaattttttaaaagagaaaaatagattataatttttttttttaagttaggaagttttagaaaaatttaatgatttttaagaagtagtaatgttttataaataaggaggagattaatttgagaaataatttagtaataataagggtttttaggaaagggtgagagatggtattgagttagagattttagggtttttgattattattatttttagagttgtaatagatttggtttaggtttttaagttatggtgtattttatttgtaaataatatttaatagtgatgttgttaaatagtagtataaaaatgtggtaagatttttataatttataggttttgttgttgtggtaatatgaaagtgaaaataaaagtatattgttttataattgtatagttttttttttttgtttttagggtagtagatgttaattgaatgtttagatattaataagaatagaaaatttaatatatagatgttgttattgatttgtgatgtttattaaatatttataatttagaggaagtatttttttttttttattggtttgaatttattaatttgattattaaataatgtagtagttttattatttttattattgggatttttttttttgattttatttgttgattgtatttatttatatataatttaggttttttttgaatatggagaaagatatatggtatttgttgtttagttagaagttattttaagttattttaaaatgagttatgttgtttagtattttatttttgaaaattaagagaattgttttttagttaaattgaaaatagtaaatatttagtggtttaaatttatatatgggttttaaagttggggagattattttaggatgaaataaaattttaagtaaaatgaattttaaaataattaatttaagataagttgtttataggagttttattttggttagtttaaatgtaagtggttgtttgtatttgatttattttttatgagatgttataattattgattttttaaatttttaattttatggttattttttaaatttttgttttatatttattttaaaatagaatagttattataaagtttaggataatttaatttttaaaagtagttttaagataagttaataagagggaaaaaaataaagttagagaattttgttattttttaattatttattttatattatgtggtaaagaaattatttttaatttttattttatataaattttattgttttatttttttttttttagggagagaattttttatttgtgttggttattttagatgattattatagatatatttttttttaagtaatatattttatttataaatataataatgaaaagttttttaatagtttattggtaattttaaagttgtaagttttgaatattataaattgtattttatatttttttatagggtttgggggagtgtttgttatatttattagaaggtaagaagttaagtaagaagagagaggagaggaaggaggtaggaaaaagtaagttagagttgtagtaatagtaggagagggtgggttggttgtgtttttataagggagagagaaatttaatatatatatatatatatatatatgtgtatgtatgtgtgtgtatatatatatatatatatatatgttataggtattgatggaggtagtagtttggaggaggtgggggtagggaaaggaatattatatgatatagtaaggggaaaatatatttaagtttttttagttgttgttaggggaaatattttagtagagagaagtagttggaagattttattagattttttatgttttgtttgtttttttggaaatttaaattttgagtatattatttttgttgtaaatgtagttttttattattgttgttttttttgggtagagattagttttttttattttttgggttatttttagtgtggtggaagatttattttttttttttttttttttttgtattagtttaattagtgttaggtt

SEQ ID NO: 2347 - DNA, 2308 bp, Artificial Sequence
  chemically treated genomic DNA (Homo sapiens)
aatttgatattaattaagttagtgtaagaagaagaagaaaaagaagatgaattttttattatattggagataatttaagaagtaagaaaaattgatttttatttaaaaaggataataatggtgaaagattgtatttgtaatgggggtaatatatttagagtttaaatttttgaaaggataaataaaatatggagagtttaatgagattttttagttgtttttttttgttaaggtattttttttggtaatagttagggaagtttgggtgtattttttttttgttgtgttatatgatgtttttttttttatttttattttttttagattgttgtttttattagtgtttgtggtgtgtgtgtgtgtgtgtgtgtgtgtgtgtgtgtgtgtgtatgtgtgtatgtgtgtgtgtgtgtattgggttttttttttttttgtaagaatatagttagtttgtttttttttgttgttgttgtagttttgatttgtttttttttgtttttttttttttttttttttttttgtttagttttttgttttttggtaagtatgataaatatttttttaagttttgtgagaaggtatagggtgtggtttgtggtgtttgaaatttgtaattttgagattgttagtgaattgttggagaattttttattgttgtatttataaataaaatgtgttgtttagggagggatgtgtttgtgatagttatttggaatagttaatataagtgaaaagttttttttttggggaggggaaaataaggtaataaagtttatataagataaaagttagaaataatttttttgttatataatataaaatggatgattgaaaagtaataaagttttttgattttgttttttttttttttgttaatttgttttgaggttatttttgggaattgaattgttttgggttttataatgattgttttgttttaaagtaaatgtggaataggagtttaaagaatagttatggaattaagaatttaaaaaattaatgattgtggtattttatgaagaataaattaaatataaatagttatttgtatttagattaattgaagtaaaatttttatggatagtttattttaaattaattattttgaagtttattttatttgagattttattttattttaagatagtttttttgattttaaaatttatgtatggatttaagttattaaatgtttattgtttttaatttgattgaaaaatgatttttttgatttttaaggatgaagtgttaaatggtatgatttattttagaatagtttaaaataatttttggttggatagtaggtgttgtgtgtttttttttgtgtttaggggaggtttaagttatatatagatgagtgtaattaataagtgaggttaggaaaagaaattttagtgatgaaaataatgaaattgttgtattatttgataattaagttggtgaatttaaattagtgaaagaaaaaaagtattttttttaagttatgagtgtttggtgagtattataagttagtggtaatatttgtgtgttgaattttttgtttttgttggtgtttgagtatttaattgatatttattgttttgagaataggaaaaggaagttgtgtagttgtagaatagtatgtttttgtttttatttttatgttattataatagtaaaatttgtgaattatgaggattttgttatatttttatgttgttatttagtagtattattgttaaatattatttataaataaaatgtattataatttaaaggtttaaattaaatttattgtaattttagaagtggtaatagttagaaattttggaatttttgatttagtattattttttatttttttttaagggtttttattattgttgaattattttttgagttggttttttttttgtttatgaaatattgttattttttaaaaattattaagtttttttagagttttttgatttagaagagaaagttgtaatttgttttttttttttaaaaaattggtttatatattggaataaaagagtattatagaaatttaaggaattgttgttataagtattattatgtttttgttttgtttagtttttgagatgaagttttgttttgttatttaggttggagtgtagtggtatgattttggtttattatagtttttgttttttaagtttaagtaatttttatattttagttttttaagtagttgggattattggtgtttgttattatatttggttaatttttgtatttttagtagagatagggttttattatgttggttaggttggttttttggttttaaggatttatttgtttt

SEQ ID NO: 2348 - DNA, 2324 bp, Artificial Sequence
  chemically treated genomic DNA (Homo sapiens)
tttattaagaggatataataattataaatgtatatatatttaatattaatgttttaaagtatataaagtagaaattgatataattaaaataagtggataattttataattatatgaagagatttttaatttttattttttagtaattgataaaaaaatttaaaaaaggtataaatgatttaaagttaattgttatttatagaatattatatttaatatttgaaaaatattgttttgaagtatatatggtattaagataagattatgtatgattggttataaaaattaaataatatttttaaataatttttgggttaaagaaaaaattagaaagaaaatttgaaaatattttgaatttgaatttaaattttaaatattgattttgatatttaaatatgtttgattttggataattaatttggattgttgagtgttagtttttttattaataaagtggagatattaatttttattgggttattatgaagattaaatgaaataatgtatataaagtatttagtataatttttggtataataataatatttaatgttattgtttataatgagaagttattattgagggtatatgggtatatttatagggttttttgttattttgattattttgtttttgtttttttggtgggggagaatttttagttagttggatggtattaataagatttttttttttttttttttattttttgagatattgttttttgttatttaggttggagtgtagtggtgtaattataatttattgtaggtttgaatttttgggtttaaatgatttttttgttttagttttttaagtagttggtattgtaggaatgtgttatatttagttaatttttttgatttttggtagagataatgttttgtttttataaatgttgtttaggttggttttgaatttttaagttgaagtgattttttggttttgggtttttaaaatgttaggattatagatgtgatttattgtgattagttgaatattttgttttttaatattatttaagaagattatgttgtattattttattttttatatttttttgttgataaatgattttattttatttgatttaattttatttttttattgtgtaatattattgatagatagtggatttatgtaggtatataagagatttatgtattttttgaatttaaattttgagttgaggatgatgtttttatttttaggtttttatttggtttgggagtttgtttttagtattattgttgataagatgttagtagtatatttaaaatttgttatttgagattttgattttattatattggttttttattttttaaatattaaaaaataatttgggaaaatgaggaattatgatttttttttatttttttttttaatttaattgtataaatttagtagtgatttttatgtattttgttttttgaagtatttttttttaaatgtttataataataattattttataggaatattggtgtttgattaattattatttgttaaaagatttaggatttttagttggaaaggggattggggatgtatatagtattattttggagagttttgtattttgttatattgaatggagttagtgtttttgtgtaattaaattaattatattgttagggtttatgttgtaattaatgaaatttgtgtagattaaatgaagtgattagtttattatttttagattgaataattaaatttgaagagttttagtgttttttttaatagtttttttttttttagatgattattgatattttggtttttaattttattttattgtgttaatttggtgtgtgtttatttgttttatgttatgtagaatttattataatattaaaaatgttgaatttttataaatgtatttttttaaaagaattaaggtttattttagaaataaatttaatataatagaaaggtaaggggaatggtatgtattttattaagggtttgtattgtgttaggtattgtgtgggtattttatttatttaattttatttaatttttttttagttatatagtgaagttggtttaatttttattttatggatgaagaaagtagtttaaggaggtaaaattatttaaggttataagtaagtaaggggtagaggtagtatttgaatttaagtttttttgattttaaaatttatattttttttatgagtagtagaggtttgtttttgtgttttatttaagaaattatgttattttgaggtatggggatatatttttagagttttgttgtgtttttgtagtttttggtatagattttttaatttgttttgagtgaggatagttttgttgtgt

SEQ ID NO: 2349 - DNA, 2324 bp, Artificial Sequence
  chemically treated genomic DNA (Homo sapiens)
atatagtagagttatttttgtttgaagtaaattggagagtttgtgttgggagttgtagagatataataagattttgaaggtatgtttttatgttttagaataatataattttttgaatggggtatagagataggtttttgttatttatggaaagagtgtgaattttagaattagagaggtttgggtttaaatattgtttttgttttttgtttgtttgtaattttaaataattttatttttttgagttattttttttatttgtaaaatggagattagattagttttattgtgtggttgggaaaaaattagatgaagttgaataggtaaggtatttgtatagtatttgatatagtgtaggtttttgataaaatgtatattattttttttatttttttattatgttgagtttgtttttaaggtgggttttagtttttttaaaaaaatatatttgtaaagatttagtatttttggtgttataatgaattttgtatgatatgagataaatggatatatattgaattgatatagtgaagtgagattgagaattaaaatgttaatagttatttgaaaaaaaggaagttattggaaaaagtattgaagttttttaggtttaattatttaatttaaaaataatagattgattattttatttggtttgtatgggttttattaattatagtgtaagttttagtagtgtggttaatttgattatatagagatattagttttatttaatatagtaagatgtagagttttttaagatgatattgtgtgtatttttaattttttttttagttgaagattttaaattttttgataaataataattaattagatattagtgtttttgtaaggtagttattattataagtgtttaaaaggagatattttaagaaatagagtatatgaaaattattgttgaatttgtataattgagttaggaagaaaaatagaagagaattatggttttttatttttttaaattgttttttgatatttgggaaatggagaattagtgtgatgaagttaaagttttaaatggtaggttttagatgtgttattggtgttttgttaataatagtattgaagatagatttttaggttgaatgggggtttgaggatggaagtattgtttttaatttaaggtttggatttaaaggatgtataaattttttgtgtgtttgtgtaaatttattgtttgttagtaatgttatatagtaaggagataaaattaaattagatagggtgggattatttattaataaagagatataaagagtagaatgatatagtgtggtttttttgggtagtattgaaagatagaatgtttagttggttatagtgggttatatttgtaattttagtattttggaagtttaaggttggaggattattttagtttgggaatttgagattagtttgggtaatatttatgagagtaagatattgtttttattaaaaattaggaaaattagttgagtgtggtatgtttttgtagtgttagttatttgggaggttgaagtaggaggattatttgagtttagaagtttgagtttgtagtaagttatgattgtgttattatattttaatttgagtgatagagagtaatgttttagaaaataaagagagagagagagagattttattaatattatttaattggttagagatttttttttattaaaaaaataaagatagaatgattaaagtagtaggagattttgtaagtgtgtttatatgtttttagtaatggttttttattatgaataatgatattaagtattattattatgttagaagttatgttaagtgttttatatatattattttatttaatttttatgataatttagtgaaggttaatatttttattttattggtgaagaaattgatatttagtaatttaaattggttgtttaagattaagtatatttaaatgttaaaattaatatttgaaatttgaatttaaatttaaaatatttttaaattttttttttaattttttttttgatttagggattatttagaagtgttatttaatttttatagttgattatatatggttttattttgatattatatgtattttaaaataatgttttttagatgttgggtgtagtgttttataagtaataattagttttaaattatttatgttttttttgaatttttttattaattgttgagaaatgagagttaaaaatttttttatataattgtggaattgtttgtttattttaattatgttaatttttgttttatgtattttgaagtattaatattaggtgtatatatatttatgattattatgtttttttgatgaa

SEQ ID NO: 2350 - DNA, 2389 bp, Artificial Sequence
  chemically treated genomic DNA (Homo sapiens)
agtttataggtaaatgttttatattttattattagttggtttaatttttttgtaaatttttgtttgaaggaatatattaagttataaattatttagtgggaatttattttgttaaagtagattatattttttgaagtagggatgttggattaattaagttttgggtatttggaaagtgaaggaattttgggagagtgattgtgttgaagaaatgataggatgaagagtaaagataattttgaaaattttgaatttttatagtgattttattatttgtgatttttttttattttttttttttttttttttttttttttttttttttttttgagatagagttttattttgttgttaggttggagtgtagttgtgtgattttggtttattgtaatttttgttttttaggtttaagtgatttttttgttttagttttttgagtagttgggattataggtatgtgttattatgtttagttaatttttgtattttttagtagagatggggttttataatgttggttaggatggttttgattttttgattttgttatttgtttgttttagttttttaaagtgttgggattataggtgtgtgttattgtatttggttattatttgtgattttttatttaatttttgtaaattagtattattgagtttttaaagaaagagtattttatgaaggaggtaggttgaggtagggtgttagagaattgaagaatgggtatttttgtagattattaagtgtaattagataagaatagataaatttgaatatttttaataaattttaatatgtaattatgtaaatgtatgttagaaaaaaaatttaggtaatatgtttttgagtattattattttttagaagatgtaggtgggtttgggagaatattggggtaggttaagttatatagtttaatttttttttaagtttatttgaatatttatttagtattttttgtatataaagtttaagtaaaatttatttagtttttgtattgttattttgttattaaattttttttttgggttaaattttttttttagatttgtagttattgttttttttgatttttataaagtaggaaatgtttatgtattgttaagtttttagagtttttgttgtttatagtaattaaatgagatgattgttttagttttaagtattggttttagagaagggtagagtatattttgaattggaaaattaaattaaataaaaataaatagttatgtgaggtatgtgagatgttagtttttttttggagaaatgtaagatagaaatttgattgtaaagttttatttttgaatgaaggtttttgtgatttgtttttagggttatattgttttttttttggattattgggaattatagttttagtaaatttagttttttttgatttggtgataaaggatgtaaattaaaattgtattaagttttttttgattttttaaagttattttaaaatagtttgtaaataataaagttattttttaaaatattttttttaaattaattataaattattttgaatagtttgaatatttgttttaaatgatgtttaggatgttttataatatttggaggatagtgttatatttgagagttgattattttaaattggtttttttaagtaattttttatgtgatttgtttgttgtgtttgtttatatgtagtagtttttgaattgttgttttaattatattgattgatttaataaaagagttaaaatattatttaattttgttgtatattttagttaattttgagtttttttaattaaaatagaatgggtggttgagtattttttttttgtagattagtgtttaattttaaaatttatagagatttattggattgatttggaagattattagtaattttagaagtggttaaataattgggataaaagtatttatttagaagtggttaaataattgagataaaagtatttatgttttagatatgtttataggatgatgggtttatgttgttttttttttttattttttgttttttttttaggaaaatgtaaaaagtgtttttttttatattattggataaattattttaggataaattgaattttgtttatagtttagtagttttatgtaattagttttttaaaatttgagttttaaatagaaatgttttaattatgttaaaaatttgagtagttttaagagtttttttttttttaaatggtatagttgtaaagagtagtgtgatttttgtgggtttaagtttgggttttattttttatttaaatgtggttttgaataagtttttaatatttttttaatgttaagtttttattgggtataattatatttattttggttttttgtttgtttgttttttgaaagttaaatggtataatatgaatgt

SEQ ID NO: 2351 - DNA, 2389 bp, Artificial Sequence
  chemically treated genomic DNA (Homo sapiens)
atatttatattgtgttatttgatttttagaaaataaataaataaaaaattaaggtaaatataattatgtttaatgaaggtttgatattgagagagtgttagggatttgtttaagattatatttgagtaaagagtagagtttgagtttggatttataaaagttatattgttttttatagttgtattatttagaagaaggaggatttttagaattatttaggtttttgatatgattgaggtgtttttgtttgaaatttaggttttaaaaaattgattatataaaattattggattgtaaataggatttaatttattttgaagtaatttgtttaatggtgtaaagaaaagtattttttgtatttttttagaaagggggtaggaaataaaaaaaaaaaatagtatagatttattattttgtaaatatgtttaaggtataaatgtttttgttttagttatttagttatttttgggtaaatgtttttgttttggttatttagttatttttgagattattggtggttttttaagttaatttagtgaatttttgtaaattttaaggttgggtattaatttgtaaaagaaaaatatttaattatttattttgttttagttggaaaaatttagaattaattgaaatatataatagaattaaatgatgttttaatttttttgttaaattagttaatgtggttaaagtaataatttagaagttattatgtgtgggtaagtatagtagataagttatgtaaagaattgtttgaaaaagttaatttaaggtagttaatttttaagtatagtgttgttttttaggtgttgtaaaatattttgaatattatttgaagtaaatatttaagttatttaaaatagtttgtaattggtttgaagggggtgttttaaaaaatagttttgttatttataaattattttgaagtaattttggagaattaaaaagaatttaatgtaattttaatttgtgttttttattattagattagggaaaattgagtttgttagggttatgatttttagtagtttaaggaagggatagtgtgattttaaaagtaagttgtagaaatttttatttaaagatagagttttatagttagatttttattttatatttttttaaagagaaattgatattttatatattttatgtggttgtttgtttttgtttggtttggttttttggtttaaagtatgttttatttttttttgagattaatgtttaggattgaggtaattattttatttgattgttatgggtagtgaggattttgaaaatttggtagtatatggatattttttgttttatggaggttaagagaagtagtggttgtaaatttgagagaaaaatttgatttaaaagagagatttaatgataaagtggtaatatagaaattaaatgaattttatttggattttatatgtaaaggatgttaagtaagtatttaagtggatttagaaagaaattaggttgtgtgatttagtttgttttagtgtttttttaagtttatttgtattttttggaaggtgataatatttaaaggtatgttatttagattttttttttaatatatatttgtatgattgtatgttagaatttgttagaaatgtttagatttatttgtttttatttaattgtatttaatggtttatgaaaatgtttattttttgattttttggtgttttattttaatttgttttttttatagggtattttttttttgaagatttagtaatattggtttataggaattgggtaagaagttatagataatggttgggtgtggtggtgtatatttgtaattttagtgttttgggaggttgaggtgggtagataataaggttaagagattgagattattttggttaatattgtgaaattttgtttttattaaaaaatataaaaattagttgggtatggtggtatgtgtttgtaattttagttatttaggaggttgaagtaggagaattgtttgaatttgggaggtagaggttgtagtgagttaagattatataattgtattttagtttggtaatagagtgagattttgttttaaaaaaaaaaaaaaaagaaaaaaagaaaagaaaagaaaaatgaaaagaagttatagatagtgaagttattatagaggtttaaaatttttaaaattgtttttgttttttattttgttatttttttaatatagttatttttttagggtttttttattttttaagtgtttaagatttgattgatttaatatttttgttttagagaatataatttgttttaataaaatgaatttttattaggtaatttatgatttaatatatttttttaggtaagaatttgtagaaagattagattaattaatgatggagtatagggtatttgtttgtgggtt

SEQ ID NO: 2352 - DNA, 2380 bp, Artificial Sequence
  chemically treated genomic DNA (Homo sapiens)
gtgttgagattgtattattgtattttaggttgggtgatagagtgagatatagttttagaaaaaaaaaattatatatatatagatatatgtgtatatatatatatatatatatatatatatatatatatattttattgatagtggtattattagaattgtatatttttaagatttttgtagtagggtatggaagatagaatggagggagattgtattgaggtaaaatatataagtggtaagaaattatgagtattggaattaaataagttagaaaagaatagtaaatgtttaataaataggtatgaattgtttgatattttatgaagtttgtataaattattttttttagagtaaaggttggttgtgaagataaaatgaaataataaaaatataagatgataaaaaaatttagagaaatttatagtggtatttaaataagatttggtttttttttgagttttagtgatttattattttgagttttaatggtgattaataagagtatttagttaaggagtgagtattatttttgtagataattattattataagtttttgagatatttttggatatttgttgttattattggtattgaattttaggaaattttgggaataataattgtttaattataaattttagaaaataatgtggaagtttattagatttttgaataaagtattttttttttttttttatagtatataggtattttaaattaggaatatttgtttttatttttgttagtaaattttttgttaaatttattatttaattgaaaattttagaaaggagtaataaagaaattatggtagaggtttatattattaaaaagaaaaggtagttagtaaaaattattttttatgtagaagttaaaaaaaaaaaaaaattatttttaatgagatttgtattttaaagaaaataagaattgatattatgatttatatattggttggtattttttatttaaagatgtatagatttgaaaaatttatatgttatattttattttattatttgttttttatagttttgtaaattagtaaatttttataagatatataggttgagagtgtgaagttagttagaaaagttatgtggaaatgtatatttattttagagtagttggatttatatttaatatggtaaattaaaatgatgtaggtatttattttttttttttggagtttttaggtttttaaaatttaatattttattgttgatttgtttaaaatttttttaggtgaggtgaattttgagggtattttatttaattatatagttagaggagggtggggttttataagattagattttaaatgttggggtttttgtgggtttttaggttgttgggagtagaggtgaattgttttttgttttttgttgtaggaagaagatgggagatattgattgattggaggtggggggtgggggtttgggggagggaagtaatatggggattgtaataaataagagattttttttatatgattttttatatttggtgtttgatgtttttttttaggttttttagaggaaataggaaatttgttttttggttattggaaagaagagaataaatatattgagaattgtgaaaagaagtagtaggattttaggtaaggagttgatgggttagttaattttattttttattaagtgttttttttttgaagtttttttaagtgtttaattttgtaaaagttaagaatgtttttatttttttttattgagttggagtatattttggttttagtttagatgttatattatagagtagttgatgataggtaggttagaataggttttggaagaatttatttttagttttaggtaagattttttaagttttgtttttggaaagtttgattttttttaattttggattgattttaaagtttttaggttattttgttttagagtttaaagaattattaggaggttattatttgtggagtgaagtaggattttttatattatttatggggttttatgtaaaatgaaaatgtgatgttatttatttgaaaattaagaattttaagatggtgataatagaatattaaagtaagtgtggggattttttggagtatagggttttatgtaattgtattaggttgtagatttattaagttagttttggttgtagaaagaatgtgggaattttgggttatgtggatttttataagttgagttgttgagagatttggattatttttattgtgtttagtagggtgatagttagttttttaatagtagtatatttggaagttgttgtaaggtagtagagggggaggagggtggatgttgggttgtgggtgtgagtaggtaaagattataaatatattattgagtaaaaattatatagtggtttttttgttt

SEQ ID NO: 2353 - DNA, 2380 bp, Artificial Sequence
  chemically treated genomic DNA (Homo sapiens)
gggtaaggagattattgtgtgatttttatttagtgatgtgtttgtggtttttgtttgtttatatttgtaatttagtatttatttttttttttttttgttgttttgtagtagtttttaagtgtgttgttgttggaggattgattgttattttgttgaatataatggaggtagtttaggttttttaataatttagtttgtgaaaatttatatggtttagagtttttatgttttttttatagttaggattggtttggtgagtttatggtttggtatagttgtatagagttttgtgttttagagagtttttatatttgttttaatgttttattgttattattttgaaatttttaatttttaaatgagtggtattatatttttattttatatgaaattttataaataatgtagagggttttattttattttatggatggtggttttttgataattttttaaattttaaggtaaaatggtttgagggttttggagttagtttaagattaagaaagattagattttttaaagatagagtttagggggttttgtttgaggttgggaatggatttttttagggtttgttttaatttgtttgttattagttgttttgtaatatgatatttggattggggttagaatatgttttagtttagtggaagaagatgaggatatttttgatttttatagagttaaatatttagaggaattttaggaagaaagtatttggtaaaaggtaaagttggttggtttattagttttttgtttggggttttgttgtttttttttatagtttttagtatgtttatttttttttttttagtggttagaggataagttttttgttttttttagggagtttggagagaggtattaggtattaaatataggaaattatgtggagaggattttttatttattatagtttttatattattttttttttttaagtttttgttttttatttttagttagttagtgttttttgttttttttttgtagtagagaatagaaggtagtttatttttgtttttgatagtttgggaatttgtaagagttttagtatttgaagtttggttttgtgaaattttatttttttttggttgtgtgattgaatgggatgtttttgaggtttattttatttgagagggttttgggtagattagtagtaaggtgttaaattttagaagtttgaaaattttagaagagaaaggtaggtatttgtattgttttgatttgttatgttaaatgtgaatttggttgttttggaatagatgtgtatttttatgtggtttttttagttggttttatgtttttaatttgtgtgttttgtggagatttattgatttataagattgtgaggggtaaatagtgagatgggatatgatatatggattttttaaatttgtatatttttggataaagaatgttagttagtatatagattatggtgttgatttttattttttttggagtgtaaattttattagaagtagtttttttttttttttggtttttgtataaggggtaatttttattaattgttttttttttttaatagtatagatttttattatgatttttttattatttttttttgaggtttttagttaaatagtagatttgatagagaatttgttaatagaaataggaatgggtgtttttaatttagagtgtttatgtgttataagaaaaaaaaaagagtattttgtttagggatttggtggatttttatattattttttagaatttgtggttaaatagttgttatttttgaggttttttgaaatttaatattagtagtgataatgaatatttagggatgttttggaggtttgtggtggtggttgtttgtagggatggtgtttattttttagttgggtgtttttgttggttattattgaggtttaagatgataggttattgagatttagagaggagttaggttttatttaagtattattataaatttttttggatttttttgttattttatgtttttattgttttattttgtttttataattagtttttattttaagagaaataatttatatagattttatggaatattaaataatttatatttatttattgaatatttattatttttttttagtttatttagttttgatgtttataattttttattatttatgtattttattttaatatagtttttttttattttattttttatattttgttataggggttttgggaatatgtaattttaataatgttattgttagtgagatatatatatatatatatatatatatatatatatatatatatatatatttatatatatataattttttttttttgagattgtgttttattttgttgtttagtttggagtatagtggtgtaattttagtat

SEQ ID NO: 2354 - DNA, 2378 bp, Artificial Sequence
  chemically treated genomic DNA (Homo sapiens)
tttaagaataaaatgtttttttttttttttaatatagaatattttttttatgagttttttaaaagtatgttaagtaaattaaaataaaaggaggtgggtaatgtatttgaagaaatttagttaatttaatttttgtaattttagaagtatgttttatttattttttggaattaattgtggttttattataaattgaattagatatatttgttttaatgttattttaattttgtaggtagattgtaatttagggttggtttagtttatttattttttagtttattaatttattgtttttgttgttttagttgtgtgggtatttttttagttggaatatatagaggttgtttttttttttaaaagtttaaaagtaataaagtaagaaagagagaaaaagtaagaaagtaagaaattgagaaaaagtaagaaagtaaaaaagtaagaaagggaaagtaagtaaatatagtttttatttttttttttatagaattagagttttttgagagtgtttataggatttatttagaaaggttattttgtaaatgttttattagttatggtataatatagtttttttttagtagaaaagttttgttttttgggagtttgttttttttttagtttaatggattttgttaggggtaggatgtggtttttgttattatgggttataaaatttaggagtaatggttgtagtgatggtggttttttgttggtttattagtatgggagtttgatggtgaggaggagagaaaggaaaattgggaaaagttttgaatgtttaataattttttagaggtaagatgagggagagagagatttagagttataattgtagaagttttttgtaaaatttaattaaaatttgggtagaaataaatattagaaataagtgttatttattaatttaaattgttaattaaggtaaatattgttataaatttaggaaaagaaagggaggagaatggaatgaggggtgattattttagatattaagtaaattaaattattttgaaggttttgttagatatatgtattaattattggttattttagttgtatatttgtatggagaggagaatttggtgtttttaaattgattttggttggtaaagtgggaaagtagaaggatagggtggtaggttaaggggaatttaatttagaagtggttatgtggtatttatggttttgtattggttaggtggaagaaggaggaattatgtaagatttaggtgagggtgtataattatttttagttttttagttttgttttttgttttttggagtttatgtagttggataaatttgttgagttgtaatgtgaagtaattttttttgggagggggaaggttttagggtgaatttaagttaattttagggataatagagtgggaaagtaagttgagtttttaaattttttatgtggttggttttttttttttgtgagatttagtatttagtaggagggagatggggtagggtggggtggggataaagtgagttgttgattttgttttttgggttataggttttgtatatttataagttttgagggtaggttataagttgaaatttttttattttagagagaggaggttggagagtagtttagttatttaggttgggagttatttgtatttgatgagtaattttaagtgggaattattagagtgtgtgtttgtgtgaatgttagagtgtatttagagggaataaatgatttattattggggttttaataaagttatatttgaaaagggagggagttttttatttttttttttattattaaaattttaaagaggtagaatttatttggttttttaagttaggttggaagggagttatagttaattaagtagtttgtttagtttttttagtttttttttgagtataataatatgtataaattggtaaaagggattatagattgttttgatgttaaataaagaggaaaatttttaaaatatggtaaaaattgtatttttgtttaatttttttgtgttttttttttagtataaatttaagatatgtatagttaggttttagggagaggtatataatgaaaaattattattttagatatttagatttaagtattttgtagtaagagaaaatgtttagtttttttttttgaattattttttttgtttatgtttttttgtttgttttgttgttgttgttgtttttgagatggagttttatttttgttatttaggttggaatgtagtggtatgattttggtttattgtaatttttattttttggatttaagtaattattttgttttagttttttgagtagttgtgattataggtatttgttattaagtttggttatgattaaatattattttattaataataaatattgtgttttgg

SEQ ID NO: 2355 - DNA, 2378 bp, Artificial Sequence
  chemically treated genomic DNA (Homo sapiens)
ttagagtatagtatttgttattagtgaagtaatatttaattatagttgggtttggtggtaggtgtttgtaattatagttatttgggaggttgaggtaggataattgtttgaatttgggagatggaggttgtagtgagttgagattatgttgttgtattttagtttgggtaataagagtgaaattttattttaaaaataataataataataaaataaataaaaaaatgtaagtagagaaagtaatttagaagaggagattggatatttttttttgttataaaatatttggatttaagtatttgaaatgataattttttattatgtatttttttttggagtttagttgtatgtgttttaaatttgtgttgaagaaaggatgtggaagagttaaatagagatataatttttattgtgttttggaggtttttttttttgtttaatattaaagtagtttgtagttttttttgttagtttatatatattgttgtatttaaagaagggttgaaggagttgagtgggttgtttgattagttgtgatttttttttagtttggtttaagagattaaatggattttatttttttaaggttttaatgataaggaggggaataagaggttttttttttttttgaatgtaattttgttgaggttttgataataaattatttgttttttttaaatgtattttggtatttatataggtatatattttgatggtttttatttgaaattgtttattaagtgtaaatagtttttagtttggatggttgagttgttttttagttttttttttttggagtaagaagattttagtttgtgatttgtttttgggatttgtgggtgtataaagtttgtgatttaggaaataaagttaatggtttattttgtttttattttattttattttgttttttttttattaaatgttgaattttatgagagaagaaaattagttatataaaggatttgaaagtttaatttgtttttttattttgttatttttggagttggtttggatttattttgaagtttttttttttttggggaaagttgttttatgttgtagtttagtaggtttgtttagttatataggttttagaaaataagaagtaagattggaaagttggggatgattgtatgtttttgtttgaattttatgtggttttttttttttttatttggttagtgtagagttgtgggtgttatgtggttatttttggattgggttttttttggtttgttattttgtttttttgtttttttattttgttagttagagttaatttgaggatgttaagtttttttttttatataggtgtgtagttgggataattaatgattaatgtatgtgtttggtagggtttttagggtaatttgatttgtttgatatttagagtgattattttttgttttatttttttttttttttttttttgagtttgtggtagtgtttattttagttggtggtttaagttgatgaatgatatttgtttttggtgtttgtttttgtttaagttttaattaaattttgtaagaggtttttgtaattatggttttaggttttttttttttttattttatttttgaaaagttattgagtatttagaattttttttagttttttttttttttttttttattgttaaatttttgtgttgatgggttggtaggaggttgttattattgtagttattatttttgggttttatggtttgtgatggtaaaagttatattttgtttttgatagaatttattaggttgaggagggaatagatttttagaaagtagagtttttttgttggaggagagttgtattatgttgtagttaatgggatatttgtaaaataatttttttaagtagattttgtaggtatttttaaggggttttgattttataagggaagaggtagaagttgtgtttgtttgtttttttttttttgtttttttgtttttttgtttttttttagttttttgtttttttgtttttttttttttttttgttttgttgtttttaagtttttggaggagaaagtagtttttgtatgttttaattgaaagaatgtttatatggttgagatagtaagagtagtggattaatggattaggaaatagatgaattaaattaattttgggttataatttgtttgtaaagttgagataatattagaataagtgtatttggtttaatttatggtgggattatagttagttttaagaagtaaatggaatatgtttttgaggttgtaaaaattgaattggttaagtttttttaggtatattatttatttttttttgttttggtttgtttaatgtatttttagaaaatttataagaaaggtattttgtattaaaagaggagaaaaatgttttatttttaag

SEQ ID NO: 2356 - DNA, 2469 bp, Artificial Sequence
  chemically treated genomic DNA (Homo sapiens)
ttaatattaggggtattagttagtaaaatttgttgagtttattattgaaaaatttttttatttattattgtggttataatatatagttatttggttaggaaagagtatatattatagggatttgtttattgtatgtgtgtttgagtttttttttattttttgttttttttaagaatttttttttgattggtttaattagaagtgttgattttttttatttgattttttgtaattttataatttatgttttttatttttgtgttatattgtttatttttttttggtttttttgtgtgtatatgtatatgttttggggaatggggtatttatttttgttatttattgtgttatttatttttgtatgtttatagtgtagagtatggtgttttgtatatagagtatgtttggtaaatatgtgtaataaaaagttttttgattatataatggtttgatattggtttttttattttttaaatgagttattttttaattattgatttaaatggagttgatttatttttataaatagtatttttttgatttttattgttataaaatttataataaaattgtttttttatttatttttttttattgtttatattttttttggaaatatttaaatgagggtttgttttagatttttggggaaggaaggtttgtgagtagataatagtagaattaggatgtgtgggattgtttggtggttagtagaataatgtaaattggtttttttgtttaaagttaaattgtgtgtattttttataagtggatatagtgttttttgtgtttgaattattatagttatgtagtggtttagtgagaattttttgttttggttattataaaaataaaatagaaatttttttgttgttaggttaggaattagattataattgatgtattagtttattagttaattttttttaagtttaatattagaataggtaaaaaaaaaaagtattagtttttaaaaattattaataatagtggtataattttgtattttattattttttttttaattattttagtgtagtagatgtaagtagagttttatgtaattatttgagataaggatgaagaattgaaagataaataagtgatttattttaatggatttgttttagataggagaaatttgtaattttttttaggtgtgttttatggatttatagtggagtgaattatagatttgtataagttttgaaattgtgggtaattttatagtttttagattggttttttgtaataggtagttagtttttattgggttttttggatttttattttaaaaatggagaagatagattatagttattgattagggattgtgggaggtgttatgtgatggtgaggtattatgttagggagttgagttttgatttttttgttgggtgattttttatttttgggttgttagatttattttttggatgttgtgagtagatgttttatattagtattatttttttgttgaagaaaggtttgtttttgtatatattttaggagggggaaatgtgtgatatatgatggtattttttggaatgtttgatttttttggaaatttttttaatatgatttagaaattggttagtttaaggttggagtattttttaagttttttttatgtttgtttttttttaagagttgtttgttaggttttaatggtttatttttaggagtgaaaatgtaaagtattttgttaggtaaataaatttattgtttttgtattgtttttttgtttgataaattttaatatttgttttttagattgaatgtaaagttggatgttgttttaaaagtgtttttgattagtttttttttttagtgagtttgaaaaagttattattgtattaatttaaaaaaatatttttttagttattgttaaatatgtttttgtaaaggtatttttttttgttttaagtggttaattttatgttatttgaaggtttatattttttatattttgaagatagttgtgagaggtttaaagtgttgtattattaggtgttgtttatttgtttgtttgtttgttttttagtgttagtatattatgagttttttttatggattagaggtaattgttgggtgtataaatttttttaaaattttataagtattaagatagttggtgagatatttagatgttttttaattttgaaattgttttttaattttgaaattatgtgatttttgaaatttattagaatttgaatttagattttaatttttagaagagatgttgggttataaatagattggttggaagttatttaaagtagttaaagatgagatgtttttgattttaatagtttttttttattttttttttttttaaggttttatgtgaagtattttttttatggtaagggagaattttaagggtaattaaatagattttgttatgagggtaagagatattgggttttaaatatataaataatttgtttatttatttgatgttat

SEQ ID NO: 2357 - DNA, 2469 bp, Artificial Sequence
  chemically treated genomic DNA (Homo sapiens)
ataatattagatggataaatgagttgtttatgtgtttaagatttagtattttttgtttttatagtagaatttatttagttatttttagagtttttttttgttatggaagaaatgttttatatagagttttgggggaaagaaagatagaaaagaattattagaattagaaatattttatttttagttattttagatggtttttagttaatttgtttgtagtttagtattttttttaaaaattggaatttggatttagattttgataggttttaagaattatataattttagagttggaagataattttagagttagaagatatttagatattttattaattattttgatatttataaaattttaaagaaatttatatgtttagtaattgtttttggtttatgaagaaagtttatgatgtgttgatattgaaaaataaataaataaataaataaatagtatttaatgatgtaatattttagattttttataattgtttttagagtataaggaatatagatttttaagtagtatagaattggttatttgaaataagggaagatgtttttgtaaaaatgtgtttggtagtaattggagaaatgtttttttaaattgatataatgatagtttttttaggtttattaaaagaagaaattaattaagaatatttttaaaataatatttagttttatatttagtttaaaagataggtattgaaatttattaagtaaggggataatgtagggatagtgagtttatttgtttgataggatattttgtatttttatttttaggagtgagttattaaagtttgataaataatttttaaagaaaaataaatgtaaaagaggtttaggaaatattttaattttgagttagttaatttttaaattatgttagagaagtttttagaagaattaagtattttagaaaatattattatatattatgtattttttttttttggaatatgtgtaaaaataagtttttttttaataggaaaatggtgttggtgtaggatatttatttatggtatttaggaagtagatttagtagtttagaggtggagaattatttagtaggaaggttagagtttagttttttagtatgatgttttattattatgtggtattttttatggtttttggttagtggttgtgatttgttttttttatttttgaaatgggagtttaaggggtttagtgagaattgattgtttgttgtgagaagttgatttgagaattgtaaagttatttatagttttaaggtttgtgtaagtttgtgatttattttattatgggtttatgaagtatgtttaagagaaattataggttttttttgtttgaagtaaatttattaaagtgagttatttgtttgttttttagttttttatttttattttagatgattgtatgagattttgtttgtatttgttgtattgggataattggaaggagggtgataaaatgtaaggttatgttattattgttgatgatttttaaaggttgatattttttttttttgtttgttttgatgttgaatttggaggaaattggttgataaattggtgtattaattgtgatttaatttttaatttagtaatagagagatttttgttttatttttgtaatgattgggataaggagtttttattgagttattatatgattgtggtaatttagatatagaagatattgtgtttatttgtggggaatgtatatggtttgattttggataggggagttagtttgtattgttttgttaattattaaatagttttatatattttagttttattgttgtttatttataggttttttttttttaaagatttaaagtaaatttttatttagatatttttaggagaaatgtggataataaggagaggtaagtgaggaggtagttttgttatgggttttatagtaatgaaggttaaggaggtgttgtttatggaaatgggttagttttatttaggttagtagttaagaaatggtttatttgggaagtggaaaagttaatattaagttattgtgtaattaaaggattttttattgtatatatttattgaatatattttatgtataaggtattatgttttgtattatgggtatataaaagtgagtaatatagtgagtaataaaagtgaatattttattttttaaaatatatatatatgtatataaaaagattaaaaggaaataaataatataatataaaagtgaaggatatagattataaaattataggaaattaggtggggagaattagtgtttttggttggattaattagggaagaatttttgaagaaggtagaaagtgagggagagtttaggtatatgtgtagtgagtagatttttgtgatgtgtatttttttttggttaggtaattgtgtattatgattatagtaatgaatgaaaggattttttaatggtaagtttaatagattttgttggttgatatttttaatgttga

SEQ ID NO: 2358 - DNA, 2231 bp, Artificial Sequence
  chemically treated genomic DNA (Homo sapiens)
tgataaatggtagtttatttatgattggagaattttaggaggattagtattggttttgtttttataggttgtgaaagtttagtattattttgtttatatatttagatatttaatttatattatttaatttaaattatttgttttattgtttttttgtaaatgaatttgtggataagtgtttttattaatggaaaaataaaaggttaaaatttaatagttttaaagtttatagtatatatgggaaagttatttgaatttttagttggtgatgatagtatttgtttttagaaaattgatataatttattaatgtttagtattgaaatataagagtttattgttgttgttgatgtattgttgttattttgatattttttaaaatgtagaatttgaattattgatgttatgaggtttatttagagagttgttaaataaaaagttagatgatgtgaggataaagaagtttgagagtttgttggtttgtaggtgattttttgtgttttttttagttagtttttaggtaggagaggttattagagtagttggaatattttttataaaatagttatataatttaaagaagatattattgaggtattatttttaggtttttttttttgaaaaaaattaaattatattttgaattttttaggattgttttttttttttgtagggtttatttttttgaataaaattagtatttgttaatgattagaatgataatgtatgttttatgtttatatttatataattgtgttttttatttaaggttttgtttaatgtaatgatttttggatttgaagtgtattaaatgttaatgttttttttaatttttaatttttttttttataaattttgaagataaatattaatattttggtattatattaaagaaatatttaattattagtattgttattttgtttttattttgtatttttaatttttaattttaaaaaataggtgaatattttttatgttggtttttatgtttatataggttattgttttgttatggaggaatttaaaggttattattggttatttatttaattttttgaatatgtttttttttgtttagataagtttggtttttttgttttttggatatggtaatatttttattgatttttgttagtaaagttatatgttattagtttttttagggttatatgtgtagtatggtagtttttaggtattatattgattgtaaagaagggtaggaatttttgtgtatgtttgtattatttatttttggggaataaagataatataagtggatgatttagaaaggtagtgttttttttttagttatatgttaattaagtttttttatagaaaaattgaagagtttagaagttagtgggtagtattagagtaaagtattttgtatgtggatgaatttagtttatttttggaatatgtgtttggaattttgaaattttttaattattttgattgattattgttggaatggggagaggaggtaaagaggaaatgaagataagatttagattgggatagtttgttgatggaaattgttagggtgtagattttttttaaatgtttaatagaaattttagagattagataattgtagggatttatggaatagtaagttaaatttatttttttatttattttatttttaattagagtttttttgggggaaatttagaaatggaaattgtttaagtataaatattttgtatattataaatattgttgggtttgatattttgtagggagtaaagaaggggattgtagagatgtatggatttgagtttgaaatgtggttttatttttttttggttgtgagaatttggaaaatttgttgatttattaaattttatttaattttttataagatgtgaattataatttgttttgtagagttatgtgaatttaaaattagattttatttgtaaagtttttaaagtagtatttggttaatgtattttaggttaggatattgttggtattttgtttttaagatgtatgttattgattttttttttataagaatttttagtatgaaatttattttagtgtattatagttttatttttaaaggaaatttaatttagaaattaaggtaaattttaaaagttattaattaatttttttagttttaatattatttataggaaaataggaaaagaaaatttgtagaaggaaatagtgtaaatggagaaataaattggggtgagagaggagagaataaggaagggt

SEQ ID NO: 2359 - DNA, 2231 bp, Artificial Sequence
  chemically treated genomic DNA (Homo sapiens)
atttttttttattttttttttttttattttagtttgtttttttatttgtattatttttttttataagttttttttttttgtttttttataaatgatattagaattgaaaagattagttaataatttttgggatttgttttgatttttaggttaagttttttttgaaaataaaattgtaatgtattgaaataaattttatgttaaaaatttttatgggaaaaaaattagtagtatgtattttggaaataaaatattagtagtattttaatttaggatatattggttaagtattgttttaagaattttataggtaaaatttgattttgagtttatataattttgtaaagtagattataatttatattttatagaagattaaatggaatttggtaaattaatgaattttttaagtttttatagttaggaagagatggagttatattttaaatttaagtttatatatttttatagtttttttttttgttttttataaagtgttaaatttagtaatatttatagtatgtaaagtatttatgtttaggtagtttttatttttgaattttttttaggaaaattttaattgggagtgaggtgggtagagaaatggatttgatttgttattttatgaatttttgtaattatttagtttttgaggtttttgttaaatatttagagaaaatttatattttgatagtttttattagtagattattttaatttggattttgtttttattttttttttgttttttttttttattttagtaataattagttaaaatagttaaaaagttttggaattttagatgtatgttttaagggtaggttaggtttatttatatataaggtattttgttttggtgttatttattggtttttaaattttttagtttttttgtgaaagggtttgattagtatgtggttgggaggaaaatattgtttttttgagttatttatttatgttatttttattttttaggagtgaatgatataggtatatatagagatttttgtttttttttgtaattaatataatgtttaagaattattgtgttgtatgtataattttgggaaggttgataatatgtagttttgttggtaagagttagtgaaaatattattatatttgagaagtagaaaagttaggtttgtttggataaggaagaatgtatttagaaggttggatagatggttagtagtagtttttgggtttttttatggtaagataatgatttatatgaatataagaattagtatgagaaatatttatttattttttaaagttagagattagagatgtaggatgaaagtaaaatgataatgttggtaattaggtatttttttaatgtaatattaaaatattagtgtttatttttagaatttgtaaaaaaaaaaattagaagttagaaaaaatattaatatttaatatattttaaatttaaaaattattatattggataaaattttaagtaaaaaatatagttatgtaagtataaatatgaaatatatattattattttaattattagtagatattagttttatttaaagaaataaattttatagagaaggaaaataattttgaaaaatttaaaatgtaatttgattttttttaaaggggaaagtttagaaatgatgttttaatagtgttttttttgagttgtgtggttattttatagaaaatgttttagttgttttgatagttttttttgtttggaagttaattaagggggatataggaagttatttgtaaattaataaatttttagatttttttatttttatattatttgattttttgtttgatgattttttaagtaagttttatgatattaatgatttagattttatattttaaaggatattaaagtaatagtaatatgttaataataataataaatttttgtattttagtattgagtattagtgagttatattagttttttgggaataagtattgttattattaattgaaaatttaaataatttttttatgtatattgtgaattttaaaattgttaggttttagttttttatttttttattggtagaagtgtttatttatagatttatttgtagaaaaataataaaatggataatttaaattaaatggtataaattaaatgtttaaatatatggatagagtggtgttgggtttttatagtttatgaggatagagttagtgttggtttttttagggttttttagttatagataaattattatttgtta

SEQ ID NO: 2360 - DNA, 2334 bp, Artificial Sequence
  chemically treated genomic DNA (Homo sapiens)
ttagattttgggaataaaattaataattttttaaatatttttaaaatatagttttgatttttattttattaaaaattttgatttaatttgaggagattttgttttattttttaaattaaatgtttttattttttttgtattgtgaatgttttgaattgattagtaagataagaataatattaaaattaatagtgagggtagttttagtattattttgtttttttttaagattttttttggttattttgtttttttttttttgttagattttgagtttttttttttaaaatatggtttgagtatttttttgaagaagttttttttatgttttttattttgttttaattattttatggttagtgtaagtagtatagattttatttgtattttagttatatgtgtttttgttgtttttttttgtttttttattagtttataagttttattgtataaggtttatatatttatatttattgtagtatttataattatgttgtataatattttgtatatagagggaatttaataatttttgtagtttgatttttgggtttttattttggtttttgggtaattatttattagtaaataaattagttattagtgaaatagttatggtttttagagttaattatttgtatttttattgttggaaaaaataatatatattattttttttgtagagaggtatgtggttagaatgttattggtagattttgtttgagagttttgatgtttgtaattttgttttggaaaggtgaattaatttttattttgatttatgtgtttttttaggtttttttagtttaaatgtataaaagttagagaaagttattattataatattgataataataatgataaagatatatatatatagttagtggttgaatatttattagtaagattgttggaaattaagttgtattatatttgttggagtatttaggattatttatttagtgtaggtttagtagttatgtttatttttgtttattttaggtatggtttttttaggtgttagggttattttttttttttttagtggttgttttttttgttggtatgtagtatttgttttttagttttaagtttgtggggtagttaggagagttttgtttttggtttttgttggttttatattttttggtgagtggttttgtatggtagtttagttttggggaattttttaagggagagggtttttttttttttttaatttttttatttttatttaattttattttatattggttttttattattgttagttgttgttttgttaggtattgtggaatatttatatttttttttattatagggtttggatatataggtgttggagttagatatgttgtgttttaatttttaattttttatattaattgttttttttttttgaattttaattttgttatttataaaatagagatagtataataatatttgttttatggtggtgttgttagaattaagtagtaatgttatttgtaatgataatagttgtattgattaagggatttgtatgtgttgggtgttatgtagtgttttgtatttttttttggagtttagtatggtgtttagtttagaataagtagtttgtagttttttttttttttttttttttttttttttttttttttttttattttttaaattaaataggatttgggggtgtagtatttggttttttatgggggtttttttttttttgtagtattttttttttttttataggttatttgagagaatttagatttttatttttagattttttgtttattagaaataggagtttttttatttttttgtttaagttttttatttaatagggtagttttatttttgtttttagttaggtttttaagttttatttttatgttggggttttgtatttggtgttttgttgttttagggaatatagatggttaatagttagagataaggttagttttgtgtttttttggattatagaatgtgtttttaagagttttttttttttattttagtatataggtaggttatttgtattaggaatgttgtaaaatattgattggatatagataattaatgtttaagtataatggtttttaatggagtaggagaaggttaggaattagtagggtatagttatttttttattttgggggaggtagttaagaggaagggtttttggggaaagagggagttgtattttgtattaggggagggggtgagtggaatattaagatttattggattttaggggttattttattgtgggttagtttttgaagaatttttagtagattttgttatatttggttttggttttggtgtatatgtttttattgt

SEQ ID NO: 2361 - DNA, 2334 bp, Artificial Sequence
  chemically treated genomic DNA (Homo sapiens)
gtaatggaggtatgtgtattagagttagggttaagtgtggtaaaatttattaaaggttttttagaggttagtttataataggatggtttttgaagtttagtaaattttggtgttttatttatttttttttttgatgtgaggtgtagttttttttttttttaggggtttttttttttgattgttttttttaggatagggggatggttatgttttgttggtttttgatttttttttgttttgttggagattattatgtttaagtattgattatttgtgtttagttagtgttttgtagtatttttggtgtaaatggtttgtttgtgtgttgaagtggaaggaaagggtttttaggggtatattttgtggtttaggaggatatagagttgattttatttttagttattggttatttgtgttttttggagtaatagaatattaggtgtagagttttaatatggggatggagtttggaaatttggttggaaatagaaatggagttattttgttaggtgggggatttgggtaggagagtgaaaaggtttttgtttttagtgggtggagagtttgggggtaggggtttgggtttttttagatggtttgtagaagaagggaagatgttgtagagaggaaaaagtttttataagggattagatgttgtatttttaggttttatttgatttagggaatgaaggagggaggagaaaagaaagaagaagagggggaaggaagttgtagattatttgttttgggttagatgttatgttgggttttaagaagaggtataaaatattgtatggtatttagtatgtataagttttttggttagtatagttgttattattatgagtgatgttattgtttaattttaataatattattataaggtaggtattattatattatttttattttgtggatgataaaattgaggtttagaaaagagaagtaattggtgtagggggttgaaaattgaaatatagtgtatttgattttaatgtttgtgtgtttaagttttgtgatagggaaagatgtaggtgttttatagtatttggtaaggtaataattggtgatggtaaagggttagtatggagtggggttgggtgagggtaggggagttagggagggaaagaagtttttttttttgaaaagttttttagggttgggttgttgtgtaaagttatttgttaggaagtatgggattaatggaggttagaggtaagatttttttggttgttttataggtttagagttgggaggtaggtgttgtgtgttagtaggaagagtagttattagaagagagagaagtagttttggtatttgggggagttatatttgggatggataaaggtaggtatggttgttgagtttgtattgagtagatggttttggatgttttggtaggtgtggtgtggtttggtttttagtaattttgttggtgggtgtttagttattgattgtatgtgtatatttttgttattgttgttattagtattatggtgatgattttttttgatttttatgtatttaggttaaaggaatttggaaaaatatatgaattaaaataaaagttgatttatttttttagggtagagttataagtgttaaaatttttaggtgagatttgttagtgatgttttgattgtatgtttttttgtaaggaaagtggtatgtgttgttttttttagtagtggaaatataaatgattaattttggaaattatggttgttttattgataattaatttgtttgttgataaatgattatttaggagttagaatagagatttaaaagttaaattgtaaaaattattaagttttttttgtatgtagaatattgtgtaatatggttatgggtattatagtggatgtgagtgtgtagattttgtataatagagtttataggttaatgagaagataggaagaaataataggaatatatatagttggaatgtagatgggatttgtgttatttatgttagttatgggatgattagaataagataagagatatgaggaagatttttttaaggaggtgtttaagttatgttttggaaaagagaatttaaggtttggtagggagaaaggagtaaggtaattaggggaagttttggaggagagtaagatgatgttgaaattgtttttattgttggttttaatgttgtttttgttttattggttgatttagagtatttatggtgtaagagagatagggatatttgatttaagaaatagagtagaatttttttaaattaaattagaatttttgatggagtagaggttagagttatgttttggaagtgtttgggaaattgttagttttgtttttaggatttga

SEQ ID NO: 2362 - DNA, 2500 bp, Artificial Sequence
  chemically treated genomic DNA (Homo sapiens)
tattaagtaatataaaaaatgttttatataaatattatattttttagatagtttaatatattaagaatttttttgtagttatttttatgtttttattttagatattttattttgttttaaaaaaaaaaaagtggagaaaaaaagtagttatattttttattttttaaaaatggtttttttggttgaaaagaaagaaaaatagtatataataaatattttgattttgaagtgtttggattatttttttaagtattgtagtgtttgagattagtaaaaaattatttttttagaaagttattgattgtttaatttttatgagtattgttatggaatttagagataatatgaggagatattttttgtttatgattatagatagtggaaagaattttgatttaagtattttaatttagtaaaatagtttagtagtttgtattttggttttatttattgtttttgtttagttagtaattaatttggagaggattttttatgttttgggaggagtatgtggaagttggtttaagttatagtgttttatttgggaaggaggtgattttgagtttgggaaaattgttgttaatattttatagttattagttttttttttaaaaaatgaattaaaattagaaattagtagtaaatattatttttatttatgttttataaattaggaaaaattagtataaagatatgtgaaatattttatttgggatatttgaaataaaattaaatgggaaaaaaaatatttttatatgtttataatatattaattttaataattaaattttaggtaaatatttttattttaagatatagtataatttttttaaaattaaaaagtaaaataaagtaaaattattgtgaagggaaaaaataattaattggttatttgagtttatatttggaaaaaaataattttttaggtatttaaatgtagagttaaagagtaatgaatatgtatatagtttaaatttataaattatataatttaatgttatatttttttttttgagatttggttaataaattaaatgttgtattttgtatatgaggaattaaagtttatttattggatttagtggttttagtgtaggatatttttgtgtgttgttatagaggtaggtatgtaatttagaaaaaattgaaataggtaatttgttatgttgatagttataagagaaagattttgtgttaatggtatgtttttaattgtgtattttttttatttatagtttgtttattagagttttgagtaggttgtttattaggttgggagtgttgatttagaagatagatgatttttagtatatgtaaattgagtattgtaaaagttattttttatttgtgttagtagtttatagttagtttttagtagttttgtgttttagttgtaaatattttattagattaatgtatttagtataggtagaaaatttgatttattatagttatagtaatgaatttttattatgatgatagttttaattatattatgtttggaaaattagttaattattggtttttaaagaatatatatattttatatgtagaaaatgaggtttttgtgtgtgtgtgtgtgtgtgtgtgtgtgtgtgtgtgtgtgtgtgtgtgtgtgtgttttgtgtttttttttttttagtagtttaagagaaatgtgtagtgtagttttttgttgatatgagttgtaaggtaatgatatttttgtttttttggtagttatatttttgtaataatttgaattatgttataatggttagaatgggtgtttttaatattttagtttttattattttttttttgttgttatagaaattagattgtaatattgtttttttgttttaattttgtagtagtgtgggttaatattaggtttataagatattggtgatttgatagagtgaatgtttgattttggataaataaaataaaaagaaatattataatagtattattgtttaggagattttgtgtgatttttagagtagtgtgtttatttaggtgtgtgtatatattatggttgtatatattaaattagtggttgtttataatatatgtgtatagtttattaaagttggttttgattttggttttaggtttgtatgtgtgtgtgtgtaagtatttttatttattttaatgtggtgggatttgtataggatagaaatagggtaagagtgattatttatttttatgttttattgtattttttgtagtaaattaatatatattggtgaagggattttttttttttttttttttttgtaaagtggagtagggttttttattgtttattttatttattttgggatattggtatatttataggtattttttataagatgaaatatttattttataaatatgtggtttatttttagggatgagtagtaaataaatttagttgggattaaatattaattagggttaatgaaggtttaggttataatttggttagttattgagagtgaaaaaaattgtaatggataatttgaggtttttt

SEQ ID NO: 2363 - DNA, 2500 bp, Artificial Sequence
  chemically treated genomic DNA (Homo sapiens)
gagaaattttaagttgtttattgtagttttttttatttttagtaattggttaggttgtggtttaagtttttgttagttttggttgatatttagttttggttaaatttgtttgttgtttatttttaggagtaagttatatgtttgtagaatggatgttttattttgtaggaaatatttgtgaatatgttaatattttagagtggatgaaatgggtaatggggagttttgttttattttataaaaagaaaggaaaagaaaagatttttttgttgatatatattgatttgttgtagaaaatgtaatggggtatgggaatgaatagttatttttgttttgtttttattttgtgtaggttttattatgttgaggtgggtagagatgtttatatatatatatatataggtttggagttaaagttagggttggttttaatgaattgtatatatatgttgtgggtagttgttgatttaatatgtataattatggtgtgtgtatatatttggataggtatattgttttgggaattatatagggttttttgaataatgatgttattgtaatatttttttttgttttatttgtttaaagttaaatatttattttgttagattattagtgttttataagtttggtgttggtttatattgttgtaggattgggataaagagatgatgttatagtttggtttttatggtaatagaggaggggtaatgaaaattgaaatgttggaaatatttattttaattattgtgatataatttaggttattataaggatgtaattattaaagaagtagaagtgttattattttgtagtttatgttgataaaaagttatattgtatattttttttaggttgttaagaggaaggaaatataaaatatatatatatatatatatatatatatatatatatatatatatatatatatatagaggttttgttttttgtatgtaaaatgtgtgtgttttttaaaagttagtggttggttggttttttggatatgatgtggttgaagttgttattgtaatggaaatttattgttgtagttatggtaaattgagttttttgtttgtgttgaatgtattagtttaatgagatgtttgtagttggagtgtagggttgttggagattaattgtgagttattaatatgggtggaagatagtttttgtaatatttggtttgtatgtgttgaaagttatttgttttttgagttaatatttttgatttggtaaataatttgtttagggttttggtgaataagttgtaggtaagggagatgtataattggaggtgtgttgttgatatgggattttttttttgtaattgttagtatgataggttatttgttttagttttttttgggttgtatgtttatttttatggtaatgtataagagtgttttgtattaaaattattgagtttagtaggtaaattttagttttttatatgtaaagtatagtatttaatttattaattagattttagaggggaaaatgtaatattgaattatatagtttataaatttgggttatatatatgtttattattttttaattttgtatttaaatatttagaaagttatttttttttaaatgtgaatttaagtaattggttagttattttttttttttatgataattttgttttgttttgttttttaattttaaaaaaattgtattatgttttgggataaaaatatttatttaaaatttggttattaaaattggtatgttatgaatatgtaaaagtgtttttttttttatttaattttattttaaatattttaggtagaatattttatatgtttttgtgttggttttttttaatttatgaggtataaataagaataatatttattgttagtttttggttttaatttgttttttgggaaaaaaattggtgattatggagtattagtggtagtttttttaagtttaaaattattttttttttaggtggagtattgtgatttgaattagtttttatgtgttttttttaaagtatgaggggttttttttaggttgattgttggttggataggagtggtggatgaggttagggtgtaggttgttgagttgttttgttgagttgaggtgtttgagttaaagttttttttattatttgtgattgtgaatgagaggtgtttttttgtgttgtttttagattttatgatggtatttatgagggttagataattagtggttttttgagaaagtggttttttattgattttagatattatagtatttgagaaagtaatttaggtattttagaattagggtatttgttatatgttgtttttttttttttttaattagaggaattatttttgaagaatgagggatatagttgttttttttttttatttttttttttttaaagtaaaatagaatatttggagtgaaagtataaaaataattataaaggaatttttagtgtgttaaattatttggggggtataatatttgtgtggagtattttttgtgttgtttggta

SEQ ID NO: 2364 - DNA, 2442 bp, Artificial Sequence
  chemically treated genomic DNA (Homo sapiens)
tgttttttttttttataattttaattatttaatttatatttatttttattgagttaatgaaagtaatgttattgttggtgagagtatatttaaggaaaaatatttttttttattttatataattatattttatttttttaaatttatattgatatatagttgaaaagttggttattattttttttttttgttatttattaatggtgaagtattgtgtttttttttgtaggtgttttaagattaggatgatatggtttttttagagtgtttttaggagggttatggtgtataattttataattttagaataaggaaataaaatatttaaaataaagatgtgaagaatatttttatagatggtatttataatttttgttataaatttaaattttgatttaattgtttagtattgtttttaataatttattgtatttatttgattttagtgttaagattatattgtttttttgaggttagattgtattttaatgttttgatattttttttaaatattaataaaaaagtggattttttgaagtttagtaattattagttggttaatttgtttggaaaattgtaatttttttttaagatttttaattttttatttaggattttaatttattttttaaaagattatttttataagtagtgttttatatggtaagtattaattatgtggatttgggggtaatagttttgtttttttattttttttttaaattttggaagttaatagatgatataaagtttagtagagttaatgattttaattttaattgttattatagtttttaataattgtatatttaaaatattaattagaaattaagagttttaatttgattttgtaaaaagtagattgagaaatgattttaggtttttattatgatttaatgggttttatgtatttagaatgattttttttttaaggtaggtaaagagttttaatagattaaatatagagaagtatgttgaaagttatggtaggttggtgttaagtaataaaattgaatttttagtttgtttggtattagttatgtgttttttagatgttggaagaggagtgaaggaggattagaaatttttttattttaatgatggtttttttttttgtgttttattttatttttttgtttttagttatttttagtttttaatttgggttttatatttattttggttttagagtatagatttttttgtagttgggttggtgtgttgtggtgttgaggagttgtggtgtgttttttttattgtgattgtttatttgttaggtgttatgtgtgggtgatgttattgggttttatgtttttattgttgttatttgtttatgtgagttgttttttttttattgtttttgttttttttattatggagaaaattttgtatgtttttttttgtgaaaagtagagtttttttttttttattattattagttgatgaggaaagaaaatgtttgtttgtatatttgtgttgtattaggaggaggagggaggttatataaggatttgggttgtttagggggtggtttgaaaaaggaggtgtttgtatttaaataagaatgtttgaattaatgtagtttaatttaaagagttaattaggagtttataggtgtttaagtttgtagtgtgttgttagtgttatgttaatgatgtattttagttatataggttgttagttttaggtttttttataaatattttatgtttttgttttttttttttgttggtaatagttttatggtgagaaaatttatgaagagtaataggaataatttttatgaaaatatgtagaatttttgatttaaggttattggttgtaagtttagtatatgtattaagtatgggttaaagatatgtttttttttttagaaggtggatgagtaataggtgtatttttttttatttatagttgtttttaaagtgaaaaggagtgaatttgtttatgatttagaggaagagagatgggttaaaagatgttaagttaaggattaatatttgttatattttggttttttgtaagttatgtaataagaggtttgagattttattaattttggagatttatttgggtataattgaaattataataaatttggtgtttagtgttatttttttttggtagtgttataaggtaattttaagggattagtatatagatattgttttagtttttttttgttgtttattttagtttatgtagtattgattaaaaattttggaatttagattgtttaatgtttatatttatatttaatattaaaatttattattgatagtttgtttttttaaatatttatgaaatttagtttttaatttgttttttatttttatatttatgtttttattatattttgtttaagttattaattggatattttaaatatttatatgtataaaatttttgtttatttatttgttttttttttttagtgttgaa

SEQ ID NO: 2365 - DNA, 2442 bp, Artificial Sequence
  chemically treated genomic DNA (Homo sapiens)
tttggtattagaaagaaagaataaataggtaggtagagattttgtgtatataggtatttgaaatgtttaattaataatttaagtaagatatggtgaaaatatgaatatagaagtgagggatagattgaggattagattttataaatatttagaaaggtaaattgttagtaatgaattttgatattggatgtagatataagtgttaagtagtttaaattttaaaatttttagttagtgttgtatgaattgaaataagtagtaaaagaaaattaaaataatgtttgtgtgttgattttttgaaattattttgtaatattgttaaaggaaaatggtattgagtattaagtttgttatagttttagttgtgtttaagtgagtttttagagttggtgaaattttaagttttttattgtatggtttatagagaattaaggtatgatggatattaatttttggtttgatattttttgatttatttttttttttttaggttataagtgaatttatttttttttgttttgaaaataattgtgaatagaagaaaatgtatttattatttatttgttttttgagagagaaaatatgtttttaatttatgtttgatatgtatgttaaatttgtagttagtagttttgggttaggagttttgtgtatttttataagagttgtttttgttattttttgtgaatttttttattataaaattgttgttaatggggaagagggataagaatatgaagtgtttatgagggagtttgaaattgataatttgtgtaattggagtgtgttgttggtatgatattggtagtgtattgtaaatttaagtatttgtggatttttaattagttttttaaattgaattatattaatttaggtatttttgtttgaatgtgaatgtttttttttttaagttattttttgggtaatttgaatttttatatgattttttttttttttttagtatggtgtaggtatgtgaatagatattttttttttttattaattggtggtaatgagaaaaagagaattttgttttttataagggaaaatgtgtaagattttttttgtagtaggggaggtgggggtgatgggaggagagtagtttatgtaggtagatagtggtgatgaaagtataaagtttagtgatgttgtttatatgtggtgtttggtaagtgaataattgtggtgagaggggtgtgttgtagttttttaatgttgtaatgtgttggtttaattgtaggaaggtttgtgttttggagttagggtaaatgtaagatttggattggagattagaaatggttagggatggggaggtggggtgaagtataggggagagaattattgttgaggtgagggggtttttgatttttttttgttttttttttggtatttggagggtatatagttaatgttgggtagattgagagtttaattttgttgtttagtgttgatttattataatttttaatatgtttttttatgtttagtttattgaaattttttatttattttaaaagagaaattattttaagtatataagatttattgaattatagtagaagtttgaagttattttttaatttgttttttatgaagttaaattaagatttttagtttttaattgatgttttgaatgtatagttattagaaattgtaataataattagagttggggttattgattttgttggattttatattatttattggtttttagaatttaaaaaaaaaatgaagagataaagttgttatttttaaatttatgtagttaatatttattatgtgggatattgtttatggaaatgattttttaaagaatgggttgaagttttagataaggggttgggagttttgaaaaaaggttgtaattttttaagtaagttagttaattagtagttattgaattttaagaagtttatttttttgttagtgtttgaaggaaatattagggtgttgaaatataatttgattttagaaggataatatggttttaatgttgaaattaaataaatatagtaaattattagaaataatattaaataattgagttaaaatttaagtttgtgataaagattatagatattatttataagggtattttttatatttttattttaaatattttgtttttttgttttagggttataaaattatatattatggtttttttaaagatattttaggaaaattatgttattttgattttaaaatatttgtaagaaagagtatagtattttattattagtaagtagtaaagaaaaaaaatggtagttaattttttaattatatattaatatgggtttaaaggaataaaatgtaattatatggaatagaaaaaaatatttttttttgaatatatttttattaatagtgatattgtttttattgatttaatgaagatgagtataggttagatggttgaggttatgagagagaagagta

SEQ ID NO: 2366 - DNA, 2386 bp, Artificial Sequence
  chemically treated genomic DNA (Homo sapiens)
ataatttaattattttttagtaatttgagtattgtgttttattaaaaaatattttaaaaaatgagttatttgtagaatttataaaggatgtttttttaaaaaatgaatatattttaaattgtttatataaatagtttttaatatatatattagaattagtaagttaaggttatttttgtaatagtttatttttgataaaattatttgtgaaataaaaaaaagaaaaagaaaaaattttatttgttgagtttttgtaaaagatattgtttaatttgttagattgattttttaattaaaatttaaaataatggaataaaaatttaatagtttaaaggttaaagttagttaatgtatatttttaaatttgtaattgatttatttataagtaaaaatatttataaagtttaattgattttttattttgtatattgagaaatagtattttgtattttttgaataatttataagtttgaattttaaggtatatatatatatgtgtgtgtgtgtatatatgtgtgtgtgtgtgtgtgtgtatatatttatatatatgttgtatttatgtttaattattttggttataaaggttaaaaggataaagtggttataagttataatgggttggagaatttggatggaatgtggatttaaattattgtgttatgttaatttgttgaaattttattgttaaaattttgtattgttaggtagtaaaatagaagaaaaaaaaataaattgagaaagtgttaatttttaagtaagtttgataaagattgagttttatatgataaatattgttagtaagataggattttgttagtggaagaagtttaaatattaataatttttgttaggttgttgatataattatggtagatattttttaagatgttgagatgattgttggtatttgttaataattttgttatagtgatagtaataaggttatgtttggaaatgtgatagttttggttttgtgtttttttgagtaatagtttaggtgtttagagaaagtgtgggaaaatttatatttttgtattgttatttgaatatagaaaatataggaggaaaatgagttgttattttaatttttatgatgttttgttgtttagtataattttatagtgtggttttgggtttattggtttatattttgatagataattaagaaagtagtagttttttttagatggtttttttttatgatttgtattttagttagaggtgattagttataaaaaaaatatgatggaaagatggtaagaagttaattagatggatggatggttgattgatagttttttggtattatgattttagattttagattatatagtttggtagttttttataagaattaatttttttgtaggttggtaaagttgttaaatgtgggattatatatagttttatataatttttgtaaagttgtatattttttttaaataagtatgtattttttttaattagggtttgtattaaataagttttaataatttaattataatttgtattattaaatttagtaatattaaaattttagataatttgtaggtatattagttgtgttagtagagaagtgattaaaaagttgagaagtattttgagttagtagagataaagtgagttaataattataatgtttgtgtaaatatgttttggaattttgaattgtatattgtttgtttttaagtaaataaaaatatagattttaaattttttttttgtttttagattttgtatatatatatttggttattatttttgtttagggtataatatatgtttgtgtgtttgttattttagttaattttgaaatttttaaaaaataaattgttagtgttaagtttttagtttggttatgatattttatagtttttagttaataggagttaattttttataatattttatagtttggaagttttattaatgttttttgtgtattgtatgttgtgtgtgtgtgtgttgtgtgtgtgtgtgtatatatatatatatatatttgttatatatatattaatatatattatatattagatatatatatattaatatatatattagatatatataatatatatattgttaaaagtaaataatttgttattagtttggtatgtttttatttgtagtttgaaataagaaattttttttttaaattgtaaagatattttagatttgattttaattttgaaatatgaagggtaggtaattattttattatatattgaagttttagtaaggaatattaatttaaggtagaaatgtgagtatatttttttattgtgggtaatgaattttttataaattgaggataattattaaattaatggtaggtttgaatgtttttagttgtttaaaattaaataatatatattttaaagtttta

SEQ ID NO: 2367 - DNA, 2386 bp, Artificial Sequence
  chemically treated genomic DNA (Homo sapiens)
tggaattttaaaatgtatattgtttagttttaagtaattaaaaatatttagatttattattagtttaatgattatttttagtttgtagaagatttattatttatagtaagaaaatatgtttatgtttttgttttgggttaatattttttattggaattttaatgtatagtgaaataattgtttattttttatattttaagattaaaattaaatttgaggtatttttataatttgaaagaaaaattttttattttaaattataaatgaagatatgttgaattaatagtaaattgtttgtttttaataatgtgtgtgttgtgtgtgtttgatatatatattaatatgtgtgtatttgatatataatatatattaatatatatatgataagtatatatatatatatatatatatatatatataatatatatatatatggtatgtagtatataggaaatattggtgaagtttttaaattgtaaaatattgtgaagagttgatttttattggttagaagttatagaatattatggttaaattggaagtttgatattaatagtttattttttaaaaattttaaaattagttaaaataatagatatataagtatatattatattttgaatagggataataattaaatatatgtgtgtaagatttaaagatggagaggaaatttagggtttatgtttttatttgtttaaaagtaaataatgtataatttaaagttttaaagtatatttgtatagatattgtaattattagtttattttatttttgttggtttaaagtattttttagttttttaattatttttttattggtatagttaatgtgtttataagttgtttagaattttaatattgttaaatttagtgatgtaagttgtgattaaattgttgaaatttgtttaatgtaaattttgattgaaaagaatatatgtttatttaaggaaaatgtataattttgtaaaaattatatagagttatatatagttttatatttaatagttttattaatttgtaaaaaagttggtttttgtagaaaattgttaggttatgtagtttgaaatttggagttgtaatattagagagttgttagttagttatttatttatttaattggttttttattatttttttattatgttttttttataattggttgtttttggttaaaatgtaaattatgaggaagagttgtttagaaaaagttgttgtttttttaattatttgttagaatatggattagtggatttagggttgtattgtagagttatgttaagtagtaaggtattatgggaattggagtgatagtttattttttttttgtgttttttgtgtttgaatgataatgtagaaatatgggtttttttatattttttttgaatatttgggttattgtttaggggagtataaagttaaaattgttatatttttagatatggttttattgttgttattatgataggattgttgataaatgttagtagttattttggtattttgggaaatgtttgttatgattgtgttaatagtttgatagaaattgttaatgtttaaattttttttattgatagaattttgttttgttgataatatttgttatatgaaatttaatttttgttaaatttgtttaaaaattaatatttttttaatttattttttttttttttgttttattgtttagtagtgtaaaattttagtaataagattttaataagttaatgtaatatagtaatttagatttatattttatttaaattttttaatttattataatttgtggttattttgtttttttgatttttgtagttagaataattaggtataaatatagtatatatataaatatatatatatatatatatatatatatatatatatatatatatatatatatgtatgttttaggatttaaatttgtgaattatttaagaggtataaaatattattttttagtgtatgaggtggaaaattaattaaattttgtggatgtttttatttataagtaaattagttgtaaatttgaagatatgtattaattaattttgatttttaagttgttaaatttttattttattattttgaattttgattaaaaaattaatttgataagttaaatagtattttttgtaggaatttagtaagtagagtttttttttttttttttttttattttataagtgattttgttaaaagtggattattatagggatagttttaatttgttaattttgatatatgtgttagaaattatttatgtgagtagtttaaagtatatttattttttaaaggaatgttttttataaattttataggtggtttattttttgaaatattttttaatgagatataatgtttagattattagaaggtagttaaattgt

SEQ ID NO: 2368 - DNA, 2300 bp, Artificial Sequence
  chemically treated genomic DNA (Homo sapiens)
attattgtttattggatttaaaagttttattttattttttatttttatttttttgggaagttttaggatatatttttttttttttttttaataggtatggatatttttattttatttttatttttttttattttttattatattttaagttttagggtatatgtgtataatgtgtaggtttgttatatatgtatatatgtgttatgttggtgtgttgtatttattagtttattatttatattaggtatattttttaatgttatttttttttattttttttattttatgataggttttggtgtgtgaagttttttattttgtgtttaagtgtttttattgtttaatttttatttatgagtgagaatatgtagtgtttggttttttgtttttgtgatagtttgtttagaatgatggtttttagttttatttatgtttttataaatgatatgaatttatttagatgtatttttatttttttatttattattttgaaatttttaaaatagttatttagtattttttttttaaatgtgtttgttttatttttatttaagtttgttgtaattatatattgaatatttttaaattttgtttaagttgattttattatttttgttttaaattttaattatgttttaaatgtataaaaattatgtattatatataattatgaattataaataattaaatgtatttatttttaaaaatatgattgaagaaattttttttttttgtaattttttttttaagattaaatgagtttttagtgtttgtttgatatatggtaggtttttaataaatgaagtatattttttatatttttttaaataaatagttgtttttttaaatttagatatgagtgtttagtaggtatgtatttttttgggttggatttattttatggatagttgttaaagattgatttttttatgttaattttttgaatattgtgtttgattgtgttgtaagttaaatagtataggattaaatgtttttatttttgagttgtgaagtgttgaaattgattaagaaatgaaggtagaatgtttgttttttgggagaataattagttagtttatgttgttgttatttttggttgttgattggaatgtagttgttaaggtagttgtttaattgtttgtttaatttgaaaggatattgttaaatggtaaatattttttataataatattttatttttgttaagaataataatagtgtattttattgagttttaatggtgtgttaaatatgatagatttattattaggtaggtttataatttggattgaatatggatgtttatttttattttttatatatttagaaaaagaataaatgggtttttaaaggaagtttttatataaaatatttttatagtttaattatttgttgaaatgatagtatattaatttgagaaaatgaaatattttaaaaggaaagatgagagtttagaaatattataggaaaaaaataaggtttaagtattttaaatttttttaatgtggtttaagagagatttaatttatatttgtttaggataggtgagggtagtagtaatataaggaaatatattatttgttgaattttttgtaatttatgggttttaggatttttgagttatgtagttaatttatattgttaattagaatgttgatattaagtatttaataaataattatgttgaatttgatagattgtgaattaggtgaggtggggtgggaggttattagttgttatttaatggtaaaattggtatgttaaatgtaggtagttaaaattaagaaaatatatttaaatgtggaagtataattttttattagaagttagtaataattgttatttatagaagttattgtgtaatttttataaatatttattaagattgtagaggtgaggggtggtggggggtgtatttttatttattaaattttatagttaaagttgaagtagagatgtttttgaaggtgaattgggttaattaaaggtatggttagtggagattttaatttattttttttttattgtttattagatgttaattaaattataaatgataatagtttaatagtaaaatgtatgtatttttataaagttgatatgattttttggataaagatagataaagtttaatatgttggataatggttattgagggtattaagatttgtgatttttttttttagggatatagaaaaatagtaaatataaattatggatgaaatttataagattatttttatagaaagggtttagttgttggagaaaaaattggttgtgtaattgattgaattgaagttt

SEQ ID NO: 2369 - DNA, 2300 bp, Artificial Sequence
  chemically treated genomic DNA (Homo sapiens)
agattttagtttagttagttgtatagttagttttttttttaatagttggattttttttgtggaagtgattttataaattttatttatgatttgtatttgttgtttttttgtatttttgaaaaagaggattataaattttgatgtttttagtgattattatttagtatgttgaattttgtttatttttgtttaagaaattatgttaattttgtagaaatgtatgtattttgttattagattgttgttatttgtgatttaattaatatttagtaaatagtagagaaaaagtaggttagaatttttattggttatgtttttgattagtttagtttatttttaaaaatatttttgttttagttttggttgtggggtttaataagtgagaatgtattttttattattttttatttttgtagttttgataaatgtttgtggggattatatagtaatttttgtgaatggtagttattgttgatttttaatagaaaattgtatttttgtatttgaatgtgtttttttaattttgattgtttatatttagtatattggttttattattaaataatagttgataattttttattttattttatttggtttatagtttgttaaatttaatataattgtttgttaagtatttagtattaatattttaattaataatgtagattaattgtatgatttagaagttttgggatttataagttgtaggggatttaatagatgatgtatttttttgtgttattgttgtttttatttgttttggataagtatgagttaagttttttttaggttatattagagagatttaaaatatttaaattttattttttttttgtgatatttttagatttttatttttttttttgagatattttatttttttaagttaatatgttgttattttaataaataattaagttgtagagatgttttgtgtagaggttttttttgggagtttatttattttttttttaaatatatgaaaaatggaaatgagtatttatgtttagtttaggttgtgaatttgtttagtaataaatttgttgtgtttggtatgttattggagtttaataaaatgtattgttattgtttttagtaaaagtaaaatgttgttatagaaaatatttgttatttggtagtgtttttttaagttgggtaaatagttaaatagttgttttaatagttgtattttaattggtagttaagagtggtagtaatatagattggttgattatttttttaaaggatggatattttgtttttattttttgattagttttaatattttatagtttagaaatgagaatatttaattttgtattgtttagtttgtaatatagttaagtatagtatttagaaaattaatataaaggggttagtttttgataattgtttatgaaatgaatttaatttagagaaatatatgtttgttgagtatttatgtttaggtttaaagagataattgtttatttggaggggtatgggaggtgtgttttatttattgagaatttattgtgtgttaggtaagtattgggaatttatttagttttagaaaagagattgtgagaaaagagaatttttttaattatgtttttaaaaataagtatatttaattatttgtaatttataattatgtataatatataatttttatgtatttaaaatgtggttaaaatttaagataaaaatagtaagattagtttgagtaaggtttgggggtgtttaatgtgtggttatagtaggtttggatggggataaagtagatatgtttagaaaagaaatattgagtaattattttaaaagttttaaggtgatgagtaaaagaatagaaatgtatttagatgagtttatgttatttgtagggatatggatgaagttagaaattgttattttgagtaaattattgtaaggatagaaaattaaatattgtatgtttttatttgtaggtgggaattgaataatgagaatatttggatatagggtggggaattttatatattagggtttgttataggatgaggggagtggggagggatagtattaggagatatatttaatgtaaatgatgagttaatgggtgtagtatattaatatggtatatgtatatatatgtaataaatttgtatgttgtgtatatgtattttagaatttaaagtataataaaaaataggaaaaaataaaaataaaataaaaatatttgtatttattaaaaaaaaaaaaagaaatgtattttagagttttttaaagaagtgggagtaaggggtgagataggatttttaaatttaataaatggtggt

SEQ ID NO: 2370 - DNA, 2441 bp, Artificial Sequence
  chemically treated genomic DNA (Homo sapiens)
gttttattttggtatataaatttaaaggataggaaatggaatagaataataaaaataaatttttaaatttagaattattataaatagagtagtataaagaggtagaaagttttattttatggtatgttgtatttgttttaaatatttgatttaaaattagatattgttggaaatattatatgatttttttattggtaggagttattttgaaatgattgtaatataaataggagtagagaagtttattaaatttttttttaaggatatttatgaattagggtattataaaattggaaatattgaaaaggtttttaaagatattgtttaatagtgaaagaaatgaagaagaggttatatttttgtttattttttggttttttttgtaggttttttttttttatattttaaagaagttgttattagttttaaaaaaaaaaaaaaagttttgggaaggtgattagggagggtgatgtagagttttgttaataggttaatttaagaatagttgttaaaattatatagaggagagttaattggggagataattatttgttgtgttgtaggagattattaagtgagttttttaaggttataaatttaattatttagttgtatgaaatagttaattggtaagaaaatagttatgattttttgtttatttatgtttttgtttataggttattttttagattgaatggttgaatatagtattatagatttttatattataggaatgaaagtaaaatgtttttattaataataaatgttttttattgtaaataataatttaaatttttatttttataaaagtttgatatataagaaaaggaaataaattagattttgtttatttaatgagataaatattttttttaagtgtgtatgttgtgtgtttttagttagtaagattttttttttaaggaatgatgaaagttaaaatattttttaaagtataattattaatagaaaataggaagttaatttatttgttttttgtgttagtattttattatttttttatttgtgtttttgttttttaggagggttaattgttgagtttaggtttttagaagggtattgaattgttttagggtttgttttagttgagttatttggtttgagaatttttgttttgaaagggttatttggttgattaggttttttaaatagttttgtgtttggaatatattgtttttttattgtttttagttggtatgtagggtttgtatttttgtgtgtatgagtttatatttattggtagttgtgttttgttttattttgggagttagtgattttattttgttgagatggtttgtattaatttttttggaatttattagtttttgtaatggaatattattatggtaattgaagagtttgtgagttatttggattgtaagtttttaattgtgtatatagggggattttgttttgttaggaagttttaataagtgtgttataaggatttagaattaatttatttgtttatttttaaattataatagtgggagttgttattatgagtgtttaaggtttatggtaaaaaaattttgagaatttttaatattttgaaatagattaaatagagattttgaaattaggtattatttgtatatgtgaaaatgtttagtgatttaagtgtttgtttgtggtggattgtttttgtgaatgattaaatttatattttttttaaagtggatgtttaagtaaataaagattgtggtagaattgtgttttgtttatggtttttatatttaatttattttttttaatagggtggtggtttaaattatatttttattttattaggaattaagtagatttattatagtaaaagaatgagttttatttgattttaaatattttaatattaagtaaatatttttgtagtatataaaatgaataatttatttatagattgatttatttaaaagtttaaagtaatttttagattgagtatatttattagtatttttttattttaaaaaagttattagaaatttaatagtttagttatagttaagttaataatttagtttgattttaaagtatataaatattgtaaaggaaaataagataaaattaaattatattgttaaattgatataattgtagtatttttgagaatagatttttttattaaaattttttttggtgaaataattatttgatgtttatatatttatatatttattgttaaaggtaggattttgttaatattattataaaattatgattttattattggattaaatagaaataaaagataattaggtataaaaatgtttaagaagaaaattaatgattaattagtaagtaaagaaatattggaatgttaagtatgaagtatgtttaataaattatgttaagtataaagtatgttttaattagtttatataatatagtttgtattttattaaattaatttgaaataaatatat

SEQ ID NO: 2371 - DNA, 2441 bp, Artificial Sequence
  chemically treated genomic DNA (Homo sapiens)
atatatttattttaagttaatttaatgagatgtaaattatattatatagattagttaagatatattttatgtttaatataatttattaagtatgttttatatttaatattttaatgtttttttatttgttaattggttattgattttttttttgaatatttttgtgtttgattattttttatttttatttaatttggtagtaaagttataattttgtaataatattaataaaattttgtttttagtaatagatatgtaaatatataaatattggatgattattttattaagaaaaattttagtaagagaatttatttttagaaatgttgtaattatattaatttaataatgtgatttaattttattttgtttttttttatagtatttgtgtgttttaagattgagttaaattgttaatttggttatagttaaattgttaaatttttagtgatttttttaaggtaaaaaaatattaataaatgtatttagtttagaggttattttaaatttttgagtaagttagtttatgaatgaattatttattttatatgttataaaaatgtttatttagtattgaggtatttggaattgagtagggtttatttttttgttgtgatgagtttgtttgatttttagtagaatggaagtgtgatttaagttattattttgttgaagaagatgaattgagtatagagattgtgagtagaatatagttttgttatgatttttatttatttgagtatttattttgagggaaatatgggtttaattatttataggagtaatttattataggtaaatatttgagttattaaatatttttatgtgtgtgaataatgtttgattttagggtttttgtttagtttgttttaggatattgaggatttttgggatttttttgttataagttttaggtatttgtgatgataatttttgttattataatttaagagtggatagatgaattgattttgggtttttgtggtatatttgttaaaattttttggtaggatagggtttttttgtgtatatagttgaaaatttgtagtttaagtgatttataggttttttagttattatggtgatattttattataggagttgatagattttagagagattggtgtaagttgttttagtagagtggagttgttggtttttgaagtgaaatagaatataattgttagtgggtgtgagtttatgtatatggagatgtaggttttgtgtgttgattggaagtagtgggaagatagtgtattttaaatgtagagttgtttggagaatttggttagttagatggtttttttggagtaggaatttttaggttaagtggtttaattggagtaggttttggaatagtttagtgtttttttgaaaatttgggtttagtagttaatttttttggaaggtaagaatatggatgaggagatagtggaatgttggtataaaggataagtaagttggttttttgttttttattggtggttatgttttaaaaaatgttttgatttttattattttttaaaaaaaaaattttgttaattaaaaatatgtaatatgtatatttggaagaagtatttattttattaaataagtaaagtttgatttgttttttttttttatatattaaatttttgtaaaaataaagatttgggttattatttgtggtaggaaatatttgttgttagtggagatattttatttttatttttatggtgtaagagtttgtaatattgtatttagttatttagtttgaaaaatggtttgtgggtaggggtataaatagatagagagttatagttgtttttttgttagttaattattttatataattaaatgattgaatttatagttttaaaagatttatttggtaattttttatagtatagtaaatagttatttttttgattagtttttttttgtgtggttttgatagttgtttttgaattagtttgttaatagaattttatgttattttttttggttatttttttgagattttttttttttttttgaagttaatggtagtttttttagaatgtgagaaagggaagtttataagggagattgaagaatgagtaagagtgtaattttttttttgttttttttattgttaaatagtatttttgaaagtttttttaatatttttagttttataatgttttgatttatggatgtttttaaaaggaaatttagtaaatttttttgtttttatttatattataattattttaaaatagtttttgttagtaagaaagttatgtagtatttttagtagtgtttggttttaaattaagtatttgaaataaatgtagtatgttataaaataaagttttttatttttttatgttattttatttataatgattttaggtttgggggtttgtttttgttattttgttttattttttgttttttagatttatgtattagaataaagt

SEQ ID NO: 2372 - DNA, 2311 bp, Artificial Sequence
  chemically treated genomic DNA (Homo sapiens)
atatttgtgtttatttatttttttttgttttttataagaataattattattgtgatttttttttatattttattatttatttttttaaaagaatattttttattgtttaaatgttatataattataaaagtagagagattatatttatttttagttttagaaattatgaattgatagttaattttttttatttatatttttatttattttttttttaatttttttgttaaattatgttatttagatgttgggtattatattataggattttttaatatattatggaaattgattattataaagtttttattgttagttttttttttttttaggttatggttgtttttttttttttggaatattttgatgttaaatgatgttttaggaattataaaattaaagtaagaagggaggtataagtttatttattttattattttaaataatgtaattgtaataaaaagtattttattttttttttttttatatttttttgaatttgtttgtattaattgaagtttattttttattttgattttgtttgtagaaatgtttatttttggggaattggttttagttttattttgttttaattaggttaaaaaggatgatagttttttttttagtttaaaggaagtagagagtagaaataaatttattgaaaattattatgttagtagattaaatttttgtgaagttggagggtttaatataaattatagtaaatatagttttagttattttagttttagatatgttagtataaaaatttttttttttatttttatttgtgtttttgtatttatatttatattggataatatgtaaagatttatatatattttttttatttttaggaatttttgttttataataaagattaagagttttttatagtagatttataagtttatgttttttgtatttgggataattattttttattattttaagaattgttaatttagaattttttatttagtagtgtagtaatttaaggaaaagtgttgtttatttttgttagtgggttagtagattttttagtgttgtttgttttttttttgttttttttaggatgtttttgtattgttgttgtagagttgtagttttttgaatataggaatttttgtttataatttttttggtattggttgagaaggtagtgattgtgttgtttagtgattttagggtttggtagagattttaagaagagtgtgagaagaatgtagtgaaagtataggagttaatgaggtttgtatttttttttgatattgattattgtaaaatatttttttttagttataataaataggaatagtattaagaatgggtataaatatatagtttgatagaagaaatgagatttagtgtttaatagattagtagggggattataggttataataatttattttatattttaaaatagttagaaaatagtttgaatgttttttgaataaataaaatataaatattttaggtgatgaaggttttaattttattgattttatttttataaattatatgaatatattaaattattatatgtgtatttttaaaaataaataagagttatatttattttaaaaggtttgtgtttatgatttgtagtaagatatagtgaaaatgagaagaaagtgattttataaatatagaaattaaaaatgaaaatggagatatttttttaaataagaatgtattgttatttatttaaaaatttttaatttttttttaataatttaggtaatttgtgaagattattagttattttatgttaaatatgtatttaaaaattttatttttaatttataaaatttatatgtaatatgttataattattttaaaaaatatatataaaaagaattatggttgaagaagttattgtttattttaatagtaataataataataataataataataataataatgatatagtgttttagaatgtggtaggttttgtattatttgttttttatgtattgattttttttatttttttgagaattttaagaggtatgttattttattatttttattttatagattaggaaattaagatatagaaaaataatttgttttaggaaatttaaatattggaaaagtagaatattagtttttttggttttttattattaatttagttgtttataaaaataattttattatattgaatttttttatttttttttattttttgtattaagaaattataaataagtaatgtaaaagtgtatttttattattaatatttaaataatagaaattttatttttttttttagatggtttttgttaatggtttgtttttt

SEQ ID NO: 2373 - DNA, 2311 bp, Artificial Sequence
  chemically treated genomic DNA (Homo sapiens)
agaaaataagttattgataaaggttatttggaagagggagtgagatttttattgtttaaatattgataatgagaatatatttttgtgttatttatttgtaattttttaatataaaaaatgaggaaaagtaggagaatttagtgtgatgaaattatttttatagataattaagttaataatggaggattaaagaggttaatattttatttttttgatatttagattttttaaagtaagttgtttttttgtgttttgattttttaatttgtaaaatgaaggtaatgaaataatatattttttagggtttttaggaagatgaaaagagttaatatatgggaagtaggtaatgtagggtttgttatattttgaggtattgtgttattattattattattattattattattattattattattgagatagatagtagtttttttagttataattttttttatatgtattttttggagtgattatagtatgttatatgtgggttttgtaagttaagaatagggtttttaaatatgtatttagtataaaatgattaataatttttataagttatttaaattgttaagggaaagttgaaagtttttagataaatagtagtgtatttttatttgaagaagtgtttttatttttgtttttgatttttgtatttatgaagttattttttttttatttttattatgttttgttgtaaattatgggtatagattttttaaaatagatataatttttatttgtttttgggggtgtatatgtgataatttaatatatttatataatttgtaaaagtaaaattagtggaattgggatttttattatttaaaatatttgtgttttatttatttaagaaatatttaaattattttttagttattttgaaatataggatagattattgtaatttatagtttttttattaatttattgaatattaagttttattttttttattaaattgtatatttgtatttatttttagtgttatttttgtttattatgattgagggaaaatattttgtgatgattggtgttaaagaaaaatgtaggttttgttggtttttgtgtttttattgtattttttttgtattttttttaggatttttgttaggttttggagttattgagtagtgtgattattgtttttttagttagtgttaggaaggttgtgaatagagatttttgtgtttaggaggttgtggttttatagtagtaatatgaggatattttaaggagggtgaaggagagatagatggtgttggagaatttgttggtttattggtagaggtgagtagtatttttttttgagttgttgtattattaaataggaaattttggattagtagtttttaaagtgatggggagtagttattttagatgtaaaagatgtgaatttgtgggtttattgtaggaaatttttgatttttgttataaggtaaagatttttgagagtggagaggatatatatgggtttttatatattatttaatataaatgtgagtgtagggatataaatgaaaataaaaggagggatttttgtgttggtatatttaagattgagataattgaggttgtatttattatggtttgtgttggattttttaattttataaaggtttaatttgttagtatgataatttttaataaatttgtttttgttttttgttttttttaggttagagaaagaattattattttttttgatttggttagagtggggtgaagttaaagttagttttttagaaatggatatttttgtagatagagttaaagtggaaggtgaattttagttaatataggtaagtttaaggaagtgtgaggaaggaaaaaataaaatgttttttgttatagttatattatttaaaataataaaataaataaatttgtatttttttttttgttttggttttgtgatttttgaagtattatttgatattagggtgttttaaaaagaagaaagtaattatgatttgaaagggagagaaattaataatgagaattttgtgatgattaatttttatgatgtgttagaaaattttgtaatgtaatgtttggtatttgaataatatggtttggtaaaggagttgaggaaaggatgggtaggaatatagatgaaagaggttggttattagtttataatttttgaggttggaaataggtataatttttttatttttgtaattatatgatgtttgggtaataaagggtgtttttttaaagaaataagtaatagaatgtagaaagaagttatagtaatgattatttttatggaagatagaaaaaaatgaatgagtataaatgt

SEQ ID NO: 2374 - DNA, 2454 bp, Artificial Sequence
  chemically treated genomic DNA (Homo sapiens)
ttttgggattaagggattgttttattttagttttttgagtagttgggattataggtgtgtgttatttagtttagttaatttttgtattttttgtagggatagggttttattattttgtttaggttagaaggattgtttgagattagtttgggtaatataatgaatttttgttagaaagggaaggggaaaagaaaggaaaggaaaagggaaaggaaaaaagaaaggaaggaagaaagagataaatataattgtgttatttagagaatagaggtattattgggtatggtgttgggagtttgtagttttagttattgggggagttgaggagggaggattttttgagtttaggagatggaggttgtagtgagttataattatattattgttttttagtttgggtgatatagagagattttgtagtaaattttaaaaattaaaaataaaaaagagaatagagatgttaaaaatttttaaggaattttattttgtgtttaaattatgagaattatttgtggttaggtgtgtttatggttgtattaattaaaagtgtgttatagttttattattggggaggttaaagagggaggatttttttgagttttggagtttgaagttaatttgggtaatatagttaggttttataattttttttttatttattttttttttttattatgtaaattttattatatagattttataatagaaaaaaaaaagaaaaagaaagaaaaaaggtgggtgtttattttgttttgtatttagtagttttaggtaagtgatagaataatttgaaaatttggtttagagggaggaaatgtagtggttagggattagaagtgtgtgagggatttatgaagtatttattttgtaagtattagtttttttttttgggagagatattgggtttgtttatgtttttttgagtttatggttaagatttttgttgggtattagtggatttttggtgtttagagtttggttttttttattgggtgtgttgggaaaagggttgtttttgatagaagggatattttaagagtagtttaggaattggtgtatttgggtggttttggaagaagttggggtttttggaggtggaggtgaggtttgggatttaataagaagggtgtggttagagaggaggggttggttaaaagtttttgaaataaggtttaggtagaattgtggttttagttttttagttttagtttggtttttgggtttgttgtggtgtttttgttttttgtaggattggttgtagtatggatgtttttaggtggtttttgatgtttgtgtaattgatgtagttaaaagtaatgttagtggaggtgtttggttatttttttaagtggtttttttggttttattttgagtttttgaagaatttgaaggtagtttgttttgaggtttggttggtggaaaagatttttggtgagtggattaagaaggggtagtttttatgtggtttttttttgttatttatatttatagtttatatattttggttgtgttttagggtgatttttattagtagttaatgttttttggttgttttttttttttattttttttttttaagatttttgggagttattggttttttatagtttttttgttatttgtgtaggttggggtggagaatgtattttgtatgtttagggtatgttttaaattttgatttatgtgaattgattggattttaatggtgaggttgagattttggtatttgggaggtttttttattaggaggatataattaagatgattatgaatttggttgattattattgttagttttaggtgaaaggtatggggttgggaatagggttatttggagtaaattttggttttgtaggagtgattttggggttttttggttgttggggtggtagttttgtttttttagttggtttgtggttggtgggtgggggagggggtggtttttgttgttatggatttagaaggttaaattgaatttttgttttgggatttttggtttttatttttgtaggttgtttgggtgattgtttttttttggagaggatatagagatatagttgtggtttttgtatattgttttttttttaggtttaggaaaggtttttgtttaggatgttgttatttagaaggttgagatttagtggtttttaatagaagtttgggaggttgggatgtagtgtttggtggaggtttgggaggttgggatttagtgtttggtggaagtttaggaggttgggatatagggttttttggtggaggtgtaggaggttgggatttagtagtttttttaggttgttaataagttggggatttagtgattttttgaagttgttagtaaggtagtgatttagtggttttgtgaggatgtttgggatttagttattagattatgaaggtattttaggttttggagttagagttagttaggggttaaagtgaaagtttgtatttttg

SEQ ID NO: 2375 - DNA, 2454 bp, Artificial Sequence
  chemically treated genomic DNA (Homo sapiens)
tggaaatatgggtttttattttaatttttgattggttttggttttagggtttgagatgtttttataatttagtaattgggttttgggtatttttgtgaaattgttgggttattgttttgttggtagttttgggggattgttgggtttttgatttgttggtagtttggagagattgttgggttttggttttttgtatttttattggagaattttgtgttttgattttttggatttttattgaatgttgggttttggttttttggatttttattgaatgttgtgttttggttttttggatttttattgaagattgttgggttttggttttttgagtggtgatattttgggtgagggttttttttgagtttggaagaagagtagtgtgtagaggttatagttgtgtttttatattttttttaaaaaaggatagttatttaagtggtttgtgggagtaggagttagaaattttagaatgagggtttaatttggttttttggatttgtggtagtgagaattgtttttttttttatttattaattgtaggttgattgggagggtgagattgttgttttagtagttaggaaattttaggattatttttatggagttagggtttgttttaggtagttttatttttagttttgtattttttgtttggagttggtggtgatagttagttaggtttatgattattttgattgtgtttttttggtaagaaggttttttaaatattaagattttagttttgttgttagggtttaattgatttatgtgaattaagatttgggatatattttggatgtgtgggatgtgttttttgttttggtttgtgtgggtagtagagaggttgtgagggattggtggtttttgggggttttgggaggggaaggtggaaggaggagatagttagagggtattggttattggtgaggattgttttggaatgtagttagaatatgtgggttgtgggtatgggtggtagaaagaagttgtatgggggttgtttttttttggtttatttattgaagattttttttattagttaaattttaaggtgaattatttttggattttttaggaatttagagtggaattaggagaattgtttagggaggtgattgagtatttttattggtattgtttttggttgtattagttgtatgagtgttggaaattgtttgggagtgtttatgttgtggttggttttgtaggagataaggatattatagtaaatttaaaggttgagttggagttgggagattagaattgtggttttgtttgggttttattttaagggtttttggttagttttttttttttagttgtgttttttttattgggttttaggttttgtttttgtttttaggagttttggttttttttgaggttgtttaagtgtattggtttttgggttgtttttagagtgttttttttgttaggagtagttttttttttagtgtatttggtaggaggaattgggttttgggtattaggaatttgttggtgtttagtgggagttttaattatggatttaggaaggtgtgggtaagtttagtattttttttagaggaaagaattaatatttgtagaatgaatattttataggttttttatgtgtttttgatttttggttattatgttttttttttttggattaggtttttagattattttgttatttgtttgagattgttgagtatagagtagaataagtgtttgtttttttttttttttttttttttttttttttgttatagggtttgtgtagtgagatttgtatagtaaaaaaaaaaaatggatagaaaaaaagttatggggtttggttatgttgtttaggttggttttgaattttagggtttaaaaaaattttttttttttagtttttttagtagtgggattatagtatgtttttaattaatgtagttatgaatatatttaattatagatagtttttgtggtttggatataagatgagattttttgaaaatttttgatatttttatttttttttttatttttaatttttaaaatttgttgtagggtttttttgtgttatttaggttagggggtggtggtgtgattatagtttattgtagtttttattttttgggtttaagagattttttttttttagtttttttagtagttgggattataagtttttgatattatgtttagtgatgtttttgttttttaaataatataattatatttgtttttttttttttttttttttttttttttttttttttttttttttttttttttttttttttttttttgataagggtttgttatgttgtttaagttggttttaagtaatttttttggtttgggtaaaatgataaaattttatttttataaaaaatataaaaattagttggattaggtggtatgtatttgtagttttagttatttggaaggttgaggtgggataattttttgattttagag

SEQ ID NO: 2376 - DNA, 4898 bp, Artificial Sequence
  chemically treated genomic DNA (Homo sapiens)
aatttatgtattttttttttgggagggttttatttttttagtgttttgattttattttttaggtattgagattatagttgtggtttagttgtagaagttagtttagtagattggttttttgttagagataggaagtgggggaagagttgtgtgttttgttggttattaaggaggggtgggtgttagaggttggagttgggttagattttgtggttttgtggaatgaattgtaagggaggagttgtgagttggtttgttttattttgaagggtattgtgaggggtagagtttgtgtaaggtagttttgttttttttgttgtttggaaggttttggggtggagagtggggaataagttttggaaggtaggaaagaatattgaggtgggagtttggaaagttgggatttggtaaggttttgttattaatttattatatgatttgtattagtttttttttttttttggtttttgttttttaatttttgaaattggaaaatgtattgtattttttgtggtagatatatttttagggaatatattagtagataagttagtttttgtttttagggttttttattttattaatagatgagtaaatatagaataggttaagtgttgaaaaagtttgggtagaataataaaatggtgttgggggtagagagtgagaagtttgggatggttttttttagaagttgatataagtagaagaaatgaggaaagggttaatgtgggtatttaggggatgtatattttgggtagaggaaagagtaagggtaaaggttttgaggtgagaaggtgtttggtaaattaattgagaaaaggaagtagtatggttggtagggaataagtaaggggagatgagggttaaggtaggtggggtttagtttatggagattgagggattttgtgttttattttgaattgattggtgggttttggggaagttgggtttgggtttgggtgtagagtttatttggtgttgtgtatatgtgtgtgtgtgatagtgttgggtgggggaatatttttgatttttttttatttattttggttttttggataggttttttaggaagagataataatagggttgggtttagggtgaggtatgtgaaatttggagtgaatgaggtatttggtttaggtttaaaatttaagggggtattaaaaaatttagtaattaagataaaataatatttttttgtaatatgtataaaaatttaaattaatgttaaaaagtttatgataaataaaatgttaatattttagataaagataggatttgattttgaatttgtgtgattaattattttaattttggttttgtttttaatataattttatttaaaaaaaataaggtagttggtttaaagaattgtagtttgtttatttggtatattaaaatattgttttaaaatattttttattagtttgggtatggtggtttatgtttgtaattttagtattttgagaggttaaggtaggtagattatttgaggttaggagttttagattagtttggttaatatggtaaaattttgtttttattaaaaaaaattagttaggtgtggtggtaagtatttgtagttttagttgttttaatttgggaagtggagattgtaatgagttgagattttattattatattttagtttggtggatagagtaaaattttgtttttaaaaaaaaaattttttattttggtatttttgaaattttgtatattaggtgagtgttttatttattttattttagttttggttttgggttttagtgtttattttttttgaggttgagaggtaaagggatttttttaaagaaatatagtagatggtgggtttggaaattgggtttttatgttaggtttttagtttggttattatattttattatgttttgaattggaatgttgattttaatgtgttgatttttaaaaattttttatttaagtataatagttatataaataagtgtttgtattataaatgtttagtttgttgtatttttataaaatgagtatatttgtataattagtatgtgtgattaaatttaaagtataatttatatttttaataaaatagatattagtattgggttagatttagaggatttttgagattaagtaggtgatttggaatagtaaggttttgggattgagttgatgtagagtttaggggttttggattgagatgagaaagtagggggaggggtgtagtattgaggtttggggtttgggagggggttttatatgtgggaggaaatggagagagatggtgaggattgtttttggaggtgggtgaggtttagtgtgtgtgtttaggtaagtaggtaagaatgtagtagttgttaggtttaggtgtgggtgtgttttgtttgggtgatttagtttgtgttaggaagtgggagttggtttagttttttagagtttttggatagtagttggattttggttggtttttggggtattaggatagatttttgtggttagtagtttggtttggggggtggaatattttttttttgttttgttttatttttttttgggttgtaattattttagtttattgttgggatgtggttgtgggtgttgagagtgttgttggtgttgtgggggttattttggttttggttttgatggtgttttaggatttgtgatagttgtaagtagtgattatgggggttaggagagtttaagaagtggggagttgggatgtttggttttttgtgttttagttttttatttttagatttggttggatttgggattagaaaaggtggtttggtgttgttgttgttttttagtgtgtttattggtttttgtggtggggagtttagatgtggtttttaggtggttttagataagtatggttgagatgttgttattttagggggttgttttatttgagtattattttatgggtttgtttagttttatttggagagttgtaggttttaaagttttttttatttttggggattaggttttggggttgtgttgagggtttttgaatttttttggattgtttggtagtggtttttttttattattatggtttattatttagatgtgttgtttggttggttttattgggagaggtttttttttttttttttttttttgaatttttattttagaagtttttggatttagtttggattttaaagaagggttgaatttggaggatttttttttgtttttaaagttggttttttgatatatatttttatgtatagttggtaggggtaggagggttgaggatgttttgggttgttgtggtatagggtaggttggttggttattaattggattttttggatagataattttggtgttgtgggtgggtggtttgggagtttagatttttgtttttggtttaggattttgggaggagattgagggggtgggtaaaatgtgattgagaaatttgattgtgtttatttttggggtaaagagatttggaggttgtaattatttagatagttttatgaagtggttgaggttttttttttttttttgattttttagaaatttttgtagagtttggataggtaaaggaaaatgtgtagtttgtggatttttgggttttagagagtagggagttggggagattgaggttttgttttgagagtgtggaggaagtgtgtttagttggttttttgtgggggtttgggttttgggtgttttgtggatagatgtgtttggtttttggttgggttaagtttggtgtgggggaggggatttgtagaggggtgattgagaaggtgaggagggggtggggagagggtgggttagggaagaggggaggggagaggtgagtaggggaggagtgaggggggttggagggagagaaggaagaaggaaggggtgaatggtgtgagttggtgttgaaatgggagaaagtagtgagtgagaggggaaggggtgttaggtgagtatttgggagttagtgggatttgggtaggggtgtttggagtaggtgtgtatggtgggttttgtgtggggatttggttggaagagagtgtagtatggtttgtatgagtgagtggatgtgggaggtgtgtatttgtgggggaattgttttttgtttgtttttggtgttgtttgttgagttttgttttttgtaggtttggggttgatgtattaggtgagtggttagtgtttttttggttgtgatgtgttttatggagtttttagtgtagttttgggtttaggtaggattgggagtggtgagtgaagttggataggggtgggtgggtggttgaaggggttagttattagtttttttttttgtttttagatgtggggagattgttttagggagtttggtgggggtagggatgaaaagtttgggtttgaggatttggtttaaggagagtagggggttgggtgagggaggtagggttttgaatagaggttgtggttgtgttaagttggttttaattttttgtaatttttgatattagatatatatatatatatatataaatatatatatatatattttgtggtgtttgtttgtttgggatttgtgttttaattgtttttgtttagtgtgtaaatatttgtgggggtttggtgtgggggagggggtgttgtttgaatttttttttatttttttttttttagtttaattagagtttagtgttttttgaaaatttttgtttgttgtgagtggttgtaggatttagtttttttttttttttttgttatttttttttttttgtttttttttttttttgtgttggttagtttttgttgtttttgttttgtgtatatatatgtattttaatttagtgtttttagtttaagtgaaatgttttgttttgtgtttggtgttgtttgtaatttatttgtgatttttgggggagttttttatgttaagtatggtttgtgattttttg

SEQ ID NO: 2377 - DNA, 4898 bp, Artificial Sequence
  chemically treated genomic DNA (Homo sapiens)
tagggagttataaattgtatttggtgtgagaggtttttttaggaattgtgggtaggttatagatggtgttaggtgtgggatggggtattttatttgggttgaagatattgggttggggtgtgtgtgtgtgtatagggtaggggtggtggggattggttggtatgagagggaaggaaggtgagggagaagggatggtaagaaagaggggaggggttgggttttgtagttgtttgtggtagataaaagtttttgggaagtgttgggttttggttgggttgggggaagggaagtagagaaagatttagataatgtttttttttttatattaggtttttataaatatttatatattgggtagaaatagttgagatataaattttagatggatagatattgtggagtgtatgtgtgtgtgtttgtgtgtgtgtgtgtgtgtgtttggtgttgggagttgtggggagttggagttaatttggtgtagttgtagtttttgtttagggttttgttttttttgtttagttttttattttttttggattaagtttttaaatttagattttttgtttttatttttattaagttttttggaatggtttttttgtgtttggggatggagaggagaattaataattggtttttttagttgtttatttgtttttgtttagttttgtttgttatttttggttttatttgggtttggggttgtgttgggggttttatagggtgtgttgtagttagaggggtgttggttgtttatttggtatattggttttggatttgtggaaaatagggtttagtgggtggtgttggaggtgggtaaggggtgatttttttgtagatgtgtgttttttatgtttatttatttgtgtgagttgtgttatgtttttttttagttggatttttgtgtggggtttgttatgtgtgtttgttttgggtgtttttgtttaggttttgttggtttttgggtgtttgtttggtgttttttttttttttatttgttgtttttttttattttggtgttagtttatgttgtttgtttttttttttttttttttttttttttagttttttttgttttttttttatttgttttttttttttttttttttttggtttattttttttttgttttttttttgtttttttagttgtttttttgtgggtttttttttttgtgttgggtttggtttagttaggagttggatatgtttgtttgtggggtgtttgaggtttgagtttttataggaagttggttgggtgtgttttttttgtgtttttggagtggggttttagtttttttgattttttgttttttgaggtttggagatttgtgggttgtatgtttttttttgtttgtttaaattttgtaaaagtttttggaaaattaggagaaagagagaaattttaattattttgtggaattgtttgaataattgtggtttttaaatttttttgttttaaagatgggtgtgattaagttttttagttatgttttatttatttttttggtttttttttggggttttaagttagggatagggatttgggtttttaggttatttgtttatagtgttagagttgtttgtttgggaaatttggttagtgattaattagtttgttttgtgttgtagtagtttagagtatttttgatttttttgtttttattagttgtgtgtgggaatgtgtgttagaaaattgattttgggggtaaagagaggttttttgaatttagtttttttttgggatttagattgaatttgagggtttttaagatgagggtttggggagaaaggggagggagggagttttttttggtggggttagttgggtggtgtgtttggatggtgagttgtggtggtaggaagaagttgttgttaggtagtttaagagggtttaggggtttttagtgtgattttggaatttggtttttgagaatggggaagattttggagtttgtggttttttaggtggggttgggtgggtttgtgggatgatgtttaggtggggtagttttttggggtgatagtgttttggttgtatttgtttagggttgtttaggagttgtgtttgggttttttgttatgagggttagtgagtatattggaaggtagtggtggtattaggttattttttttagttttgagtttagttgggtttggaagtggagagttgggatgtaggaggttgggtgttttagttttttattttttggatttttttagtttttatagttgttatttatggttattgtaggttttggggtgttgttggggttaggattgggatggtttttatggtgttggtagtgtttttggtatttgtggttatgttttagtgatgggttggggtggttgtggtttggaggaaggtggggtgggataagaagagagtgttttgttttttaggttgggttgttagttgtgggggtttgttttagtgttttaggagttggttgggatttggttgttgtttgggagttttggagagttgagttaatttttgttttttggtatgggttgagttatttggatgggatgtgtttgtgtttgggtttggtggttgttgtatttttatttgtttatttgggtgtgtatgttgggttttatttatttttgaaggtaatttttattgtttttttttgtttttttttgtgtatagggtttttttttgaattttagattttagtgttgtatttttttttttgtttttttgttttaatttagggtttttaaattttgtattagtttagttttggagttttattattttaagttgtttgtttgattttaaaagttttttgaatttggtttagtattaatgtttgttttgttggaaatgtaaattatgttttaaatttaattatgtatgttggttatataggtgtgtttattttgtaaggatgtagtaagttgaatatttatgatgtaggtatttgtttgtatgattattatatttgaataaaaagtttttaaaaattaatatattaaaattaatattttagtttagagtatgataggatatgatggttaggttggaggtttggtatgggagtttagtttttagatttattatttattatatttttttggggaaatttttttgttttttagttttaggagggatgagtattggggtttaggattaggattggggtgaggtaagtgagatatttatttggtgtgtaagattttggggatgttaagataaggaattttttttttggaggtaggattttgttttgtttgttaggttggagtgtggtggtgagattttagtttattataatttttattttttaagttaaagtagttgggattataggtgtttgttattatatttggttaattttttttagtagagatggggttttattgtgttggttaggttggtttggaatttttgattttaagtgatttgtttgttttggttttttaaagtgttgagattataggtatgagttattgtgtttagattgatgaggaatattttaaggtaatattttaatatattaaatgggtaaattatagttttttgggttagttgttttgttttttttaaataaagttgtattggaaataggattaggattaaggtaattaattatgtaagtttagggttagattttgtttttatttaaaatgttggtattttgtttattatagattttttggtattaatttggatttttatatatattgtaggaaaatattgttttattttaattattgagttttttgatgtttttttaagttttgaatttgagttaagtgttttatttattttaggttttatatgttttattttagatttggttttgttattgtttttttttgaaggatttgtttaggaagttagggtaaatgaggggagattaaaggtgtttttttatttaatattgttatatatatatatatgtatagtattaagtgggttttgtatttaagtttaggtttagtttttttggggtttattgattagtttagaataaagtgtaaagttttttagtttttatgaattgggttttatttgttttggtttttatttttttttatttattttttgttagttatgttattttttttttttggttaatttgttaggtatttttttgttttagggtttttgtttttgtttttttttttgtttagaatgtgtattttttagatatttatattggttttttttttgttttttttgtttatgttagtttttaagagaggttgttttagattttttattttttgtttttaatattattttattattttatttagatttttttagtatttggtttattttatatttgtttatttgttggtagagtgaaaggttttgagagtagggattggtttgtttattagtgtattttttagagatgtgtttgttatagagagtgtaatatattttttaattttagaggttggaaaatagaggttagagaggggaaagagttaatgtaagttatgtagtgagttagtggtaaaattttattaaattttaattttttagatttttattttagtatttttttttgttttttagggtttattttttattttttattttagagttttttaggtaataaaggggatagaattgttttgtatgggttttgttttttataatattttttaaagtggagtaggttagtttataattttttttttgtagtttattttgtaagattataaggtttggtttagttttagtttttggtgtttatttttttttggtggttagtagaatgtatagttttttttttattttttgtttttggtagagggttagtttgttgggttggtttttgtagttggattataattgtggttttagtgtttggagaatggggttaggatattgggagaatgggatttttttggaagagggatgtataaatt

SEQ ID NO: 2378 - DNA, 2417 bp, Artificial Sequence
  chemically treated genomic DNA (Homo sapiens)
ggttgagatgggtagattatgaggttaggggattgagattattttggttaatatggtgaaattttatttttattaaaaatataaaaaaattaggtaggtttggtggtaggtgtttatagttttagttatttggtaggttgaggtaggagaatggtgtgaatgtgggaggtagagtttgtagtgagttgagattgtgttattgtattttagtttgagtgagagagtgaggttttattttaaaaaaaaaaaaaaaaaagatatttgattttatttttatttaatgttaaatgaggttggaggtgaatgttttttttattatatttaatttattttttttttgaattgattattttttaattgtgtatttttttttttgtttaggaaattattgtatttaggttaatttaatttatggggaaggtggtaaggagggtagaaagtgtgtgggtttaatattagagtttaaattttttttttattgtttattagttgtgtaattttggatagattttttagtttttttaagttttagttttttttgtttgtttgtttgtttgtttttgagataagagttttgtttttgttgtttaggttggagggtaatggtttaattttagtttatggtaatttttgttttttgggtttaagtaatttttttgttttagttttttaagtagttgggattataggtttttgttattatatttggttaattttgtatttttagtagagatggggtttttttatgttggttaggttggttttaaatttttgattttaggtgatttgtttattttggttttttaaagtgttgggattataggtgtgagatattatgtttggttgtttgttatgaaatgggggtaaaaattgtttataggtttgtggagagaagattataaatttgtaaagtttttagtattgtgtttagtatgtggtaggtgtttattaaattgtggttgtttttattatgatgttaagtatgggaatatggaggatatagttggagaggagatttgatgatttttttggtggagggtggttagggaaggagtggaagagagagttggggagaggaaattgtggttataaagaggaagagagaggtagagttggaggtgatattaggggagagagaggagtgggtttggtgatggttatgttgggtgaggtgtggagagtatagttgtgttatttattagttgtttttagtttagataatttttgtgtttattttatttttgtttgtttattgtttttgttgggttggatatttttattattatggttattgttgttatattgttggttgttattttttgttttatttttttttttgtttatgatatggtagaaggtggtaagggaagtagttgttttttgttagtagtttttttgttattgaaggttgaagttgtttataggtatgggtaaagagtttaggttttaaagatagatgagttgggttttgtttttagttttagtatttaggagtgggatgattttagtaagggagatgatttagttaaagttttagtttttttatttgtatagtagggataatagggttgttgagaagaaggaatgagattatgtgtggtaagtatttagtttagtataatgtttggtatatagtaagtgtttaatatatgtttgtgtttgttatttttaaggttaaataggtttgtgatttgtgtagttatatagggttttatgtttaggatgggttttaaatttggttaatgttttgttattattattttgaaatggttttttttttttttttttaagagatagggttttattttgttgttaagattgtaggattgtagtggtatgattatagtttattgtagttttgaatttttgagtttaagtgattgttttattttagtttgttgagtagttaggaatataagtaggtattattagttattttattttttaattttttttttttttattattttttagagatagggttttattatgttgtttaggttggttttgagtttttggtttgaagagatttttttgtttttgttttttaaagtgttgggattataggtatgagttattgtatgtagttttgaaatttttaatagtttttgaataagggttttgtaaattatgtagttagttttggttattattaatatatatttattgagtttgttggttggtagtggttatagaaggggatatttgtttagtagtttgttaaagatgtgggatattagatggttttgggagttttaaaggagggatttaaatatagtgatgtggtattatgttaggttgttagtaattagagattaagagggtagtgagatttttatatatatttttattggggttgggtatagtggtttatgtttgtaattttagtattttgggaggttgagatgagtagatta

SEQ ID NO: 2379 - DNA, 2417 bp, Artificial Sequence
  chemically treated genomic DNA (Homo sapiens)
tgatttgtttattttggttttttaaagtgttgggattataggtatgaattattgtgtttggttttagtgagagtatgtgtgggggttttattgtttttttagtttttaattgttggtaatttggtatggtgttatattattgtatttaaattttttttttgaggtttttaaggttgtttaatgttttatatttttaataaattattggataggtgtttttttttatagttattgttagttagtagatttaataaatatatgttaataatagttaggattagttatatagtttgtagagtttttgtttaaaaattattaagaattttaaggttgtgtgtagtggtttatgtttgtaattttaatattttaggaggtaaaggtgggaggatttttttaggttaggaatttgagattagtttgggtaatatagtgagattttgtttttaaaaaataataaaaaaaaaaaaaattaaaaaataaaatagttggtggtgtttgtttgtatttttagttatttagtaggttgaggtgagataattatttgaatttaggagtttgaggttgtagtgagttatgattatgttattgtaattttatagttttggtaatagagtgagattttgttttttaggaaaaaaaaaaaaaaattgttttaaggtggtggtgatagagtattaattaagtttgggatttgttttgagtatgggattttgtgtggttgtataggttataaatttatttggttttgaaaatagtgaatatgaatgtgtattgaatatttgttgtgtgttagatattgtgttgggttgggtgtttattatgtataattttattttttttttttaatagttttgttatttttattgtgtagataaggaaattgaagttttagttgagttattttttttgttgaggttattttgtttttaagtgttagagttgggaatggaatttagtttatttgtttttggagtttgagttttttatttatgtttgtggatagttttagtttttagtggtagggaggttgttggtggagggtagttgttttttttgttattttttgttatattatgagtaggaaggaagatgaggtaagaaatagtagttgatagtgtggtaatggtgattgtggtggtaagggtgtttaatttggtagaggtgatgggtagataaaaatgagatgggtataggaattgtttgagttggaggtagttgatagatagtatagttgtgttttttatattttgtttagtatggttattgttgaatttattttttttttttttttgatgttatttttagttttgtttttttttttttttttatggttatagttttttttttttagtttttttttttattttttttttggttattttttattagggaggttattaggttttttttttagttgtgttttttgtatttttatgtttagtattatagtaagagtagttatgatttagtgagtatttattatatgttaggtatagtgttagggattttataagtttgtaattttttttttataaatttgtaagtaatttttatttttattttataatgggtggttgggtgtggtgttttatgtttgtaattttagtattttgggaggttaaggtgggtggattatttgaggttgggagtttgagattagtttgattaatgtggaaaaattttgtttttattaaaagtataaaattagttgggtgtggtggtaggagtttgtaattttagttatttgggaggttgaggtaggagaattgtttgaatttaggaggtggaggttgttgtgagttgagattgagttattgttttttagtttggataataagagtaaaatttttgttttaaaaataaataaataaataaataaaaaaaattgaggtttagagaggttaagagatttgtttagggttatatagttggtgagtagtgaggaggagatttgggttttggtgttaagtttatatattttttgttttttttattattttttttatgggttgggttggtttgagtatagtggttttttgagtagggaaggagatatgtaattgagaaatggttagtttgagggaggaataaattgggtatggtgagagagatatttatttttaattttatttggtattaggtgggggtggagttgggtgttttttttttttttttttttgagatggagttttgtttttttatttaggttggagtgtagtggtgtgattttggtttgttgtaagttttgttttttgtgtttatgttatttttttgttttagtttattgagtagttgggattataggtgtttgttattaagtttgtttaatttttttgtatttttagtagagatggggttttattgtgttagttaggatggttttgattttttgattttgtgatttgtttgttttggtt

SEQ ID NO: 2380 - DNA, 2464 bp, Artificial Sequence
  chemically treated genomic DNA (Homo sapiens)
atttttgttataaaaatttagttttttaagtatggtatattttttttttaagggttagaaatgaattttaaattattttgttgtatttttttattagaggaagaattgtttttttttttttttttttttttttttttttttttttttttttttttttttttttttttttgagatagagttttgttttgttgttttagttggagtgtattggtaaaattttggtttattgtaatttttattttttgagtttaagtgattattttgttttagttttttgagtagttgggattataggtgtatgttattatgtttagttaatttttgtatttttaatagagatagggttttattatgttggttaggttggttttgagtttttgattttaagtgatttatttattttagttttttaaagtgttgggattataggtatgagttattgggttaggtaggaattgtttttttttttttttgttatttagaaattagtaaattttatgatggttatttatttataatttatttttaagaatattttgttaatgatattttaagtaagatgtgataatagttatataaagtagtttatagtatgtagtgtgttttaatgtttttgagaagtagtaataatttttgtttttagatggtttttagtttttttttgtgttatttttttgttttagattgtggtttaattgtttataaggatttaatggtatgtaaatagttgttagttggtttttttaaaagaggtattgttgattggaaagattggtttatatttaaattttgttttttttgtaaatgttagatttttttaatagtattttagaggaaattttgttttgaatatagttattgaatttgattagattatagatatagtattatttatattgtttaatgttaagatatagtatttttgattttttgtatgttataatgttttgaagattgagttattgatgagaaatttttgtagttatatatttttttatagtttttgttttttatttaagtaggttttagggtttatggtaagatgatttttttggggagaaagagtttgagatttagaaatttaatttgtataatgaattttggtttttttttttttttagggatttgattttttttttttttttttttttttttttgttataggattttatgttttattttagtgtagtttggttgattgatgttttattttttatatgtattgatatgatgtgtgattgtttaggtatagttggagaagttggagaagatagtattttatttttttttttagaattaattattgattggagggttaatgttttaattttgatgtgatttagtaggttatgtgagggttgtttttaataggagtagtgtttttttttttttgtgtagtttttgatttagtttggtatgttttttggtgatattgttgtttgttatatggtttagtgttgtaaatatttttatataattatatttgtttatttaatttttaagtgtttttttaatagagaaaataattattttatgagtttaaaatttgtaaattttttgtattttttaaaagattttttttaattataaaaattttttttatgttttattttaatattttataaattttgtttagtttgttgattttgtatttgaaatttatattataataaaataaagataaaatttaatatttttttttagatgtattgttaagtattttaatatagtttgttgaatattttttttttttttgttgatttgaaatgttaatttttttatatattaaatttttatatagatatatggttgtggttttgtttaatatttttttttattgatttgttggtatatttttatgttattatttatgtttaattattgtaggatgaatatatatagatatatgtatatttatttgtttatattagagtagtttttttttattgtttttgttttttaaaattattatagttatttttgtttatttattgtttagtatattttgtttttagtaattgattgtaagaaatgaatgtaataatttttttaaatggttttgatgttgaaaagattgtaaaaaaatgaagtatatattggttaatttagtatattttttgaaagatattgtttaagattttatattgattttgtaagattattttagggaaataagtgtgttattgtggtggatatatttattataattttattatttgaggatgtattttattattttgatgatggttttaaatttattttattttaatataaagtggattttgtaattatagtttttgtttattaattgtgatatgtggattttattattttgttgtttttgaggtattttttgtatttgtttttattaggtttatgaaatttgtgaattgggtatttttattgaatttttaattttttattatttttaaatgattgaataggttaaaaatgttgtagattg

SEQ ID NO: 2381 - DNA, 2464 bp, Artificial Sequence
  chemically treated genomic DNA (Homo sapiens)
tagtttgtagtatttttagtttatttgattgtttgaagatgatgaaagattaaaagtttagtaaaaatgtttaatttataaattttataaatttaatggaagtaagtgtaaagaatgttttagaaataatagggtgatggaatttatgtgttataattagtggataagaattatgattgtaaagtttattttgtgttagaataaggtggatttggagttattattaaaatgatgagatatatttttaaatggtgagattgtggtgggtgtatttattataataatatatttatttttttggaatgattttgtaagattaatatggaattttaaataatattttttaaaaggtatgttaagttggttaatgtgtattttatttttttatagtttttttaatattagagttatttaaaaaaattattatatttattttttataattgattattggaagtaaaatatgttgaatagtaaatgagtaaggataattataataattttaaaagataagaataatgagagagaattgttttgatatagatagatagatatatatatatttatatatatttattttatagtaattgaatatagatggtggtatgggaatatgttaatagattagtggaaaagaatattggatagagttatagttatgtatttgtatggaaatttggtgtatgagaaaattggtattttaaattagtagagaaaaaagaaatatttaataaattatgttgggatatttggtaatgtatttgagggaaaatattaaattttatttttattttattgtaatgtaaattttagatgtaaaattaataagttaaataaaatttataaagtattagaataaaatataaggggaatttttgtaattgaagaaagttttttagaaaatataagggatttgtagattttgagtttataaagtgattgttttttttattaaaaagatatttaaaaattgaatgaataaatgtaattatataaaaatatttgtagtattgggttatgtggtgagtagtagtgttattaggaaatatgttgagttgggttaggaattgtgtaaggaggaggagatattgtttttgttgaaggtagtttttgtatgatttgttgaattatattaaggttgaagtattggttttttaattaatgattagttttgggagaggggatgaggtgttgttttttttaatttttttaattgtgtttgaatagttatatgttatgttagtgtatatagagaatgaagtattagttaattaaattatgttggagtggagtatagagttttgtgatagaagaggaggaggaagagaaagaagaattagatttttaaaggagggaaaaagttaggatttattatataaattaaatttttaagttttaggttttttttttttaaggaaattattttgttatgagttttagggtttgtttgaatggagagtaagaattataggaggatgtgtagttgtaaaaattttttattaataatttaatttttagaatgttatgatatatagaaaattaaagatgttgtgttttagtattgagtaatatgggtggtgttatgtttgtagtttggttaaatttagtaattgtgtttaaaataaaattttttttggaatattattgagaaaatttggtatttgtaaaaagggtagagtttaaatatgagttagtttttttaattaataatattttttttaagaaaattaattaatagttgtttgtatgttgttgaatttttgtgagtagttaggttatagtttaggatagaaagatgatatggggaaggattgagggttatttgagaataaaagttgttgttattttttagaggtattgagatatattgtatgttgtagattgttttgtgtaattgttgttatattttgtttgagatgttattggtagaatgtttttaaaaataaattatagataaatagttattatggagtttgttggtttttagatagtaaaagagaaaagaagtagtttttgtttggtttggtggtttatgtttgtaattttagtattttgggaggttgaggtgagtagattatttgaggttaggagtttgagattaatttggttaatatggtgaaattttgtttttattaaaaatataaaaattagttgggtatggtggtatgtgtttgtaattttagttatttaggaggttgaggtaggataattatttgaatttaggaggtggaggttgtagtgagttgagattttgttaatgtattttagttggggtaatagagtgagattttgttttaaaaaaaaaaaaaaaaaaaaaaaaaaagaaaaagaaaaagaaaaaagaaaaaaaaaagaagtagttttttttttaatgaaaagatataataagatagtttgaaatttatttttggtttttagagaagaagtgtgttatgtttggaagattggatttttataatagagat

SEQ ID NO: 2382 - DNA, 2443 bp, Artificial Sequence
  chemically treated genomic DNA (Homo sapiens)
agaggttgtagtgagttgagattgttttattgtattttagtttgggtgatagtgtgagattttattttaaaataattaaataaataaatatatatatatatatatatatatatatatgggttgggtattgtagtttatatttgtaattttagttttttgggaggttaaggtgggtggattttttgagtttaggagtttaagattagtttggttaaattttatttttataaaaaatataaaaattaatttagtgtggtggtgtgtgtttgtggttttagttatttgagaagttgaggtgagagaattattagagtttgggaggttgaggttgtagtgagttgtgtttatgttattgtattttagtttgggtaatagaatgaaattttgttttaaaaaaaaatattttatagtaatagaagggaatttttatggaaattatggattttgggtgataatgataaatttgtgtagatttattgattgtaagaaatgtgttattttggtgagggttgttgataaggggtgtggggtaggggtagggggtagtaagtgggggtagggaatttttttttttttttttttaatttttttgtgaatttaaaattgtttttaaaaattaagtttttaatagaaataaatatataataaattttaaaaatattaagatttgaatgttgaaaaaatttgtaattgttttaataattatagataataatagtatatagattatattataattggtggtttttttgtatgtagtttgttttatttgtagtgtgaaagttttattagttttgattttaagtagtgtgttttttttaatttttttttatgttttggtttttattttatttttgaggtttatagttgtttaagttatggtatgtgtagagagagatttttttttgttgattgtatgaaaaattgtgtaaaaggggttgttatttaaaaaagtgtgtgatattgggagagattttgtatagtgagtagggttttttatgagtttattttggattttttattgagaataggatgttttgttaaggatgggtaaagaggggtatagtagaaagataaaaggatgtgttagttataaaaattatgtgggttaaggatagggggttgtaatgtaaagattggaatttgtagtatggtaaattagagtgtggtaagattagtgttttagattttagataaggttatttttttttttaggaaagatgatttttttattaatataagtgtttggtgttttttttttttgtttaggtgttttggttggaatgaggaaatttaaaagtgttatgaaagaataaaagtggtttaaattttgaaaatttttaaaattaaaagattgtaatttaaaggaagataaagagtatgatttttaatttttttaagttattttatttatttttagtgttaaaaatttaatgttagttttatatagtaatttatttattgtagttgaaatttgaggtgtgaaaagttttgtgttgataaagatttgtattagttgttgttgttaaataatatgtaaaaatttgtagtttaattttagttttagaataaataagtgtttttttaaatttatttaggagtgtaggttgttattaggtttataggtgtgttttgaaattagatattattaagaaattttattgtgttaaaatgaataaggagttgggatggtataatttattattttttaatgtgttttgggaattgttttaataagtgtggaagtgttttagtgagatgttgtatttagtttttattgtgtatatattaagttagtgtgtgtgtgtgtgtatgtatatatgtttgtgtttgtattttatattagaaggttttaggaaaagagtgataaataagatgaagtggtaagagggtattaaagattataattaaaggtgtttgagagtagttagttggttttagtttatttttttaattagttttatttattttgttgttttggtgtagtagatattgtgtagggttttggtagagatataggggttatggagatataagttatttttggggaatttttagtttaattaatatataaatagtagtgatatttggtagaagtgttataaggtagggtaggttataaggtagggtaggtgaagtgttttggtggttttgggtgatagttattgttatatattattttttaggagttttggggttatttgaaaaaaaaagagatttgatgaattagttttttttttaggggtgaaagttgtttagttttttgtggtaaagaaatataaaatgaatggaaaaaagaagaggttatatgggtgaattattaaatgtaaggagtggaaagatattatatttgtgtaaggaatatataaagatttttttaatttttagttataatatttataatgataaattatatattagttttgtgaattttatgtgtaat

SEQ ID NO: 2383 - DNA, 2443 bp, Artificial Sequence
  chemically treated genomic DNA (Homo sapiens)
gttatatataggatttataaggttagtgtgtaatttgttattataaatgttatgattaaaaattagaaaaatttttgtgtgttttttatatagatgtaatatttttttattttttatatttaataatttatttatataatttttttttttttttatttattttatatttttttgttataagaaattgaataatttttatttttggaagaaaaattagtttattaaattttttttttttttagatggttttaggatttttggaagatgatatgtggtaataattgttatttagagttattaaagtattttatttgttttgttttgtagtttgttttgttttgtagtgtttttgttgggtgttattgttatttgtatgttaattagattgggggttttttgagagtggtttgtatttttgtgatttttgtgtttttgttggggttttgtatagtatttgttatattggagtagtaaaataaatggggttggttgaaggagtaagttaaggttagttaattgtttttaagtgtttttaattatggtttttggtgtttttttattgttttattttatttattattttttttttgagattttttaatatagaatgtagatatgaatatgtgtgtatgtatatatatgtatgttggtttaatatatgtatagtggaagttgaatataatattttgttgggatatttttatatttgttaagatagtttttaaaatatattaaaaaatgatggattgtgttgttttggttttttgtttattttagtatgatagaattttttgatagtgtttgattttagagtatatttgtagatttagtgatagtttgtgtttttgggtgggtttggaaaagtgtttatttgttttgaagttaaaattaaattgtaagtttttatatgttgtttagtggtagtagttgatgtaaatttttgttaatatggaattttttatattttaggttttaattatagtaagtggattattatgtaagattggtattgggtttttggtattgaaaatgaatgaagtagtttggagaaattaaaagttatgttttttatttttttttgagttataattttttaattttaagaatttttagaatttgggttatttttgtttttttgtagtatttttgagtttttttgttttagttaggatgtttggatggaaaagggaagtgttaagtgtttgtgttggtgaggagattgttttttttggagagggaagtggttttgtttggagtttgaaatgttaattttgttatgttttagtttgttgtgttgtaagttttagtttttgtattgtagttttttgtttttggtttatgtggtttttgtagttggtatatttttttgtttttttgttgtgtttttttttgtttatttttgataaaatattttgtttttagtgaaagatttaggatgaatttatgggaagttttgtttattatataaggttttttttagtgttatatgtttttttagatgataattttttttgtataattttttatataattagtaggaaaaaatttttttttgtatatattatgatttagatagttatgggttttaaaaataagatgggaattagaatgtaggggaagattaaaaaaaatgtattgtttaaaattgaagttaatgagatttttatattatgaatgggatgagttgtatgtgggaaaattgttgattgtaatgtggtttatgtgttgttgttatttatggttattagaataattataaatttttttgatatttagattttagtatttttagagtttattatgtgtttatttttattaaagatttaatttttaagagtaattttaagtttatagaagaattaagaggaaggaagagagagttttttgtttttgtttattgttttttgtttttgttttgtattttttattaataatttttattagaatggtatattttttataattaatgaatttatatagatttgttattattatttaaagtttatagtttttatgagggtttttttttgttgttataaagtatttttttttgaaatagggttttattttgttgtttaggttggagtgtagtggtatgaatatagtttattatagttttaattttttaggttttagtgatttttttattttaattttttaagtagttgggattataggtatatattattatgttgggttaatttttgtattttttgtagggatggggtttggttaggttggttttgaatttttgggtttaagggatttatttattttggttttttaaagagttgggattataggtatgagttatagtgtttgatttatatatatatatatatatatatatatatgtttgtttgtttgattgttttgagatggagttttgtattgttatttaggttggagtgtggtggggtgattttagtttattgtaattttt

SEQ ID NO: 2384 - DNA, 2189 bp, Artificial Sequence
  chemically treated genomic DNA (Homo sapiens)
tgttattgtattttagtttgggtgatagagtgagattttgttttaaataataataaaaattaaagtatttattagagtttttggaatatattatttgtggataaggggaattattgtatatatagatttttgtgaagaatattgttaataatttaagagtaattatttatttagggtttataatgagtttagtattggagttttttgtttatttttggaaattttttgtttagatgtaaatatagttgaatttttatttttttttgttgatagttatttatttatattttttttattagagatagaaagaaaagaataaagattaaaaaattttgttgattattttttttttttattttttgagaagtgttaatagaattgaaaatattagtaaggaaaaatgtttttgaggaatagagttaattggatttttaaaatgttgttatgaaaggtgtatttttgggatatgaatttgattttttttttttttttttttttattttttttttttttttttttttttttttttgttttttaaaattatttgtattttttttatgaggtatgtagattttggattatttttttattttttagttaattgtattttaaaatagttttaataaggttgggtatggtggtttagtttgtaattttaatatttggggaggttgaggtgggtggattatttgaggttaggagtttgagattagtttgattaatatggattttgtttttattaaaaatataaaattattttggtgtggtggtgtatgtttgtaattgtagttattagggaggttgaggtaggagaattgtttgaatttgggaggtagaggttgtggtgagtggagattgtgttattgtatattagttagggaaatgagagtgaaattttgttttaaaaataaataaataaataaataaaaaatgttttagtaatagtgtttttaagaatttggttttttagttttttggtagagaagatttattgttgttgttagtttttaagatggtatttgttggaggtggtaggtagaggttttaagtgtggattttaatttttgtggggattgaatttttgtggttgttgtttgtttaggtatgtttgttttttatgaattttttttatttatagggttttaaattttatgttggtgggaggaggaaggagattgggtataatttattagatttttgattgtaagagttggaggttgtttgtgggtttatttgtatttgggtttgtttttatttttttagaatgtaaattttttgagggaatgtgttgttgttattttttagttttttgagtgtatttagtttttttttaatttaaaattttttatttatggtaattgtgagaatgataagaattttttttattttttatattgtaaatagttgtaatgtttagtgggatttatttttgttgttattaattttgttattttagttatgtgagttttttgtttgttagttaagtaaaatggtttttttgtagttgtatggttttttggtttttgtttagggttttggggattttttttagttattgttttgtatttatttattagattgttgttttggtgggtgtttttggttttgttttttgtgtttagtttgttattgtgtgtttagatttggaattttagttttgaagtttttggtggttgggaataaagttggttttgtttattgttgtttggtaaagtaggtgtttgttagtatttattgaatatgtttatgtgtttagaaatggttttattggttgggattattttttttgatgtttatttgtttagaattttttttttgggatgttgatttttttaatatgtgttaggagtttttttttggtttggaatttttagagtgtttatagtggatagggtatttggatatattttagattaatttatgtttttttggaggattttagaggttggaagtttttttaagattaggggtgtagtgtttttttggtttgtggaagagttagaggagtggggataatatttaatattagtttttattattgttagtgtgattttttgttgttgttttatttatttgatgtgtgtagtggattgtgatttaggggtatagggttttttggggattagtggttggagtgttttggttgagtatttgtagttttggtgttgtggttttgttttggttttgtt

SEQ ID NO: 2385 - DNA, 2189 bp, Artificial Sequence
  chemically treated genomic DNA (Homo sapiens)
ggtggggttggggtggggttgtggtgttgggattgtgggtgtttggttggagtgttttagttgttggtttttgggagattttgtgtttttaaattgtggtttattgtgtgtgttaggtgagtagagtggtggtggggagttgtgttagtggtagtagaggttgatgttgaatgttgtttttatttttttgatttttttgtaggttaggggagtattgtgtttttaattttggaggggtttttaatttttggggttttttggggaaatgtgggttagtttggggtgtatttaggtgttttgtttattgtgggtattttggggattttgggttgaggaagggtttttggtatgtgttgaaaaagttggtattttagaaggaagattttgggtagatgggtattggggaaggtagttttaattaatgggattgtttttgagtatataagtgtatttagtgggtgttaataagtgtttgttttgttaggtaatagtgagtaaaattggttttgtttttggttattggaagttttgaggttggggttttggatttgggtgtgtaatgataaattaagtgtgggggatagggttaggagtgtttattagggtggtgatttggtgggtaggtgtagggtaatggttggaaagggtttttgaagttttgagtagagattaaagggttgtgtgattgtaggaaggttattttgtttggttgataggtggaaaatttatgtggttggagtagtagggttggtgatgataagggtgaattttattaagtattgtaattgtttgtggtgtgaggggtgagggggatttttattatttttataattgttgtggataaagggttttgggttggagagagattgggtgtatttaaaggattgaaagatggtgatgatatatttttttagaggatttatattttggaagggtggggataggtttgggtatagataagtttgtaggtggtttttagtttttatagttgaaagtttgatgagttatgtttagttttttttttttttttgttggtatgaggtttggggttttgtggatgaaggaagtttatgggaggtaaatgtgtttgggtaagtaatagttgtagagatttagtttttatgggggttagaatttatatttagggtttttgtttattgtttttagtaaatgttattttgaggattagtggtagtagtaggttttttttgttagagaattggaaggttaggtttttgagggtattgttattaaggtgttttttgtttgtttgtttgtttgtttttgagatggagttttatttttgtttttttggttggtgtgtaatggtgtgatttttgtttattgtaatttttgttttttgggtttaagtgatttttttgttttagtttttttagtagttgtgattataggtatgtgttattatgttgggataattttgtatttttagtagagatgaggtttatgttggttaggttggttttaaatttttgattttaggtgatttgtttgttttggtttttttaagtgttgggattataggttgagttattgtgtttagttttattaaggttgttttgaagtgtagttggttggaaagtggaagaataatttaagatttgtatgttttataaaaggagtgtgaatggttttgaaagataggaaaggaaagggagagagaggaaagaaatagagaggaagaaaggaaggaaattaaatttatattttaggaatgtattttttatgataatattttggagatttaattaattttattttttgagggtgtttttttttgttggtatttttagttttattaatattttttaaaaagtgaaaggaaaaaatagttaatagggttttttggtttttatttttttttttttatttttagtaagggagatgtgggtgagtggttgttagtaggaaaaggtgagagtttagttatgtttgtatttgagtaggaaatttttaaggatgagtagggaattttagtgttgggtttattgtgagttttgaataagtgattgtttttgggttgttagtagtattttttataaagatttgtgtatatagtggttttttttatttataggtgatatgttttaagagttttagtggatattttggtttttgttgttgtttgaggtagaattttgttttgttatttaggttggagtatagtggta

SEQ ID NO: 2386 - DNA, 2367 bp, Artificial Sequence
  chemically treated genomic DNA (Homo sapiens)
tggtttatagttttgtaggttgtataggaagtatggtgttggtgtttgtttttggtgaggttttaggaagtttttaattgtggtggtgggtgaagggggttaaagtattatatggtaagagtgggagtaggagaggagggggtttttagatgtttaaatatttagagtttaggtgaattgattgagtgagaattaatttatattaaggggttggtgttgaattgtttatgatatgattgatttatttttgtgatttagtattttttattaggttttttttttaatattggggattatattttatatatgttttggagggatatatatttaaattatattagtatatatggtttttaaatgttatttagtttttttttatgtgatgttagaaggttgatgtttgggggtgtgtagttttttaggatattttttttgaagggttgtagtaatattttaagtgttatatatttatgtgttatgttagtgttagttttaaggatgtgtaatagttaagggttgagttatttgggattaaatatttgttttgtatagatagtgtttatggtgtggattaatttgtttttgtttgttgttgggattgggtgttggttgttgttgtttttattttttgggagtttttgttggttttatagggtagtattatatgaaggttgttttttgatgtttagtgttgaggtgtgaagattgtattgtgtttgagatatgagttttatgtggttgttgttttttttatatgttttgtgatggatttttttttattaggtggttttttgtttgtggttagtatatatatataggatatgaaagatatagggtatgattataagttatgtatttttttagggattaggatatatagagagagttttttttgttgttttttgtttatattataatgaatatttagttggagagttaagagaggggttagggttgagaggttaagagttttggggtttttgattattttttgttgttgggagaaagaggaatttgtaaggtttaagtggatggtatggatgtatgtaatgaagattgggaagtagattttgggtgggagagttgttttaagtagaaaaatagttaatttaaatttatttttggttgagtttgagtgttagagtaaggtagggaagagtgtttggaatgttgagttagtttaggttgttgtaggttgtattgtatggattttagtattagtaatgtgtgtatagaaaagttggttttttttgttgttattgattgtttattaaagtgaatttgggtagtgttgattttgttgttgaaagtatttgattttttgttgtatggattttttttttagggttaattgtgattgtagatttaattattgagaaaatttgtattttataggataatttttttggttttatgtttatattaattgaaatattagatagatttttgtaagtattataggtatgtttggtttttaagttttagtagagatttttttttttattaataatatgaaatagatttaaaagaaatataataaagtaatgtttttttgattttttttgtgttgattttgtatttttttaaattgatattaatttttaagtatatttaattttaagttttttaataaataatatatttagtagaaatttatttatatgttatttataatttggagaatttttgtttatgttgtttttgttgtaatggggagttatagtattttgattatagaaatatatattaaaattatgattagaatgtaagtaaaaaaataatgtggtatgtagttgtttaatagtattggatgtaaaagaattaaatagtataatatataataatataaaagataatttttaagtatgtgttaggttttttttgatgaattgtaaagaagggataataatatatattattattatttgttattattttattaaagaagtttggttttggtttttagtggatagaggtatagataggtggagttgtatttgtggatgtatatgtatgtatatatataagtttgtatgtttagattggtagttttgagtatttaggttagttaatattattttattttttatgttttagttgatattatttttgaattataaaataaaatgtttaaatattagaaaataagtattttatgttttttttggaggtaggaatatttttttattggttgataaagtgtattttatatttgaagttagatttttatttttttatgatgaggattgtgatttaatatgttagttggttttggtttttttgatttaaggatatataatattttaagagtatttggaatgtttagtttaattaagatggttttagtatgaatgggaaattgggata

SEQ ID NO: 2387 - DNA, 2367 bp, Artificial Sequence
  chemically treated genomic DNA (Homo sapiens)
tgttttgattttttatttatattgaaattattttagttaagttaagtattttaaatatttttgaaatattgtgtgtttttagattaagagagttaggattaattgatgtattgagttataatttttattatggaagaataaaaatttaattttagatatgaagtgtattttgttaattaatgaaaagatatttttgtttttaagagagatatagaatgtttgttttttgatgtttagatattttattttatagtttaaaaatagtattagttgaaatataaaaaatgggatgatattaattggtttgagtgtttaaggttgttggtttagatatatggatttgtatgtgtgtatatgtgtatatttataggtatagttttatttgtttgtgtttttgtttattggaggttagaattagatttttttaatgggatagtagtaaataataataatatatattgttattttttttttgtaatttattagaagaaatttggtatatatttgggagttgttttttgtattgttatgtattgtgttgtttaatttttttatatttagtgttgttagatagttatatattatattgtttttttatttatattttaattataattttggtgtgtgtttttatagttaaagtattgtgattttttattgtaataaaagtaatataagtaaaaattttttaaattatgaatagtatgtgagtggatttttattgaatatattatttattaaaaagtttaaaattaagtatgtttaaaaattaatgttagtttagggaaatgtaaaattagtataaaaaaaattaggagaatattattttgttgtattttttttaagtttgttttatattgttaatggaaaaaaaaatttttgttgaagtttaaaaattagatatgtttgtggtatttataaaagtttgtttggtgttttagttggtatgggtatgaaattaagaaaattattttatagggtataagtttttttggtgattaagtttgtaattatagttggttttagggaaggaatttatgtagtagaaaattagatatttttaatagtagagttgatgttatttagatttattttggtaagtaattggtgataatggaaaggattggtttttttgtgtatatattgttggtgttaaggtttatgtagtgtagtttgtagtagtttgggttggtttagtattttgggtatttttttttgttttgttttgatgtttaggtttagttagaggtagatttgagttggttgtttttttgtttagagtagtttttttatttaggatttgttttttggtttttattatatgtatttatgttatttgtttaggttttatagattttttttttttttgatgatggaagataattagggattttagaatttttgattttttaattttgattttttttttagttttttagttgagtgtttgttatgatgtgggtggagggtagtagggagaattttttttgtgtgttttgatttttgggaaaatgtatggtttgtagttatgttttgtgttttttatgttttatgtgtatatgttaattatagataagagattatttgataaaaagaaatttattataggatgtgtgaaggaggtagtaattatgtggaatttgtgttttgaatatagtgtagtttttatattttagtgttgggtattgggaggtagtttttatgtgatgttattttatgaggttagtaagggtttttgggaaatgaaaatggtagtagttggtatttagttttagtagtagataggagtaggttaatttatattatggatattgtttatgtaaagtggatatttggttttagatggtttaatttttggttattatatatttttaaagttgatattggtatagtatatgggtatgtaatatttaaagtattgttgtaattttttaggaaggatgttttggaaagttgtatatttttaggtgttagttttttgatattgtatgaggaggggttaaatgatatttggagattatgtgtgttgatgtggtttggatgtgtgtttttttaaaatgtatgtgaaatgtgatttttagtgttagaggggaggtttggtgggaggtattagattatagaagtgaattagttatgttatgaatagtttagtattaattttttgatatgagttagtttttatttagttagtttatttgagttttgggtgtttaaatgtttgggaattttttttttttttgtttttatttttgttatgtgatgttttggttttttttatttattattataattggaagttttttgaggttttattagaagtagatgttagtattatattttttgtatagtttgtagaattgtgagtta

SEQ ID NO: 2388 - DNA, 2309 bp, Artificial Sequence
  chemically treated genomic DNA (Homo sapiens)
atataatttgttggttttgttgttagttttaatttattgattttattattgttttggggttagttttttattttttagttgtttaaattttttattttatatatttgaattttatgataaattatttttaatattgttttgtttgtaattttattatttttggatttttgtttattgaatttgtttggttaaattttatttttttttatttttgtgtgtaattatataattggttattattggtaaaaattttaaaattatttatagagatagtttagtaggttgtattatgttattagttagttttatgtgttttttttatggttttttatttattttttggttgatattggtgttttttttttttttttaatttgtattagtttgggttttatttttttgttgagtattagttttgtttttttttggtttttggtaaggtgggggtgatttgaaggaagttttggttttttttttttgttttgtttatgggtgttttggtttttgtatttagggttttgttttttatattggggattatgatgtatatttttgttttgtagagttagtttgtggtttggtttgtttgttttgtgtgtagttttttgttagtatagttttgtttatttttaattttattgttttttttttggattttttttattagtaaatatatatgttgttatttgttttattttaaaatataattaaaataaaatagagtattttggattgtattttttgttagttattatttttgagtttttggtttgtgtagttgattttatggttaggtttttttttatgtttttgttattttaaatgtgggtattgtggtgttaaatttgttttttttattgttgttaataattgtagtttggttgaatttagtgatttatttttgttttaattttttttggttttttggtagtgtttaatgtgtgtgatttttttttttttttgtttttagttttttttgggatttgtgaggtgtttttttttttattttttttttaggagtgtgtttttagttttgtatttgttttttttatttttagtgtatttttgttgtaggtattattttttgatttgttatgttatttgtttttttttttattgtatttatgttttattatttgttttggtttgtataatgttagttttgtaaggggtttttttaaggttttatttttaattgattaatgttgaggatggggagtaatgtgtgtattagagggggttgggtatatgtaggtttgttgttggatggaggagaggtagtattttttgtatgtttgggtggtttttatttttaggtttgtgataagtattttttatttttttattttttgatggagttagttttatttattatgtggatgtgggtgttgtttgtggattaaggttagtgttttgttggttttttttattgtttggtattagtattatatagattaatagattttgttgttttttgtttggaggggttggtgttgtggttggggtattgttttgggtaggttttgttttaggttatgtagtttttaggtttttttttgggaggggttggtttttataaagggggaaaattatgaaatggtaaatttgagttatggtagtatagaggatagtttttgaaggtataagtaggaagggtataatgttttttaaaagagaaaattatatggattttattgatttattattgagttttgagattattgatatttatatatgtgtttatgttgttgtgagttatggggaaaaatggaggagtaaaatgattaagtggtagggtttgtaagagttttttattgtagggatgggttgttttgaggagatattgtttaggtttgggtgttttgggttaaagttttgatttttgtagggttgtgttttgtggatgatatgtggtattggattgtttattgataggtaggaattatgtattgagaggtgggaattgttggttggggggtgggaattgttggttgaggggtgggaattgtttgttgaggggtgggaattattggttggggagtgggaattgggtattgagaggtgggaattgttgattaggaggtgggaattgttggtttgggggtgggaattatgtattgagaggtgggaattgttgattaggggatgggaattgtttgttgaggggtgggaattgtgtattgagaggtgggaattgtgtattgagaggtaggaattgttggttagggggttggaattgtttgttgaggggtgggaattgtttattgagaggtaggaattgggttgagtgtttagtttttttgttttgt

SEQ ID NO: 2389 - DNA, 2309 bp, Artificial Sequence
  chemically treated genomic DNA (Homo sapiens)
gtagaataggaaaattgagtatttagtttagtttttgttttttagtgggtagtttttattttttagtaggtagttttaattttttggttagtaatttttattttttagtgtatagtttttattttttagtgtatagtttttattttttagtaggtagtttttattttttggttagtagtttttattttttagtgtatagtttttatttttgggttagtagtttttattttttggttagtagtttttattttttagtgtttagtttttattttttagttagtagtttttattttttagtaggtggtttttattttttggttagtagtttttattttttggttagtagtttttattttttagtgtatagtttttatttgttagtgagtagtttagtgttatatgttatttataggatatagttttgtaagggttaggattttggtttggggtatttaggtttgggtagtgtttttttagggtagtttatttttatagtgagagatttttatagattttgttatttggttattttgtttttttatttttttttatgatttataatagtgtggatatatgtgtaagtgttagtgattttagaatttagtgatgagttagtaaagtttatgtagtttttttttttggaaagtattatgttttttttgtttatgtttttaggggttgttttttgtgttgttgtgatttaggtttgttattttatgattttttttttttgtgagaattaattttttttagaaaggagtttgggaattgtatggtttggggtggggtttatttagggtggtgttttagttatagtattagtttttttgggtggagaataataaggtttattggtttatgtaatgttggtgttaaataataagaaaaattaataaaatattgattttggtttatagataatatttatgtttatgtggtgggtgggattggttttgttagaggatgggaagatgagaagtgtttgttgtaggtttggagatggggattatttaggtatgtaggggatgttgttttttttttatttaataataagtttgtgtgtgtttagttttttttggtatatgtattgttttttatttttggtattgattaattgaaaataagattttggaagaattttttgtaaagttgatattgtatgagttaaggtaggtaataaagtgtagatatagtgagggagggggtggatggtatgataagttagagggtgatgtttgtggtggggatgtattgagaatagagagggtaggtgtggggttggagatatatttttgagagggagatgggagagagggtgttttgtggattttgaggaaggttgaagataggagaagggaggggttgtatatgttaaatgttgttgaaaggttaggagagattaagatagaaatgaattattggatttggttaggttgtggttattgataatagtgggaagagtaggtttggtgttgtggtgtttgtatttggggtggtgagaatgtgaaggaggatttggttgtggggttagttgtataggttaggagtttgagggtggtggttggtagaaagtgtagtttaaagtattttgttttgttttgattgtgttttaaaatgggataaataatagtatgtgtgtttgttgatggggagaatttaggagaaaaatagtgaagttgagggtgagtagagttgtgttggtagaaagttgtatatggggtgggtaggttaggttatggattggttttgtggggtggggatgtgtattgtggtttttagtgtggagggtagggttttggatataggggttggggtatttgtggatagggtagggggaggagattgagattttttttagattatttttattttgttagggattaggagagagtaaggttggtgtttagtgggagggtgaggtttgagttggtgtaggttgaggagagggagaaggtattagtgttagttaggagatgggtaggagattatgagggaggtgtatgaggttggttggtggtatgatgtggtttgttggattgtttttgtgggtggttttgagatttttattagtgatgattagttgtgtaattgtatatagagatggaagagaataagatttaattaagtaagtttaataaatagaaatttaaaaatggtgagattgtaggtaaggtagtgttaaaaatgatttgttatggaatttaaatatgtaaggtggagagtttggatagttggaggatgggagattgattttaaaatagtgataggattaatgggttagagttggtagtagggttagtagattgtat

SEQ ID NO: 2390 - DNA, 2697 bp, Artificial Sequence
  chemically treated genomic DNA (Homo sapiens)
gttggtggggtttgtttttttttttgtttttatttggagaattttgggggaattgttggttagagtttttaggtatgtttagaatggattattttttttagggtttatggaattgtataagttatttaggtttttttggatttttgtagagttggtggtgggtatagtaaatatttaggttttttgtatttttttgagttttgttttttttattttttatttttttttagatttttttttttattgagtttttttttgttttggtgaggagggggtgttgagggggtggggtgttgtgtgggggttggaggggagggggtgttgtggggtggggtttggtggtggtggtggtggtgtgtggggatttggaggtattgggtgtgtgtggttttggtttgggatgttttgggatgttttggggttgggttttggttgtggttgttgttgtggtgtttgtgttttggtgtgttttgttttttgtgtttgttgtggagtgtagtttgtgtgtttgttgtgtgtttttagtttttttttttgagtttgttgtgatgggagttgtgtggggatttttggttagattttgttggttgtttttgtttagtgttttgttgttgttgttgttgggtggtgagtatttgagagttgggggtatagagtttgggaagtgtgggagttttgtgggtaaaaggttgtgtttggggtggtgggtttgggtggttggaatggttttggagtagtggagaggtttgttgggggtgtaggtttgtggtggaagggtgtaaggagtttgggtgttgggaggttggtgaagtttttagggatgtggttagggtattttttttatttgtgttgtggggatgtatttttagtttttttgagtttttttggtttgagttgagagtttgtttgagaattgttgagagttgttggtttttgggtttagatggggagttttttgttgggggagaaaagattatttgtatttattgtggggagtgtgatggagaaaaaggaattttttattttatttggtagggttggtttaggtaagagttgttggtttggggtttgatgttggatagatttgtggtgtgtaaagtgtggagttttgttatttatgttgatttgatgtttttggttttttttttttgagtttttgggtaaagttgagattttagatggttttgtgggtgagggtggaagaagggaagagttaggggttgtttttatttatggtttttagttattggtttggaattttgtgtttattttgtgttagggttgaatttggggatttgagggttttaggttgttgtggtgattaatgtgtgaaggttgttgttaaaattgggtatggtttggttgtaaaggtgtggatggggtttgttttgtttttttttggatttttattttgattgtttttatagaggaaaggaagtatttttaagggaagaaaggtaaaaagagtttattttggttttttttgggggggggttttagtattttaatgagggtgtggtttttattattagggtagatagtattgtttttttaatttttgtagtttttattttttggtttggttatatttaagagttattattgaggtgttgaagtgttttataggaaagtattaagttatttgtatattttaaatagtttggattggaaataaagtttttgattttttataatattttttggtggtttttgaagtagtttttttttggggagttttgttgaggagatttgttttaggtgattattttttattttttttgaaggtggtaatgggaagggtatgggtaaggaattgtttttttaatatttttttggtttgttagttgtggaggggttttggtgttggtggaattaatattttttttgtttttagttgtaaaaggagaggtaaatgtaatttaggaaagagattaatttttagggatttggaggaggtgtttttggagttgttttgttttttttgtgatgtgtgtggtggttattgtttgtggtagaatttatatttgtttttagaggaagtatggaagtttttttgtatagttaggatgggggtttagttatttgggtgagtagtttaagtttataggttttttggttgttttggttgggttttggtgtgtgggtttgtttaatgaggttgtttttattgttgttgtttagggtattagagttaaggggagtttttggtgaagatggggtttttgtttaataaatgttgaatttttaaattttttttatgagaagatgattttgatgttaattgatttaatttggtgattggttggtgtttagtgtgtgtgtgtgtgtgtgtgtgggggattttgttgggggaagttagggtaggttgagggtttaggataggaggtttgtagtttttttaggggtggggggatgttttgtgtttaataaaggaatattttaatgagagttttaaattaattttattaaatgtgttttgttgtggaatttgtttatgtgttgtaaataattttagtggaggttgaggtgtttgttgttttttagtgaaattttgggatttaatttatttttagatgtatgattttaggggtaatggttttttaatagattatagtagatgtttgtattttattgtttaattgtgtaattaattggagttgtagtgagattttattgttaataaggttggagtaagga

SEQ ID NO: 2391 - DNA, 2697 bp, Artificial Sequence
  chemically treated genomic DNA (Homo sapiens)
tttttattttagttttattaatagtgggattttattataattttagttaattatataattaaataatgagatgtaaatatttattgtgatttattaaaaaattgttgtttttgaagttatgtgtttgggggtgggttgagttttaggattttattagaagatagtaggtgttttggtttttattgaaattgtttatagtatatggataggttttataataaggtatatttggtggaattgatttaaggtttttattaaaatgtttttttgttgagtataagatatttttttatttttgaggagattatagattttttgttttaagtttttagtttgttttaattttttttaataggattttttatatatatgtgtgtatatatattaaatattaattagttattagattaagttaattaatattagagttatttttttatggaaggaatttaggaatttagtatttgttgagtaagagttttatttttattagaaattttttttgattttagtattttgaatagtagtagtgaaggtagttttattgggtagatttatatattaaaatttaattaggatagttagggggtttgtgagtttgggttgtttgtttagatggttgggtttttattttggttgtgtaaaaaaatttttatattttttttgggagtagatgtggattttgttatgagtaataattattatatatattataagaaaaatggggtaattttagaaatattttttttaaatttttggagattggttttttttttgggttatatttatttttttttttataattgggggtaggggagatgttgattttattagtattaaaatttttttatagttggtaggttagaaagatattagaaaggtaattttttatttatgttttttttattgttatttttaaaggagatggaaggtgattatttaggataggtttttttgatagagttttttaagagaaagttgttttgaggattattaaggagtgttgtggagggttgggggttttatttttagtttgggttatttgggatgtgtgggtggtttggtgtttttttgtaaggtattttaatattttagtgatgatttttaggtgtgattaagttaggaaataaaagttgtgggagttgggggggtggtgttgtttgttttggtgatgagggttatatttttgttaaaatgttaaggtttttttttaagaaaagttagaatgagttttttttgtttttttttttttagaaatatttttttttttttgtgaggatagttaggatggaaatttaggaaggagtagaataaattttgtttgtatttttgtagttaggttatgtttgattttggtagtggtttttatatattagttattgtgatagtttgggatttttggatttttggatttggttttggtatggagtgggtgtagggttttagattagtagttagaggttatggatgggggtggtttttaatttttttttttttttgtttttatttgtagggttatttggggttttagttttgtttaggaatttggaggagggaagttgggaatgttgggttggtgtaggtaataaagttttgtgttttgtgtgttgtaggtttgtttggtattgggttttaaattagtaatttttatttgggttgattttgttgggtggggtggggaatttttttttttttattgtgttttttatggtgggtgtggatggtttttttttttttgataagaaattttttatttgggtttgagagttagtaatttttggtagtttttgagtaaatttttggtttagattagaaaaatttagggaggttggaaatgtgtttttgtggtgtgagtgggaggggtattttgattgtgtttttggaggttttgttagttttttgatatttgggttttttgtgtttttttgttgtaagtttgtatttttagtgagtttttttattattttagggttgttttagttgtttaaatttattgttttgggtgtagttttttgtttatgggatttttgtgttttttaagttttgtgtttttaatttttgggtatttattgtttagtagtggtagtagtaggatgttgagtagaggtaattggtggggtttggttggggatttttgtgtagtttttattgtggtgggtttaggaaaaggagttgagggtgtatggtgggtgtgtagattgtgttttgtggtgggtataggaggtggagtgtattggagtgtgggtgttgtagtagtagttgtagttggagtttgattttgaggtgttttgaggtgttttgagttggagttgtgtgtgtttagtatttttgagtttttgtgtgttgttgttgttgttgttaagttttgttttatgatgtttttttttttttggtttttgtatggtgttttgtttttttgatgttttttttttgttgaggtggggaggagtttagtagggggaggggtttggagagggatggagaatagagagagtaaggtttagggaagtgtaggggatttgagtatttgttgtatttattattgattttgtagggatttgggagaatttaagtgatttgtgtgattttgtggattttggggagaatggtttattttgggtatatttggaggttttggttaatagtttttttagaattttttaggtgggggtaggggaagaggtgggttttgttaat

SEQ ID NO: 2392 - DNA, 2405 bp, Artificial Sequence
  chemically treated genomic DNA (Homo sapiens)
tgtgtaagttttgattaaatatagagtttttattttttgtgtaagttatttaagagaaaggattttattttttaatttttatttttttagtagaagttattattgttagtttaattttaaatttatatataaattatgaagtttaataattttttaaaaataagttttttaaaaatattttttttgaaataatgttttattgattttgaaaattttttttagttgttgttatgtttaatattttttattgatgatatatgtggtgatgatggtagtgtaaagaaaaagtttgaggaaatatatatggtgttgatattttattaaaatgaatgtagtatttatttataattgtaatttaatttttaagtaaaaatttgattttttattattatttttttaagtttggtttattataggtttaaagtttgtatgaatttatatagttgttttgaggttttgtatatttttttgtttttgattgtttgatttttttttaaaggggtatttttgtattgaagtaaaatataattattaatattagttttgggggaaaaagaaattaataaatttatagtttgaaatgttttaatattttgtatttaaaattttgtgtattttttagaagttataaaaataaaagttattttttgtaaaaaaaaaaaagaaaaaaagattgagaataaattgttatgattttagaaaatgatagtagatgtgtaggtgttaatattagagagtttatttttgaataaaatggtgttttttaaatagtgattatttatatgttttagaatttttttttgggtatgggtgtttttatattgttttattattataagatgtaagttgtgtagtagaatgttttttgtatggtatttagttaaaagtgaaataagttgtttattgatagagaggttatttatagaatatatttatttatattagtgttaggtagtaattgaaaggtaatgtaaagaagtaatttttttttattttgtttggagtaattttgatttggagagttatgtatatattttatgttaaggaggtgatgaaagttttattttttatagtgatgatatttggaagaagatataattgttattgtgagttttttaattatttttggagattaagtgtgagatgtagtagtgtaggatgattggattatgtaaaatgagatagatgttatttgtgagttatgtgtaagttgttaagtgttaaaatgaatatttttattaaatgatggagtttttatattatttgtagtttggttagatttgaaagatgagttgattgtttttagatagtgtggtaaataggtagggatttggaattttttttggttgtatgagtaattattgttttatatttaaattagaaatatgggtttttagttaggttttgagattgtttttaaaggatgttgttgtatttatgttgaagtgtggtttgttttttttgttttatttataagggttatagagttttgagaaagaaattattagttttttttatattatggtaaagaaatgtaaaatttatgattttttgttaggaaataaaagggtttttatattttaaaataatggttataatattgtgggtagaatgtttttaagaattgttaggaggtagtattggagttttgtttttttgtgttttgaggttttagaattaattttttatttataatttatttttttatttttttattggtattaattttattattatttttattttaatttttaattgttgtgattatatagtaatatagtaatatattttatagagtttatggggtatatgatatattttgatataggtatttaatatgtaatgattatattaaggtaagtgggatttttattattttaagtatttattttttgtgttataagtaatttaattatatttttttagttatttttaaatgtataattaaattattattgattatagttattttgttgtgttattaaatattagattttatatatttttttttttttttgtatgtattaattatttttatattttttttttttttttattattttttttagtttttggtaattatttttttattttttattttaatgagtttaattgtttttatttttagtttttataaataagtaggaatatatgaagtttgtttttttgtgtttggtttattttatttaatataaggatttttagttttatttatattgttgtaaatgataggattttatttttttttttggttgaattttattttgtatttgtattatatttttttatttatttgtttgttgatggatatttaggttgttttttaattttggatattgtgaaatatgttgtaatatatatgggtatgtagatatttttttgatagattgatttttattttttgg

SEQ ID NO: 2393 - DNA, 2405 bp, Artificial Sequence
  chemically treated genomic DNA (Homo sapiens)
ttaaagaatggaaattagtttattggagaggtatttgtatgtttatgtatattgtagtatgttttataatatttaagattaagaaataatttaaatgtttattaatagataagtggataaagaaatgtggtataggtatagaatagaatttagttaaaggaaagaatgaaattttgttatttgtaataatatggatggaattggaggtttttatgttaagtgaaataaattaggtatagaaagataaattttatatgtttttatttatttgtgggaattaaaaatggaaataattgaatttattgagatggaaagtaaaagaatggttattagaagttgggaagggtagtgggagaaaagggggagtgtggggatggttaatgtatataaaaaagagagagaatgtataagatttagtatttgatagtataatagagtgattatagttaataataatttaattgtatatttaaaaataattaaaagggtataattggattgtttgtaatataaagaataaatgtttgaggtgatggaaattttatttattttgatgtgattattatatattagatgtttatattaaaatatattatgtattttataaattttatggggtatattattatattattatgtaattatagtaattaaaaattaaaataaaaataataatagagttggtgttagtaaaaagatgggagaatgaattgtaaatgaaggattggttttggagttttaggatgtagagagatagagttttaatattgttttttggtagtttttgaaaatattttatttataatattgtggttattattttagagtatgggaatttttttgttttttaataaaaagttataagttttatatttttttgttatgatgtgaaaggaattgatgattttttttttagaattttgtggtttttgtgagtgaaatagagaggataggttatgttttaatatgaatgtagtagtattttttggaaataattttaagatttaattgaaaatttatgtttttaatttaagtatgagatagtaattatttatatagttagagaggattttaagtttttgtttatttgttgtattatttaaaaataattaatttattttttaaatttgattaaattataaatggtatgagaattttattgtttaataaggatgtttattttggtatttagtagtttatgtgtggtttatagatggtatttgttttgttttgtgtaatttaattattttgtattattgtgttttatatttagtttttaggagtaattgaaaagtttatggtgataattgtgtttttttttagatgttattgttataaggagtggggtttttattatttttttgatgtaggatgtgtatatggttttttaggttagagttgttttaagtaaggtaaagagaaattatttttttgtattgttttttagttgttgtttagtattggtgtaaatgaatatgttttataaatggtttttttgttagtgggtaatttgttttatttttggttgggtattatatagaaaatattttgttgtatggtttgtattttgtggtaatagggtaatataaaggtatttatgtttaagaaaggattttaaaatatgtaaatagttgttgtttagaaggtattattttatttggaggtaagttttttggtattagtatttgtatgtttgttattgttttttgaaattatgatagtttgtttttaattttttttttttttttttttttgtagggagtggtttttatttttgtaatttttaaagggtgtgtaaaattttaaatgtaaagtgttgaaatattttaagttgtaggtttgttagttttttttttttttgaggttagtgttaatagttgtgttttattttagtgtaaaaatatttttttaaaaaaaaattaaataattgaaaataaggaaatatgtaaagttttaaagtagttgtgtaaatttatataggttttaggtttataatgagttagatttaagggaatgatagtggaaaattagatttttatttaaaaattaaattataattatgagtgagtgttatatttattttagtaaaatattagtattgtgtgtatttttttaagttttttttttatattattattattattatatatgttattagtgagaaatgttgagtatgataatagttaagaaaaatttttaaggttagtaaaatattattttaggaaaaatatttttaaaaagtttatttttaaggggttattaaattttgtaatttatgtatagatttgggattgaattagtaataataatttttgttgaagagataaaaattagaagataaaatttttttttttaagtagtttatataaagaatgggggttttatatttagttggggtttatata

SEQ ID NO: 2394 - DNA, 2393 bp, Artificial Sequence
  chemically treated genomic DNA (Homo sapiens)
attaatattattagatgtgggattttttaatagtagagattaaagttgagtttttaatatagtattatttttttgggaatattagttaattatttggtgatagattgattatattaggttttttatattatagaaggagaattgatttgttttttttggaatagatattattttgaatatggattagttttttttgttagaatatgtattagttagtattatttgtatttataaaattgatggattgattttttagaaatttattggttttattaggtaatttatgattatgaaatatgtgggttatggtaataagttggtaagaggtttattaaaaatttagttatagatggtattaattaggggataatattttaaaaggatagattttattttatagaatgttagagggagagagggagatagggagagagggattgatatatgggtattgttttttttattagtttaggattaaggaatggttgtgaggtgattttttttattattttatagttaataatttaattgtaggatttttgttttttgttttaattttgagttttgttggttgtgtgttttagtgttaataataatggagtttttgaattggtagttgaaataagtatttggttttttggggttttttttgttattgaaataaagaatagtatttaattgttgtagttatagattttgattataaaagggaaattagattgttattaaataatagggttagggaagtttgtgtttaaatttaggagattttttgagatgttgtttaatatttttatgttttatattaaaagttaatggaatatgtagggggtggtttgagaatttagaatatgttttgttttttattatttttattttatttttttttagggaggtagtggatgttggagttttttaggttagaagtttaggggtaggggtatggtgggggtgttttttttattttgagaaaatgtagtggtggttatggggaggggtgttattatgtagtatttaggtttggattttagttagtagtattagtttttttttatttttgggtagtgatattgttggtgtagattgttttaggtgtgtttttgtttagttttattgtttttagttttagtttgggtttgtttttagtttgttggagttgttggatgtgtttaggtttttaggtattttggtttttttttatttgttttgtgaagattgagggaaagtagatgtgtttttgtggtaatttggagtttgtagtttgtagggattttattgttttaggtgtaggtgtgtatatgttagttgtagaaaatattatattaaattagtttgagggagttaaagtaaattataatattttaggtgttagagatttttttattatagaatttgtttgtttggatagtatgatattttttttataagattttattaataagttgtataaatagtttataggtttagtattatatatttgagaaaagagtttttttaatgttatattaaaattttttttagttaatagaaatagaggttagaatattatagagtaaaatttagaaagtttgaatatggaaggaaattttatatattaggttttgaatggtttggtgttagttatttttataaattttttgtgtttttattatataatattttttggtgtttttgtttttgatgttaatattagagatgtatgaattgaattgtgttaaagttagaatttggttttggttatattaggtatggtttaggtaattttagttatttaggaggttaaggtaggagaattgtttgaatttgggaggtggaggttgtagtgagtagagattgtgttattgtattgtagtttgggtaataagagtaaaattttgttttaaataaataagaaaataaaaaatattttttaagtgtattgttttttaatagaattaatggagttgttagttttttttagaaattttttttttatggaaatgtgttttttttgttaattaggaagtttgttgaatagattttttggttataaatttttaagagtggttaaagtattttaatggatagataagaaaggtaaagatgaattttttattttttttggtttttgtatagtagttgatttagttatatttaaatttttatttatattgaaatttatattaaaaataaataaataaaaaataaataaaaaataaataaaaaataaataaataaaaaataaataaataaaaaataattttaaaattaaatataaattagattttatatttatagtttgggatgttaaaaagaaaagttgttttgggatatgttgaagtaaaattgtgtgtatgggggatttggttgttaatatattttgttgagttaaaaattgtgtttagatgagtaag

SEQ ID NO: 2395 - DNA, 2393 bp, Artificial Sequence
  chemically treated genomic DNA (Homo sapiens)
tttatttatttgaatatagtttttgatttaataaagtgtattagtagttagattttttatgtatataattttgttttagtatattttagaataatttttttttttggtattttaaattgtaggtgtaaaatttagtttgtgtttagttttagagttgttttttgtttgtttgttttttgtttgtttgttttttgtttgttttttgtttgttttttgtttgtttgtttttggtgtaggttttaatatgaatggaggtttaggtatggttggattaattattgtataaaagttaagggaagtggaagatttatttttgttttttttgtttgtttattaggatattttaattatttttgggaatttatggttaggaagtttatttagtagattttttaattggtagaggaagtatatttttataaaagaagagtttttggaggaagttagtagttttattagttttgttggaagatagtgtatttgaaaggtgttttttgtttttttgtttgtttgagatggagttttgtttttgttgtttaggttatagtgtaatggtataatttttgtttattgtaatttttattttttgggtttaagtgatttttttgttttagttttttgagtagttgggattatttgggttatgtttagtgtggttgaagttgagttttgattttggtgtggtttagtttatatatttttgatgttgatattagaagtagaaatgttggagaatattgtatagtagaaatataaaagatttatagggataattaatattaagttatttggagtttgatatgtgaagtttttttttgtgtttaggttttttgagttttgttttatggtattttggtttttatttttgttagttgggaaggattttaatgtaatgttaagaaaattttttttttaggtgtgtgatattgagtttataaattgtttgtgtagtttattaataaaattttgtggaaaaggtgttatgttatttaaataggtaaattttgtaataggagagtttttgatgtttgaaatattatagtttgttttgatttttttagattggtttggtgtgatattttttgtaattggtatgtatatgtttgtatttggggtggtggggtttttgtgggttgtaggttttgggttgttgtggagatgtgtttgtttttttttggtttttgtggggtgggtggggggaggttagggtgtttggaggtttgaatatatttaatagttttagtaggttgagggtgagtttaagttggggttgaggatagtagagttgaatgaagatgtatttgagatggtttatattagtggtgttgttgtttgaaagtgagagaaggttgatattgttagttggaatttaggtttgggtgttgtatggtggtgtttttttttgtgattattgttgtgtttttttggggtgagaaaggtgtttttattatgtttttgtttttggatttttggtttaagaagttttagtgtttgttatttttttgggagggagtggggtgggggtggtggggagtaggatatgttttggatttttaggttgttttttgtatgttttattgatttttagtatgggatatggagatattaagtggtattttagagaattttttgggtttagatatagatttttttagttttgttgtttagtagtaatttaattttttttttgtaattaggatttatggttgtagtaattgagtattgttttttgttttagtggtaggagaagttttaaaaggttaggtgtttgttttagttgttaatttaagggttttattgttgttggtattaagatatatagttagtagggtttagagttgggatgggaagtaaaagttttgtaattgagttgttagttatggaataataaggggaattattttataattattttttgattttgggttggtggaagaaatagtatttatgtattaatttttttttttttgtttttttttttttttttggtattttgtaagatagaatttatttttttagggtgttgttttttaattggtattatttgtagttgagtttttggtaagttttttattagtttgttattatgatttatatgttttgtggttatgggttatttggtaaggttagtgaatttttagggaattagtttattagttttgtgagtgtagatggtgttggttagtatatattttggtagggagagttaatttatatttagaatagtgtttattttaaggaggataaattagttttttttttatgatgtaaggggtttgatgtaattaatttgttattaggtggttggttgatgtttttgggggaatggtgttatattggagatttagttttggtttttgttgttggaagattttatatttggtaatgttggt

SEQ ID NO: 2396 - DNA, 2378 bp, Artificial Sequence
  chemically treated genomic DNA (Homo sapiens)
attggttttgaatttttggttttaagtgatttttttgttttagttttttaaagtgttgggattataggtatgaattattatatttggttatttaatttatatttttaagaaaatattgagattagtagaagtagttatattatttttgaaaatataaaagttataatatatttttttttttaaaaaaaaaatttgtaaaaattttgtaataaatttattttatgggtatgttttgattgagatagttggaaatttataattatttttatttaatttaatattgtaaatatttattgtatgtttattatgtgttaagtattatattaaaagttgggaaaataaataatttatgtatttgtttttgagttattattagatagggtaagtgtggaggttatttggatttaagaaaggaattttagtatttttaagtggatttagtaagtgtttttttttgttgtaaaatttttaaatttttatgtttatttgaaatagaatttaatttataaatatataatttttagaatatatttattatatagggaaaagtatttaagtgtatttgttgtttagtttaaaagtatgagatttgatttgtttgttatatagataaaatatatttagtataggagagtttatttttaatttggttatgtgattttaatatttttttttaatgtttatttttaagtttagaataatagaaataaatatttgtatattggtttttttaaaattttatatttggaattgtattttttttatgttaattataaatgtaattttttattagtttatttattaattttttttaaaaataaatttagattttttttattttttataattaaaattttttaattatagaggagagttgtgtgtatttatttagttatgtttttgttttttttttttttttttttttttttgtttttattttttttttttttttttttttttttttttttagttttttttttgggatattgagggataaagttgtaaggtattattatagattttttattttttttttttgtttattagaatgttaataagagatataatatttagaaaatagagagtagagatttttttggattaaatagtattttttttttttgtttttgtttttttgtgatttaagggagaaatgattttttttttttaagtgattttatttttttttgttaagaatttgtggatatgttatttggttagagtttagtttgtagttattatgtaggtaatttatttatgttagattataatttatttaatttgtttgtgttttagttaaatgtgtattagagtaaaagtttagatttgattatgggtaagtttaatgattaatataagttatttaggttttttttttagggtttgttagtaatgattaaaggaaaagtgttttatatttttttttatttattgtatgtgttttagataagaattttaagtaaaagtttatttagtgagataaataggtatttaatattgaaagaatttgttagtaaattagtgattgaatagagggtttaagagaaaggattattagagggtagatttttatttatgaatagttttttattttttattttgaagagtgatttgtaaatattaggttatgggttgttatttatatatttattgtaggggtatgggtttaaagaagtatagaagggaagtaatttggtttaagttttgttgagaaagggttgattgattttttttatttttttattttttatttttttttttgattttgtttttttaattaagaggaggtttttgatttgtatttattattttttagttgtatttagattatgggttttagttattggttgaattggtgggtttaggaaggttaataatatttttttatttggtttatgtttgatttttttgtttttgttttattgtttattttgatttatattttttaatttttgattatgtttgtttatgtttggtgatatttgattagaagatgtttttattttttatttttttttttttttttgagggagaagttattttggtaaaatttgatagttttgagtttttatttttaaggattagtagtagatttggagaagtatttttagtaaaattagattaaagttatggaaatatgattataattttgatgatagtagtaaaattattttttagaaagtgtggaagtttatattaattttgttgtatattatagtttggtaatttgtgataagttgaaaaatttttgtagttttgaagttagtggtgtagagagagggtgtttggttagattggggtaggtagggggttagttattttattattttgtttgtttgttgaattttttttagtttttattttggattttttttatg

SEQ ID NO: 2397 - DNA, 2378 bp, Artificial Sequence
  chemically treated genomic DNA (Homo sapiens)
tatggaagagatttagagtggaaattgagagaggtttagtaggtaggtagggtggtggggtgattgattttttatttgttttaatttggttaagtattttttttttatattattagttttagggttataaaaattttttagtttgttatgggttgttaaattgtgatatatagtagagttgatgtaaatttttatattttttagaggatagttttattattgttattagagttgtggttgtatttttatggttttaatttggttttgttggagatgtttttttaggtttattgttggtttttgaaggtggagatttagggttattaaattttattaaaatgattttttttttaaaggaaagggagaggatagaagataaggatgttttttggttaggtattgttagatgtagataaatatgattaggaattgggggatgtgaattagaatgggtagtgggataggaatagagaagttagatatggattaagtaagaaggtgttgttgatttttttaggtttattagtttaattgatgattgaggtttatggtttgggtatgattggagggtgatgagtataagttaaggatttttttttggttaaaaaagtaaggttaagagggaggatgaggagtagaaaaatgaagagaattaattaatttttttttagtaagatttggattaagttattttttttttgtatttttttagatttatatttttatagtgggtatatgaataatagtttataatttggtatttatgagttattttttgggatgaagagtgagagattgtttatgaatggggatttgttttttagtggtttttttttttgagttttttgtttaattgttgatttgttggtaaatttttttaatgttgaatgtttgtttgttttattgggtggatttttatttaaaatttttatttggggtatatgtagtaagtggagaaaaatgtaagatattttttttttggttattattaataagttttgaggaaaaagtttgagtggtttatgttaattattaaatttatttatggttaggtttgaatttttattttggtatatatttggttgggatataaatgagttaggtgagttatagtttaatgtgagtgagttatttgtgtggtggttgtaggttgagttttaattagataatatgtttatggatttttgatagagagaaataagattatttagaaagaaaggattattttttttttgagttataaggagatagaaatagaaaaaaaaggtattgtttgatttagaaaagtttttgttttttgttttttaggtgttgtattttttgttaatgttttggtgaataaaaggaagaaatgggagatttatagtagtgttttgtaattttgttttttgatgttttaaaggagaagttgagagggaagggaggaagaagggaagagggagtgagagtagagagaggagagagagagaggagaataaaaatatgattaaataaatgtatatagtttttttttgtggttgaaaaattttagttatgagaaataaagagagtttgagtttatttttaggaagaattagtggatagattaataaaaaattatatttataattgatatgaaaaagatgtagttttaaatgtagggttttaagaaaattagtgtgtgaatgtttatttttattgttttgagtttgggagtaggtattaagaagaaatgttaaaattatgtagttagattgaaaatagatttttttgtgttgagtatattttgtttgtgtaataagtaagttagattttatgtttttggattaagtagtaaatatgtttgggtatttttttttatgtggtagatgtattttgaaagttgtatatttataagttgaattttattttaaatagatgtaaaagtttgggaattttgtaatgaaaaggaatatttgttgaatttatttgaaaatattagaattttttttttaaatttaagtagtttttatatttattttatttggtaatgatttgggggtaggtatatagattgtttgtttttttaatttttagtatagtgtttagtatgtagtgggtatataataaatgtttgtagtgttgaattaaatagaaatgattatagatttttagttgttttaattagaatatgtttgtaaggtgagtttattgtaaagtttttgtagattttttttttgagggggggagtatattgtagtttttatatttttagaaatgatgtaattatttttgttaattttagtgtttttttaaaaatataaattaaatggttaggtgtggtggtttatgtttgtaattttagtattttgggaggttgaggtagggagattatttgaggttaggagtttaagattagt

SEQ ID NO: 2398 - DNA, 2351 bp, Artificial Sequence
  chemically treated genomic DNA (Homo sapiens)
gattttttattgtgtttttgatatttgggtttaggttttttttattatttttttaattttttttttttttaaggtatttttaattattttattttgtttaaaattttgtaatatttttttattgtttatagggtataatttaatagttttatatagtaaataaagttgtttgtaaattagatgttttttatgtgttaggttttattattttttttattaatatttttattttgttttgattatttaagggttttaaaagtattatattgttttttattttttttttttttttatattttttttgtttaaaatgttttagttttttttgtagggtttttttagtattatttttgttttttagattttgattttaggaattttaatgttgtattatatgatttgtttgtttgtttttgtgtttatttttttgttggattgtaagttttttgagagtgagtttagtattttttattttggaatttttatatttgtgatattgtataagttaaaatagatatttagtgagttagtagttatgttttataaagttttttttatatttattattttatttgatatgtttagaaatggtgttttttagaaattaggtgtaattggtagagtaggtttgaggtatttttatattgttaaatgataaaattaaaattaagaaatatttagaagtggtagattagggttatataaagaaaaatagtagaagattttttttaaatttttgtattatttttatattattttttttgttagattatgtgatttttgagtataggattaaaagtaaaagaaattggaaaataaaggtaaattatatagtaagaaagtagaaggatttttagatgtaatataataaatgaatttattttattatttttttgttagttattttttaaaaaatttatttttataaaagaattttttgaagtgttttttatttttaaattaaataaaaaaatttttaaaatttatgatttatttatttttttgttttttatagtttttagttttaaatttttaaaatgttattaagtattatatttaattttataataaatttatattttaggtaggatgttgtttataggatttatgttgggtgatgtttgggtgatttaaatagggaaataatatttttttaagttatattagtttttaatggtgttattggttatgtgtagagaggtaaatttatgagtagtattggggagttaatgaatggttggttagatggtgtttgttagaaggtgttgattttttagataattgggattgttttttgggagtaaatgagaggtgtagtagggatggattgtattttaattatatagaaatagatagatttattgttaatgaaaataattatatagttaggtatatttttttttttttgattttgtttgttttatttggtagatatagatgaggatttagttgaaattataatattatattaaatgatgtaatggagtaaatatgaaaagttatttataaattattagtatttttaattaggaaaaattaaatagaataaggaaaaataatgtaaattagtggtaaattaatttggaattaataagggtattttgattgttatagtatgaattatttgaaaataaataaaatttgaaatataatagtgatttgtagatgttattgaaatatttaaattggtggagtttattaaggatattttggtatttttgattttttagtataatatatttgaaatgaattatttttattaatttgattatttttatttgttgttttgttgaattgtggaagtttttttattatatgtttagtgatatttttggtaggtaaattttgatatttaatgtttatattttagtagatataataagtagaaaattttattgatttttttgttgttattagagaatattatttaaatatttgtttgtttgttgtggttatttttaggtattgtataaaattagttaaataaatgttattataaaattatggatagtttgtttggttatagtaatagatttagtagattgggtaattttattttttattagttatgtgattttaggtaagttgtttagtttttttttgttttggtgttttggttaaagtgaagattttatgaaatgaatgtaaagagtttgatatagtagttagtatgtagttaatttttgtaatgttttttttttttgattataaagagtttttagtttaggttatttatttattttttttttatgtttttattttttttgattgtatatattgggtttgtttttaattttgtgtttattttaaataggtttttagaaatttagagtgatgtatttgaaaatttg

SEQ ID NO: 2399 - DNA, 2351 bp, Artificial Sequence
  chemically treated genomic DNA (Homo sapiens)
taaatttttaaatatattgttttgaatttttagaagtttgtttaggatggatataaggttgaagataaatttagtgtgtgtaattaaggaggatggaaatataagaaggaaatgaatgaatgatttggattgagagttttttgtagttaggaaagagaagtattatgagagttgattatatgttagttattgtgttaaattttttgtatttattttatagaatttttattttaattagggtgttaaggtaaggagaggttaaataatttgtttgaggttatatagttggtaagaaatagagttgtttaatttgttgagtttgttattgtgattaaataggttatttatagttttgtgatggtatttatttaattgattttatgtaatatttaagagtaattataataggtagataaatgtttaggtaatattttttgatagtaataaaaaagttaatgaagttttttatttattatatttgttgaaatgtgggtattgagtattaaggtttatttgttaaagatgttattaagtatgtaataggaaaatttttgtagtttagtaaagtagtaagtgaaaatggttaaattagtaaaagtggtttattttagatgtattatgttggaaagttaaaagtgttagaatatttttaatggattttattagtttgaatattttaataatatttgtaggttattattgtattttaaattttatttatttttaagtagtttatgttatagtaattaaaatatttttattaattttaggttagtttattattaatttgtattatttttttttattttatttgattttttttaattaagaatattaatagtttataggtagttttttatatttattttattgtgttgtttaatatgatgttatagttttagttagatttttgtttatgtttattaggtaaaataaataaaattaaaagaggaaaaatatgtttggttatgtgattatttttattagtagtgaatttgtttgtttttgtgtgattgagatgtaatttgtttttgttgtattttttatttatttttaggaaatagttttagttgtttaaaaagttaatattttttgataggtattatttggttagttgtttattaattttttaatgttgtttatgaatttgtttttttatgtgtgattagtgatattgttgagagttaatgtggtttaaaggaatattgtttttttgtttggattatttaggtattatttagtatgagttttatgggtaatattttatttgggatgtaagtttgttataagattaaatgtaatatttgataatattttggaaatttgaagttgagggttgtaaagagtaaaaaaataaataggttataaattttgaaagtttttttgtttggtttgaagatagaagatattttagaaaatttttttgtgggagtaaattttttgaggagtgattaataagggagtgatgagatagatttatttattgtgttgtatttgaaaatttttttgtttttttgttatatgatttatttttattttttagttttttttgtttttaattttatatttagaggttatatagtttagtaggagagataatgtgaagataatgtaagagtttgaggaaaattttttgttatttttttttatgtaattttagtttattatttttgaatattttttaattttggttttattatttgataatgtaaaaatgttttaaatttgttttattagttatatttggtttttaaaaggtgttatttttaggtatattaaataaggtaatgaatgtgaaaaaagttttgtaaaatatagttgttggtttattgggtatttgttttggtttatataatattatagatgtagagattttaaaataaaaggtattaaatttgtttttaaggagtttataatttagtggagagatggatataaaagtaaataaataaattatgtgatgtaatattaggatttttaaaattaaggtttaaagagtagagataatgttggaggagttttataaaggaggttgggatattttgggtagaggaaatgtggaaaaaagagagaggtgagagatagtatggtatttttgaaatttttaagtagttaaaatgggataaaaatgttggtagaagaaatggtgagatttgatatataagaagtatttggtttgtgaatagttttgtttgttgtgtaaagttgttgaattgtattttgtgggtaatgggagggtgttgtagagttttgaatagaatgagatgattggaaatgttttgaaagaagggaaggttgaaggaatgatgagaggggtttaagtttaggtgttagaggtatagtaaggagtt

SEQ ID NO: 2400 - DNA, 2435 bp, Artificial Sequence
  chemically treated genomic DNA (Homo sapiens)
atttttttaaatatatttggggtagaggtattggaaaaaagtgaaaatgtgaattaaaggaaagaaatattgtaatttaggagaatgttttttgttaggtatttatagttaaggtagtagggtgtgtgtgtatatatatatatatatatatatatatatgatgttatttttgttttagtgtgagatagttttatgggtgttgggtatggtgatatataatggatattaaaattgtatagttagttttagtaaattaggtaaattagagattatttgatggtattttattgttgttattgtaattattgtaattttttttggtaatggtgttttgtgatgaagtgttgtttttataggataattgtgaaagatattgaaagatttagggatgtagtatttggttttaaaagttttttagatttaaattggtattttattttattttgaaaatttatgagagatttagattatgttggtttaaatggaaaggtgaaagtagggtaattttaatttatgaattatttaattttagtttggtgaaattgttatttatgaattgatgttttgatagtttttttgtagagtttttattatgtttgttatttttatttttttatttatgattttttttttagttattgagtttgttttttagggtttagttttataaattaagtattttaaattggtaataatttaaatgtgttgttgttttgaattgttgtttttataggttgtttttttttgttttttttaaattattaaaaattatatttatgatgatatttgttgggttttttgattagatgaattaaaatatatatatatatatatatatatatattatatataagggtattattgtgaagaagagttatgttttgttaatattataagagaagagaaagtgatgttttttgtttttttttttgttgttagtatgatttattttagttgtatagtattatgtagaaaggagttagggttaaaggtggtttgtttggtattttgatttttagttagagttgatgaggattgtatggtaggtaggttaatttagataattgtatatttagtgagtatgattatttaggaaaataaggaaaagttgttggatgattgaaattagattgttatttttttgggttttatttgtatatagattgtagttgtaatgattttttatttgatggttggttgtgttattgttagttgatagttgttttgtatttagagaggattgggagtgatttaggttagggagtttggttttttttttaaattgtgtgttaattgaggagtggggatttgtgttagttttgtgattagttttaaatgtgagttggggagttatatagtattagtgtggtgagttgtttgtataggttttagttagataaattatagtaagtatttttttttttgttttagtttttatttttgtaggtagagtagtgtggtataagaagtttttaaattatttatatatatggtgggagattagttgtgttttattagaggtggtttggttataagtttttgagtagtatttgtttagttgaaaatttatgttgttaagttagaagttattgtgtatatttaggatgtatttttgtttttggttaaataaaggtaaatattttttatgtaagatatgttaagtagtagtaggagaagaaaattttaaaattttgttgttttgtgtttagttgtttgtttttgttttgttgtattgtgattgggaaattgtaggagttggagttggtagttgtgataatgtagaaagtagtagttttgatatagtagttagttgatttgtggggtgttattatttaatgttttttgtagaattagattagtttttaaggtggtattagatagatgatttttaatggaaagagaggtttaaggagtgtagtttttttttatttatatttggtagggatattttatattgttttttttttaagtagagtttttaatttatagtttttaggatttaattatttttgttttgtttgttaagatggtaggtaatttttagggtgattattttaatgtgaatataagttaaagttattgttgttttttttgttttggttggttttagtgttgtgagaatgattgtgggagaatttttgtttatattttgtttgaaaaatatattttttttttaataggtagaaatggttttaagttatttgtatgttgtaatgaattagttaattgtatttaatagaatggtaagagtaagagggaaaatttgaaggtaaattagtttagtattagttttaaattatggtttagttgttgtaaggtagtgtgtatgttttattgtgaaatgtaggttgtataatttaattaatttgataatggagtaaaagttttatatggtattattttagtggtttgaggaattgttaaaataagaaggt

SEQ ID NO: 2401 - DNA, 2435 bp, Artificial Sequence
  chemically treated genomic DNA (Homo sapiens)
gtttttttattttagtaattttttaaattattggggtaatattatataaggtttttgttttattgttagattaattgggttgtataatttgtgttttatgatagagtatgtatattgttttatagtaattggattatgatttaaggttagtgttgaattaatttatttttgagtttttttttttgtttttgttattttgttaggtataattgattagtttattatagtatataagtagtttaaggttatttttatttgttaaaaaagaagtgtgttttttaaataaaatgtgggtaggaatttttttgtaattatttttataatgttgaaattagttaaagtgagaggggtagtgatggttttaatttatgtttatattggggtggttattttaagaattatttgttattttagtaagtaggatagaaatagttaagttttaaaggttatgaattaaaaattttgtttgagagaaaagtaatgtaagatgtttttgttaggtgtggatggagaaaaattgtattttttaagtttttttttttattgaaggttatttgtttggtgttattttagaaattggtttgattttgtagaggatattgaatgataatattttgtaagttagttgattgttgtgttagagttgttgttttttgtattattgtaattgttagttttagtttttgtagttttttagttgtaatgtagtaaagtagaagtagataattaggtataaagtaatagagttttaaagttttttttttttgttattatttagtatgttttatatgaggagtatttatttttgtttagttaggagtagagatgtattttgaatgtatatgatggtttttaatttggtagtgtgaatttttagttgagtaggtattgtttggagatttgtaattaaattgtttttgatggagtatggttggttttttattatgtgtgtgaatagtttgggggttttttatgttatgttgttttatttgtaggaataaaggttaggataaaggagaggatgtttgttatggtttgtttggttggggtttgtgtgagtgatttattgtattgatgttgtgtgattttttagtttatatttaaggttggttatggggttggtgtagatttttattttttagttagtgtatggtttaaaggagaaattagattttttgatttaaattatttttagttttttttggatgtgggatagttgttgattagtagtgatataattagttattaagtggagaattgttgtgattgtagtttgtgtgtaggtggagtttgggagaatgatagtttaattttggttatttaatggtttttttttatttttttaaataattgtgtttgttaagtatatagttgtttggattagtttgtttgttatgtagtttttattaattttggttggaaattagggtgttaggtaagttgtttttagttttggtttttttttgtgtgatgttatgtagttaggatgggttatgttgataataaagaaggaagtagaaagtattattttttttttttttgtgatgttagtggaatataatttttttttgtagtgatgtttttgtgtgtggtgtatgtgtgtgtgtgtgtgtgtgtgttttaatttatttaattgaagagtttaataaatattattatggatgtgatttttaataatttggaaaaaataaaaaaagatagtttgtggagatagtgatttgaaatagtggtatatttaggttattgttaatttgaaatatttggtttgtgaagttgagttttaagggataagtttggtaattgaggaagagattgtagataaagaaataaaaatgataagtgtaatggaggttttgtgaagggattgttagagtattagtttatggatggtaattttattaggttgagattgaataatttatagattgaaattattttgtttttatttttttatttaagttggtatgatttgaattttttataaatttttaagataaagtaaaatgttaatttgaatttgaagagtttttaaaattagatgttgtatttttgaattttttggtattttttataattattttatgagaatagtattttattatgaagtattattattagggaaaattatggtgattataatagtaataatagaatattattaaatgatttttaatttatttaatttgttaagattgattgtatggttttgatatttattgtatgttattatgtttggtatttgtgaagttattttgtattggaataaaagtggtattgtgtgtgtgtgtgtgtatgtgtgtatgtgtatgtatattttgttattttaattgtgaatgtttagtaaagaatatttttttaggttataatattttttttttttggtttatatttttgtttttttttaatgtttttattttaaatgtgtttggggaaat

SEQ ID NO: 2402 - DNA, 2423 bp, Artificial Sequence
  chemically treated genomic DNA (Homo sapiens)
gtatttgttattatttatttataatagtaaagatatggaattaatttaaatgtttattaataatagattagataaaatatggtatatatgtattatggaatattatgtagttataaaaaaaaataagattatgttttttgtagggatatggatggagttagagggtattatttttagtaaattaatgaaggaatagaaaattaaatattatatgtttttatttataagtggaggataaatgatgagagtatttggatatatagaggggaataatatatattggggtttattagagggtggagggtggaaggagggaggggattaggaaaaataattattgggtattaggtttaatatttgggtgatgaaataatttgtagaataaatttttatgatataagtttatttatataatatatttgtatatgtatttttgaatttaaaataaaagttaaaaaaaatagaaaaaaaagaggaatgtttgtaatttttgtaaatatattattttttaaaagttatttatttttttaaagtattgtatttagaatgttagattattgtttagaaagttggtaatattagtatttgttatttttttatttattgtgtaagagatttttatattagatggagtttaggttgggaattattattttttttaatttttgttaatttgataagtgtggaatgtgtttttttgtatttatatttttttgattattggtgagagagaatattgtattttattatagatgttatttgattttttgttttatgtttatttttttttgttggtttggtagtttttttttattgatatataagtatttgaaattatttttaaggatttgtattaatttgttgttttttgtatatattgtgattattttttttttttgagttagtttttttttaattttttttgagagattttagatggttggtttattttttgatttatttttaagtttaaataatattagaaataatatttgaaatgtttagattaatttttttgtagtgattttattgggaggttgtattagtatttagatatttttatatattgaggaaaaatagatagttgtgtttaaggattttagagggtttgttattatttatttataatttttttagaatttatgagttttaggtttttattgtagtggtaagtgttgagtgtttatgggggtgtgtgtgggataggatgtggtttgagttttgtgatttttattttgattttatgtgttgggaatttttgtagttttgtgattggtttgtgggggtttgggttaagtttttgttaagatattaaaagattgtagaggtgggtaaagattttaggtttttagattagtaatttataaatattagttatgattatatagttaagggttgtttatttgttttttttttttttagtttgttttgtgtaaataagttttaagtaggagaagatgaaggtgagtgagttttagagagggtatggtagttatttttttgttttatttttagattttgttttttatttttttttgtaagattttaatttttgttttttttttttttgttagtttttttaaattttgtttttttttttttttgaattttttttatttttatggatgggtattttttgtgttgaatatgattagggaagaaagggtttttatatgattagggaagaaagggtttttatattttttttaggtggaggttttttggagatttttttggttatattagtttttgttttagagttgggtttgaggttgggatagtgatgggttttagagtaggtggggattggggtttggaggagaagttgagtggatttgttttagatatagtttagtaataattttttgaagaggaggaaaaaatgaatgtggaagttttaaggatggataaaattagagagttattagagaaatataaaatatgaaaaaaaaaattagagttttaaaataattggatttggagttaggtattttggattttggttttagttttatgtttaatttatggtttgttattttattgataagatatatgtgtttggtagtagaaggggtagtttaggaaaggataataatgaatgtgataatttggaggtagaaaataattatgaagttaggtaaaggtaaatttttatttatataatgggttattatttttgattttggataaattaatttttgttattttattgtaaatttatgggtaatagtaattattttatgggtgggtgaataataattattatgtatataatatattttataaaatgtagttttaataatatttttttattttttgtttttaaaattaattagataatattttgggtgaatttttattttgagaattgatatggtttttatgttatttgtggtgtttaattgagtgtggagattttgggt

SEQ ID NO: 2403 - DNA, 2423 bp, Artificial Sequence
  chemically treated genomic DNA (Homo sapiens)
gtttagagtttttatatttaattaagtattataggtaatataaaaattatattaatttttaaaatagaagtttatttaggatgttatttagttaattttagaggtgagggatggggagatgttattagaattgtattttgtagaatgtattatatgtataataattgttatttatttatttataaggtagttattgttatttataaatttataatgagataatagaggttaatttgtttaaagttaaaagtggtaatttattatgtaaatgaaagtttgtttttatttaattttatgattattttttgtttttaagttattgtatttattattatttttttttaaattgttttttttgttgttagatatatgtgttttattaataaggtaatgagttatgaattgggtatagaattgaggttagaatttaagatgtttgattttaaatttagttgttttagggttttgatttttttttttatgttttatgtttttttgataattttttgattttatttatttttaaaatttttatatttgttttttttttttttttaaggggttgttgttgagttgtgtttgagataagtttatttagttttttttttaaattttagtttttatttattttaaagtttattgttgttttagttttagatttagttttgaagtagagattgatgtggttagagaggtttttaggggatttttatttgaagaaggtatggagatttttttttttttagttatatggagatttttttttttttagttatatttaatgtaaggaatatttatttataggaatgaagaagatttaaggagaaaaaaaagtaaggtttaggggaattggtaaagaagaagaaagtaggagttggagttttataagaaggagtggagggtagggtttagaagtaggatagaagagtaattattatgttttttttgaagtttatttatttttatttttttttgtttgggatttgtttgtataaagtaggttaggagaaggggaagtagatggatgatttttaattgtgtagttatgattagtgtttgtagattgttagtttgggggtttgaggtttttgtttatttttgtagttttttggtattttggtagggatttagtttaagtttttataggttagttatagggttgtaaggatttttgatgtatgaggttggggtgaggattatagaatttaaattatattttgttttatatatatttttgtgagtatttagtgtttattattgtaatgaggatttgggatttataagttttgggaaaattataaatgggtgatagtaagttttttgaggtttttaaatatggttgtttgtttttttttaatgtatggaagtgtttagatgttgatgtaattttttagtaaagttattgtaaaagggttggtttagatattttaaatgttatttttaatattatttgagtttaaaaataaattaaagaatgggttggttatttaggattttttaaaaagagttaggaggaaattggtttgaggaggggaaatagttataatgtatgtgaaggatagtaaattaatataaatttttagaaatgattttaagtgtttatatattagtaagaaaaaattattagattaatagaaaaaaatgggtatgaggtagaaaattaaatggtatttgtggtaggatatagtgtttttttttattaataattaaagaagtataaatatgaaaagatatattttatatttattagattggtaaaagttaaaaggaatggtgatttttagtttgggttttgtttggtataggagttttttatatgatgggtgggggaatggtgaatattaatgttgttaattttttggataataatttgatattttgaatgtagtgttttaaaaaagtaaataatttttaaaaaataatatatttataaaaattgtaagtattttttttttttttttattttttttaatttttattttaagtttaggggtatatgtgtaggtgtgttatataggtaaatttgtgttataggggtttgttttataaattattttattatttaggtattaagtttagtgtttagtagttattttttttgattttttttttttttttattttttattttttaataggttttagtgtgtgttgtttttttttatgtgtttaggtgtttttattatttattttttatttataagtgagaatatgtggtatttggttttttgtttttttattagtttgttaaggataatgttttttagttttatttatgtttttgtaaaggatatgattttgtttttttttatgattgtatagtattttatggtgtatatgtattatattttatttagtttattattggtgggtatttaggttgattttatgtttttgttattgtgaatagatagtggtaagtat

SEQ ID NO: 2404 - DNA, 2464 bp, Artificial Sequence
  chemically treated genomic DNA (Homo sapiens)
tattgttttttattatttttagatgaggttattaagttgtaggaaaataagtttagggtttttattgattttatattatgatgatttgtataattgttttattatatattataatgtaataataatagaaataaagtgtatgataagtgtaatgtatttaaattattttgaagttatttttttttattggtttatggaaaaattattttttatgaaattggtttttggtgttaaaaagatttggaatagttgttttaatttttttattatttttatttattttttgtatgttgttttgggttaagggttgtggaaatgtttatggggtttttgttttattattttaaattatgtgtaaattttaagaaatttgtgagataaagtatttggttagtgggaaaaaaaaaattgataatgtttttaatattaattggagtgatagtttggtaattggttttttgagaaagttttagtatattttgaaaattggtaggtagttttagagtgagttaattagttaggaatgatttttaatatttattatttttaatagtttatttttggagaaaagatagataatgaatattgggaaatttatggtgttgtaatttgatttttgtgttatttgggggaaatgaggaagatgagttataatttattatttaaagttttttttttataatgtgttgttgtgaaagatttgataaataatgattgtttttttagggattaatttaattaaagaagtagaaaataggaagaatagaaaatttgtgtgattaagtaatgtttaattttatttgaaattggttttattattttggtgataggaatagaaggttttatggagtttttttatagtaagaaattaggtttgtaatagggtgtaatagagtgatattttatatttgatgttttgtaaatgtagagtttgtaaatgttttttttttgatgtttttttaaggtaagttataaatgaagttttattgttttaaaaaagtagtttgttaatagttgtttaggttttttatgggattgtgttttattgagtatttgaagaaagtatttattggaaatgggtttttttgggagattgtttggattttgagtgtttggtgtttatgtttttatatttggttgttgttttttgtttttttttggttgtaggtgtgagtgtttgtttgtttaaattttgtttagtattgtttggaaaaataaaataatatggttatttgtttgggtattgaatgttttttttgaattttggttttgtttattggtttagaggtggaatgggtggggtaagttttggtgtgagtttgggaagttttgagaagatgttatgggttgggtttgttaggttggggttgtttttggttttaatttttttggaatgttttgagggttaggagtgttgttattgatggttatgggagttgttaggttgtggtttttttttttatagagaatgttagaggtatttgggaaggtatttgttagggttttgatagatgtaaagtaagttttatttatgttgtgtttttatttggatatttggaaggtgtttagtatagaaaagttatgagttagatgagatattagtttgatgttgattttttttttaataatggttgtttgtttttgttttgatgtttgttagtaggtaaagggggtgtgtttttgggatttgggtagtagtagtttttgggaaatttagggtttgttatttgtggttatttgatttttggtaaattatttaatttttttattttatattttaaggatagtaaatttatgtagtagttaggttgttagaagaaatgatgttgataattaaatgtgaagttttgatatggtttttttttggtattatagttatttgttttttaaagaattggtataatgttgggggtagaaaaattatattatgtagtgatgttgtttagttaggtatataggtagagaagagttgtttttatttttagttttttaggtttgtttagggttgtttagtgtggttgattttgttttgtttattgttatgtaatttggaatttataatattattgtatgatgtgtagatttggaatttattgtagtattttttttttgaaggttgtattgtgtagtagtttttaaatttgagtatgtattagaattttttggtggtagtgttaaagtagattgttggattttatttttagagtttgattttataggtttggggtggggtttaagaatttgtatttttaatatgttttgaggtgttgttgttgttattggtttagggaatatatttagagaattattgttttagtgtgttggaaggagtaggagttttggagttaagtagatttaaatttagttatggtatttatttaatgttgtgattttgagaggttttttttaatttttttaagttttagtgaatttgtttgtaaaatgggaataatatttattttaa

SEQ ID NO: 2405 - DNA, 2464 bp, Artificial Sequence
  chemically treated genomic DNA (Homo sapiens)
ttgaagtaagtattatttttattttatagatgagtttattaagatttggggaaattaagaaaaattttttaaggttataatattaagtaagtgttatagttggatttaaatttgtttaattttaaagtttttgttttttttagtatattagagtagtggttttttaagtatgttttttgaattagtagtagtagtagtattttagaatatgttagaggtgtaaatttttaggttttattttagatttatggaattagattttgagagtggggtttagtaatttgttttaatattgttattagggggttttgatgtatgtttaagtttggaaattattgtataatatagtttttaagaaaaagatattatagtaggttttaggtttatatattatgtagtgatgttgtaggttttaggttatatgatagtgagtaagatagggttagttatattgagtagttttggataaatttaaggagttaaggatagagatagtttttttttatttgtatgtttgattgagtaatattattgtatgatgtggtttttttgtttttaatattgtattagttttttaaagagtaagtagttatgatattggaaaagaattatattagagttttatatttggttgttaatattattttttttaataatttaattgttatatggatttgttgtttttgagatgtggaatgaaaaggttaggtaatttattaagggttaagtgattataggtgataaattttgggttttttaaggattgttgttatttaggttttaggggtatattttttttatttgttggtaggtattaagatgaagataggtagttattgttggggagggagttgatattaagttggtattttatttagtttgtgatttttttatattgagtattttttaggtgtttaggtgagaatataatatggataaggtttattttatatttgttagagttttggtaaatgtttttttgagtgtttttggtattttttgtgagaaagagagttatagtttgataatttttatagttattaatggtaatgtttttgatttttaagatattttaaaaggattaaaattaagagtaattttaatttaatagatttagtttatagtgtttttttgaaattttttaaatttatattgaaatttgttttatttattttgtttttgggttaatgggtaggattaaaatttaggaagaatatttaatgtttagataagtaattatgttgttttgtttttttaagtagtgttgagtgaggtttaaataaataagtatttatatttgtagttaaggaagggtaagaagtagtagttaggtgtgggaatatgaatgttagatatttgggatttagatagttttttaggagagtttatttttagtgaatattttttttaggtgtttagtgaagtgtagttttatggggagtttgggtaattgttggtaagttatttttttaaagtagtaagattttatttatgatttattttgagaaagtattaaaagagaggtatttgtagattttgtatttatagggtattaggtgtggggtgttattttattatattttgttataagtttggttttttgttatgggaagattttataggattttttgtttttattattagggtggtggagttagttttaaataaaattaaatattgtttagttatataagttttttattttttttgttttttgtttttttgattaaattagtttttaaaggagtaattattatttgttaaattttttataataatatattataaaaggaggattttaaataataaattatgatttattttttttattttttttaaatggtataaaggttaagttgtagtattatagattttttagtgtttattatttgttttttttttaagggtaggttattaaaggtagtgagtattaaaagttatttttaattaattagtttattttggagttatttgttaatttttagaatatgttgaagtttttttagagagttaattattaaattgttattttagttaatgttaaaaatgttattaatttttttttttttattagttaaatattttattttataagttttttaggatttgtatatagtttgagatggtagaataaagattttatgaatatttttatagtttttagtttaggataatatataagaagtgagtgaaggtggtgggagggttagagtagttgttttaaatttttttggtattagggattagttttatggaaaatgatttttttatggattagtgagggagggtggttttaggatgatttaagtgtattatatttattatgtattttatttttattgttattatattataatatgtaataaaataattatataagttattataatgtagaattagtgggaattttgagtttgtttttttgtaatttgatggttttatttgggggtgatgggagatagtg

SEQ ID NO: 2406 - DNA, 2499 bp, Artificial Sequence
  chemically treated genomic DNA (Homo sapiens)
atgattttatattttgtttttttaggaaaaagaatgtttaaaaaattaaaatatgaagaaatttgggtataaattattgaaggttttagagtttgttgtatttatttaaatattattgtttttatatatgtataattattttttttgagtttaaaaaatgggtggaaaatttaatttttttattttaatttgagattttttttataaaagtttattgaagaaattttttttatttttgggtagtaattaaggaatattttagttaagtttttaaagagtgggtttatttttttaattgtattttaatttatatttatttttggttaaaataaaagtataaataagatttttttaatttaattataagttagatttgtagtaaatttttttgttttagattatttttttttttatagtttttagataaattgattttgatttagttagtaatttaatgaaatttattagttgattgtaagaagtttgtttatatatattagttatttttttagtaaatatttatggaaaataaaagtaatgttttttttataaataaattttattttttttttgtaatttaaggtgggttgttagattggttgtataatagatattggggagtttattggttgggagttttaagaggagagtagttattttagttttttttatttaattttggttttatgttagaagttgtgtagtagtgtagtagaatagggtttggtaaaatttttgttagtaaagtgttttttgtgttgggttgtggtttgttattgatattttgtttgttattaaggttgggttttttattgatttttttttttttttgtttttataggtttgtgtggttggatattgtgggtgtgtgtgttggattttttttggatgttttttgattaatatggatgttttattattttttgtagtggaaggttgttttttggtgtagtgagtgaagaatatgtagtgattgttaatgggtttgggaagtggagatttttttttttttttatgattatgttgtgattgtgtttgtggttattatttgatgtatttttatttttatttgaatttaggagttgaatgttagattggggaagtgggtgttgtgtgtgtgggtatagaaatattatgaagattatttttttgattttaagtaatttagtttttaggtgtattgttaaatttttgttttgtttattgtggattggatatttttaaggaattatatatgtattaagatttggtaagattttttattttttttggttgtttggtatttgtttttaggtagttggatgtaaataggtggtttgttttgtttggtggtgggttttgtggattttgatttgtttattgttttgttgttttttggggtttttaaagaattttttgtgtttttatttttttttttttttatttttatttttagttgtgggagggtgaagggagggttaatgtgtggtagtggtttttgtattatttttttatagtagtttgttatggagatgatgatgatgatggaggtatggttagttgttatttttgtttgttttttttggtgttttgtgagtttggaggggtgtgtggtttgtgtaaaagtgtgtgttggggttgtatgttttttagtttgtggggttggtgagttaatatttggtaattttttggtgagttgtgtttgtttgtttttgttagtgattagggtagtttttatgtgtaaatgaaaggtattaatttttttgatttttttttttagagagtttttttgattgtttttattgtttttttagtttttggtgtttttattgggatgtagagttttaaaaaatgttttaagatttgaggttttatttaatatagggaggttgttatttagttggaatgaaatagtgttaaaattagaatggtattttgtttgtttttaatttgttgagttttttttttatagttttttggatgttatggattaattaatgaaggatagtatttggggtggtggggaagagtagttgtttaaggagggttgattaagtttgtattttttattttggtaagatgaaagatgttaggtagttatatttttttatggaaatgtattgtttttttaagaattagggtttttttggagtttgaaggaaaatttaaatgtgggattttagtggaaattttggttagagggttagagtgattgtttggagaaaatgaagtgtgggtgatgtttaggttttttggatggttaaaggagttttagtaggagtagaattagttagggaaagttttttaaagtagataagaggaagaaaggagaaagttaataggataaatgtttttattgtaggtattttttttgatagtttaagtggatttagattaaagagtgtaggatattatgtaattttgagtatttgtttttgagataaaagtagatatattaagttatttggttaaatttaaattgaagagtgattgtttgtattttttattatgttaatagta

SEQ ID NO: 2407 - DNA, 2499 bp, Artificial Sequence
  chemically treated genomic DNA (Homo sapiens)
tgttgttggtatgatagaagatgtaggtaattattttttagtttaaatttgattgagtgatttaatgtgtttgtttttattttaaagatagatgtttaggattatatggtgttttgtattttttggtttgaatttatttgaattgttagaggaagtgtttataatgggagtatttattttgttggttttttttttttttttttttatttgttttagggaattttttttgattagttttgtttttattaaaatttttttggttatttagagaatttgagtattgtttatgttttattttttttaagtaattattttgattttttgattagggtttttattggaattttatgtttagatttttttttaagttttaaagaaattttgatttttagaaaagtaatatatttttataaaaaaatgtaattatttaatgttttttgttttgttaaagtgaaagatgtagatttagttaattttttttaaataattatttttttttattgttttagatattattttttattaattagtttataatgtttagaaagttgtgagagggggatttagtaagttaaaaataaataaaatgttgttttaattttgatgttattttgttttagttaagtagtagtttttttgtgttaagtagaattttgaattttagaatattttttaaagttttgtattttagtaagggtattagggattggaaaagtggtgaaaataattgaaaaggttttttggaaaaagaaattaaaagggttagtattttttatttgtatgtgagaattgttttggttattggtggaagtggataggtgtaatttgttaaagagttattaggtgttaatttattagttttgtaagttgagaggtgtgtagttttggtgtgtatttttgtgtggattgtgtatttttttaagtttgtagggtgttgggggagataggtgggagtggtggttgattgtgtttttattgttattattatttttgtggtaagttattgtggggaggtaatgtagagattattattatatattggttttttttttatttttttgtggttaaaaataaaaataaagaagagaagaaatgaaagtataaggagttttttaaaagttttaggagatgatagagtagtgagtagattagaatttatggagtttattgttaggtagagtgaattgtttgtttatatttggttgtttgggagtggatattaggtaattaagagagatggggaattttattaaattttaatatatgtgtggttttttgagaatatttaatttatagtaaatagagtaggagtttaatggtgtgtttgaagattggattatttagaattgggaaaataatttttatggtgtttttgtgtttatatgtatggtatttatttttttgatttagtgtttggtttttgggtttgggtagaaatgaggatgtgttgagtggtgattgtagatatgattatggtatggttatagagagaggaaggagtttttgttttttaaatttattagtaattgttgtatgttttttatttattgtgttaaggaataattttttattgtaaggaatggtgggatatttatgttagttggagagtatttgggagaaatttagtatgtatatttataatgtttggttgtgtgagtttgtgaaagtagaggaggagggaaattagtaggaaatttagttttggtaatggatgagatgttgatagtgagttatagtttggtataaaaggtgttttgttagtaaaggttttgttaggttttattttattgtattgttgtatagtttttgatgtgaagttaagattaagtgagaaagattgagatagttgttttttttttaaggtttttggttagtgagttttttaatatttattatgtaattgatttgatagtttgttttgagttgtaagaaagaagtaggatttatttatggggagaatattgtttttattttttatgagtatttgttgagagaatgattggtgtatgtaagtggattttttataattaattgatgaattttattaaattattagttaaattaaagttagtttgtttgggaattgtaaaaaagaaagtgatttaagatggaggaatttattgtaaatttaatttgtggttagattgaaagagttttatttatatttttattttgattaggaatgaatatagattggaatgtaattggagaggtaaatttattttttaaaaatttgattggggtattttttgattgttatttagaagtaggagaaatttttttagtgaatttttatgggagaaattttaaattaaaatggagaagttaaattttttatttattttttaagtttaaagaaaataattgtgtatatataaaaataatgatgtttgaatgggtgtagtaaattttaaagtttttaataatttatgtttaaatttttttgtattttggttttttgaatatttttttttttaaagaggtagaatatgagattat

SEQ ID NO: 2408 - DNA, 2422 bp, Artificial Sequence
  chemically treated genomic DNA (Homo sapiens)
tatggtgtttttgaatttattattttgaaggataggtttattgtttatttagtgttttatttttggagtttttaaattttttattatgatgtagaataaattttggagtaattttgtttgataatagaggattgattgtaattgtttgaaaggatagagttttataatatattttttgaaatgtttttttatgaaggaaaagttgatagggaatttgagttaaagtagataaaatagaataaaataaaattaaaattaaaaaataggtgttaaaaggatgttttaaataggttgaagtattaaattattatagagagtagttttagtttattttgaaatttgtttttatttttttattattttttatatattttgttttgttgtaaaatatagggagaattatttattattaagttgtttaattaattttttttaaggtatgtaatattttttaaagaaatttgaaagtatttgttttattgaaaaaaatgagatttattttttatattataattttgtttttagtgaaaaagttaggataatgaagaataaaatttatttttgtgaaggaaaatatttttattttatggtatttttaaatattattttgttaattttttatggaataaagttgataatattttttgaatatatatttgtatgtttttatagttttaatttgttatatttttgttttttttttttaagtaatattttgaaaaatttataaagtaatataaatatatttatagtattaggttgtaaattggaatttggaagtgttagatttgttgattttatttgttatttgattattatatttgttttttttaattgatttattaggtttgtattttagagtatattttattttgttgtaatagttattaatgaattttttgattgtggatttttgttatatatatttgtattggtttagggagtttaatttgttggaatattttgttgaagagtttgtttttatatttagggatatttattattatttaaggttagttgtttgatttttttttagtgttttgtttatagggtttgaatatttataaatggaaatattagttaattagaaattattgttagggttttttgatagtgttttaggtttttataatttggaatgttttgtaatatttaatatgtaagtatgttgaattattttttagatagaatttgaatttttgtgttttttagttttttttttttttttatttttttttaatatggaatttgaaaagtgtgaaaaaagaagtttattaaataagaatttagaggagaaattgatggtaagatatgagatttagtatatatagatttataatgaaattgatagggtagtagagtaattgttatagattggaaaagttgtgttagttggtttttgtttttatgttttgttggttaataattttaaaattaatgagttttatgggtttttttgaaaataatgtaataaagttatatataaaatgttattatataaatgagggtaaatttgatttagttaaatgatgtggtttattgttattttaaaaattggaatttatttattttgattttttattgtgattgttttagtattggaagattgttttatttatgtatgtgaagtttagtgagtgtttaaatttatttttttttagagatattaggaatatatgttaagaaaaataagtattatagaatatattaatgttttattaagtttaatgaatttttggtataaggataaagttttttgttatagaagttatataagtaattttgttttgatattaagtaattaaatgttaatgattaatatggtgatttatatttgtttaaatataaaatagattataattttgagttaaatgtgttgtttatggtttatttgatgagtataggttattaattatgtttgtaaatttattgtggttatagagttaatattggaataggttataattaatgttaatattagtataaataataaaaagtaagataatatagtttataataagattaaatttatgggaatatattgttttagatgtatgaagttgaggtttatggattatttaagatattaaaattagaaaaatggaaaaaagaattatattgggttgaaaatttttgaagtgtattagaattttaaggttttaaagtaatatatttaataaaatatataatttttttttaaaggaattaggttattatttttagtatttattttgtatttttgttttaggtgattgtttagatatgtaatggttatagagtatttttttttttgattatttggaaaggttatgtgtttttgtagagttaattagggattttgaattagaaagggtttggtgaaaatttttgtttataattattaaatataagattatggttttgtttaatttttttgagtttt

SEQ ID NO: 2409 - DNA, 2422 bp, Artificial Sequence
  chemically treated genomic DNA (Homo sapiens)
gagatttagaaagattaaataaaattatggttttatatttggtagttgtgggtaagaatttttattaagttttttttgatttaaaatttttggttagttttataaggatatatggtttttttaaatagttagaaaggaaaatattttgtggttattatatgtttggataattatttagggtagaggtataaagtgggtattgaaaatgatgatttgatttttttaagaaaaggttgtgtattttattaaatatattattttaagattttgaaattttaatatattttaagagtttttaatttagtatggtttttttttttatttttttagttttaatattttgaatagtttataaattttaattttatatatttagaataatgtatttttatgaatttggttttattatgggttatattattttattttttgttatttatgttgatattaatattagttatgatttgttttaatgttaattttataattatagtaaatttataaatataattagtgatttatgtttattagatgagttatggatagtatatttaatttaaggttatagtttattttgtatttgagtaaatgtaagttattatattaattattgatatttaattgtttagtattaaggtaaaattatttgtataatttttatggtaaaaaattttatttttatattagaagtttattaaatttaataaaatattaatatattttataatatttattttttttggtatatatttttggtatttttgagaaaaaatggatttgaatatttgttaagttttgtatatgtaaataaaataattttttagtgttgaggtaattataatgagaggttaaaataaatggattttagtttttaaaatgatgataaattatattatttaattaaattaaatttgtttttatttgtgtaatggtattttatatataattttattatattatttttaggaaagtttatggaatttattaattttaaagttattgattagtaaaatatggaaatagaggttggttagtataatttttttagtttatgatagttgttttattattttgttaattttattataaatttgtgtgtgttaaattttatgttttattgttagttttttttttaaatttttgtttaataagtttttttttttatgttttttaagttttatattgaaagagaatgagaaagagagaaagattgagagatatagaggtttagattttgtttagaaaatgatttgatgtgtttatatgttagatattgtaggatattttaagttgtgagagtttaggatattattagagagttttagtgataatttttggttagttagtgtttttatttatagatgtttaaattttataaatagagtattgaagagaagttaggtagttggttttagataatgataaatgtttttagatataaaagtaaattttttagtagaatgttttaataggttaggttttttgaattaatatagatgtatgtgataaaaatttatgattaaagaatttattaatagttgttgtaatagaataaaatatattttagaatatagatttaataaattagttaaaaagaataaatgtgatagttagatagtaaataaaattagtagatttagtgtttttaaattttaatttgtaatttagtattgtagatatgtttgtattattttgtagattttttaaaatgttgtttaaagaggaagagtaaaagtataataaattaaaattataaagatatgtaaatatatatttaaggggtgttgttaattttattttatggagagttgataaaatgatgtttaaaaatattatgaaataaaagtgtttttttttataaaaatggattttgttttttattattttggtttttttattgggagtaaagttatgatatagaagataaattttattttttttagtggaataagtatttttagatttttttagaaaatgttatatgttttaaagaaaattaattgggtaatttaatggtaaatagttttttttgtgttttgtagtaaaataaaatatgtggaaggtaatagaagaatagaaatggattttagagtaaattaagattgttttttatggtgatttaatattttagtttgtttaaaatatttttttaatatttgttttttggttttggttttgttttgttttgttttgtttattttaatttaaattttttattagttttttttttataagaaaatattttagaaaatgtgttgtggagttttgtttttttaaatgattgtagttaattttttgttgttaggtagggttgttttagaatttattttgtattatgatggaaggtttgaagattttagaagtgaaatattgagtaggtaataaatttattttttaggatgataaatttagaaatattata

SEQ ID NO: 2410 - DNA, 2662 bp, Artificial Sequence
  chemically treated genomic DNA (Homo sapiens)
tatagtatatttatttgaaaaataatggttatatatagtaatatttttgtttatagaaattttaaatttttttttattatgggttttatagttatttattattttttatttttttttatagttattaaatatttttagttttttagtattttttttgtaaaattgagaggagggaatttgttatatttatttttgtagtaggatgttgatttgtaaatgaagtgttgatgtattgttgatgttatttatttaataaaggtataatagatattagtagggtagataggtattttaagaaaatggtttgatataagagttgaaagaatttgtttagaattttagaattattaaagggttttatgtttattttattttgttagggagaggatatttttttttgtttagagtatgttttaattatttagagttaaaatggttgttttagtttagtaaatgggaaataaatttgagttttattgaaatgggttaagggttttaatttttgtttagtgtgttggttatattgggaaggaatatttgtttagttataatagttaagagtattggtatgataaatttgggtaggttttagagtgtttgtttatagttagtaaggaggatttaaaaaagatgtagaaagttgtgtaaataattgtaattgtattgatatttttatttatatgtttagaagagatatatttgaagaaaattttttttaaaatagttttttagttgagattatatttttttagtgtgtagtttataggaagttttagttgttaagagtatgtttgatatgagtagatttttatttaatttttatgtataatgaatttaatttttattttttttagaaagatattgaaaatatgtgttgtgattttaatgttataattatgtagttttattttttataatatggtataattattaatgaagtttaaattttatgtttggtatttaaggtgaatatttttatagaaagtaggaaatatttagatgtttgtttgttgtggtggtggtgtttttatatattttttgtgattttaaagatataataatgtttgatatttttgttagttagtaatgtggatttaagatattttaattatattgttgattttaattttttaatagatttttatgtagtttttgagttttattgtaggttttagtgttagttttggaggaaattagaaaagggttgaaattattgatatagttatttttttagttttttttaatgtaggtgtatagttttttgtagtgagtagattggggtttatagggatattgtatgtttgtattgggttgttattagttttatggaaatatgtattaattgtgttattgtgtttttttgttatattgttttttttttaggttgttttggtattgtttatttaaattgtgtaattatttggtttaggtgttgtagagattgattagtagtataaggttattataagtataattgttatttggttattttagttattttttttagtattttagatattatggtgtttgagggtgggtttaatgggttttgagtgtttgggagataatgtatattttgtagtggatttttttggggttttgagtgttgtttgtttattaggtggtgttggtttttttgaataggttgtttaataatttttgtttagtagttgtttttattgtgtgtgtgtagattttggtgtttatttttggtgtggtttaggtggggtttgtagaattagttatgttggtttatggtatgtttatgtataagagtggggatttggtgtttgttaagttaaagggttatgtttattggttggtgaggatagagtatatgatttagtttaattgttattaggtgtttttttttgggatttatgagatggtttttttgagttttaaatgtttgtttttgtataaggagtgtaaggagaagtttggtaagtttaataagaggtgtggttttagtgtggggttgtgggaaattgagaataattttatggtttaggtttttgattgtttattagttttagagaagggtagtggagatgggttttggttggagtttgaggttgtagagggtgatgaggataagttgatttatgttggtggtggtggtgatgaattggggaagttggatgatgataagtttattgaggaggagaaggggttgttgaagaggagtgtgggggatttgttggaggatgtttttaaatgatttaaggaggtagtttttgattaagaggaggaggtggaggtggagagggtggtggaagtggagagggtggtggtggtggtggtggtgatggttgttgatgaggagagtttgttttttgtggtggtggagaatggtagtgtttttagtgagttgggtttggtttgtgagttgttttagttagaggaggaggagttttgggaggaagaagttgtggatgaggaggttttttaggagtggtatgttgaggtattgggtggtggagattgtgatagtttgtagttattagtgtttttagaagagtttttgttttgtttttgttgtggtttggttgtttttggggaatttgattatggtgtgtaaattgggattgtttttttttttttttagtttgtttttttttaatttgtgtttttttgttttgttgggttttaggatggtagg

SEQ ID NO: 2411 - DNA, 2662 bp, Artificial Sequence
  chemically treated genomic DNA (Homo sapiens)
tttgttattttggggtttggtagggtaaaggagtgtgggttggaggaggatgggttgaggagagggaaaggtagttttagtttgtatgttgtggttagattttttaagaatggttaggttgtagtaggaatggggtaggggtttttttggaaatgttggtaattataggttgttgtgatttttgttgtttggtgttttggtatgttatttttgggaggtttttttgtttgtgattttttttttttggagtttttttttttttggttgaggtggtttgtagattaggtttggtttgttaggggtgttgttgttttttattgttatgaggaatggattttttttgttgatggttgttgttgttgttgttgttgttgttttttttgtttttgttgttttttttgtttttgttttttttttttggttgggggttgtttttttgggttgtttgggggtgttttttggtgggttttttgtgtttttttttagtggtttttttttttttttagtgggtttgttgttgtttggtttttttaatttgttgttgttgttattagtgtgggttggtttgtttttgttgttttttgtggttttgggttttggttaaggtttgtttttgttgtttttttttgaggttaatgggtagttggaggtttggattgtggggttgtttttgattttttatagttttgtgttgaagttgtgttttttgttgggtttgttgaatttttttttgtattttttgtatgggaataggtgtttgggatttaggaaggttgttttgtgggttttgaagaaaaatatttggtagtggttgggttgggttatgtgttttatttttgttggttagtgggtatagttttttaatttggtaaatattaggtttttgtttttgtatatgggtatgttgtaggttgatatagttggttttgtggattttgtttgggttatattggaagtagatgttgaagtttgtgtgtgtgtagtaagggtggttgttgggtgggagttgttgagtgatttgtttgaggggattggtgttatttaatgggtgggtaatgtttggggttttgagaagatttattgtgaagtgtgtattattttttgaatatttgaagtttgttggatttatttttggatgttatgatgtttagaatgttggaggaaatagttgggatggttgggtggtggttgtgtttgtggtggttttgtgttattgattaatttttatggtatttgggttagatggttgtatagtttaaataaatggtgttagagtggtttagaaagggggtagtgtgataagaaaatatagtgatataattagtatatatttttatgaaattagtaatagtttagtgtaagtatgtagtgtttttgtaggttttgatttgtttattataggaaattgtatatttgtgttaggaggagttaaagagatggttgtgttagtggttttaatttttttttgattttttttgggattagtattggagtttgtagtgaggtttaagaattatgtgaaagtttattaaagggttagagttagtagtgtggttaggatgttttaagtttatattattggttaataaaaatgttaaatattattatatttttagggttataaaaagtatataggaatattattattatggtaaatagatatttaaatattttttattttttatggaaatgtttattttggatgttagatatgaagtttaaattttgttggtgattgtattgtattgtgaaagatgaggttatatggttgtaatattgagattatgatatatgtttttagtatttttttagaagagatgaaaattgggtttattatgtataagaattaggtagagatttatttatattgaatatgtttttggtaattagaattttttgtgagttatatattaaaaaagtataattttagttgagaaattattttaaaaagaattttttttagatatgttttttttaaatatatgaatgaaagtgttagtgtaattgtagttgtttatataattttttgtattttttttggattttttttgttagttgtgagtaagtattttgaaatttatttaaatttattatattggtatttttgattattataattagatagatgtttttttttagtgtaattaatatattagatgagaattagagtttttaatttattttagtaaaatttaaatttgttttttatttgttgggttggaatagttattttaattttgaatggttgagatatgttttaggtaaaaggagatattttttttttaataaggtgaaatgaatatgaagttttttgataattttaaaattttaaataagtttttttagtttttatgttaagttatttttttagaatgtttatttgttttgttaatatttattatatttttattaaataagtaatattaataatgtattaatattttgtttataaattaatattttgttataaagatgaatatgataagttttttttttttagttttatagggaaagtgttagaaaattagaaatgtttagtggttgtagaagaaaataggaaataataggtagttatggagtttataataggaaggaatttggaatttttgtaagtagagatattgttatatgtggttattattttttaggtaagtatgttgta

SEQ ID NO: 2412 - DNA, 5352 bp, Artificial Sequence
  chemically treated genomic DNA (Homo sapiens)
aatataagaagttttgagttttttgaagttgggtattaaagttaaagatttattttttgtattttttatggtttttttttgtagtttagtttggttttgagtttttgaaatgttttttgaggtgggggtttttttgttaaggggtgataggtgggttattttgaggtgggaatgattaggtaggtgttggttggtttttttttgggtgagtagttaggggaattgtttttttaggggatttagatgatattaaattattttattatataaattttttgtggaggtttgtttttaggagggtaattattggattaatttaattatgtagataggtaatatggattattttgtttttaaaataattgaaaattaaatgttttttttgtttattgtagaaatttttttattaaggatggggttgaattggagggattgtgttgataaattttttatttgaaaattttttagttaaggagtatttgtttaaggttgtggttatttagatgtttggtttttatttttttttttgttgaaaagttgtattgatgattaatgttgtttgttggtttggtggtttgaaaatgaatgttgggtattgatgtaaggatatttttttttatttttgggattttggtttaagtaaaggaggttgaatggagaattaagataattatttaagtaatttaaaaagtttaaagatatttttaagtggattttgttttagtggtttgtgatggtagtttagtggatagttttttagtggttttttggggttaattgttttaattttttattttgtttgttttagtaaagggaaagatgttaaagtagttgtggatttgtagttttttttttgtgtgtgtagagtttttaggaattattgttttagtgtagtaggagaagtgtttttttttatgttttaagtttgttttttttgttgttttttagtttttgggttaggtggagttttttttgaagttggtttttatttgtttttgtttttttattgtagtttatagtttggtttttagggttgaatttagagtttagaggatggagaagttagaaagtggggaggtaagggagagggtgtttaggtatattatagaggtgattgggttgtgatggggataatttgtataatatgagttaagtttatatttttagggagtgatttttttggattgtttttattttaatttttattttttttgttttatttgaaaaagaaaaagaaaaaagagagttttttttggtttttggtgatttatatttaggatattattttattttttagtatatatatttttatagtgttatttggtttttaatttgagtattttttggagtgtttgttatatttttttttttggtgtttttttatggtggggttaggggaggttttgttttgaatattgttgtgatgttatttttttttttttgagttaagtattttttggtgggttttgggaattgttgtttggtttgttggggaggggtggagtgtgggtttagggagggttttattaaatatttattattgttgttgtttgtggggtttttaggttgtaagtatgtgaggtgttagaaaagaagttgaagggtttttgtgggggtttttttgttaaatgagttaagagatgtgtggaagtggatgattgaagtattttgtggagtagtagaaaggggtattaaaaattgtaatttgaaaataaaagttttaatttgttttttaaaagattttatgtttgtgttttaatgtttaaataatattattaataataaaaatgaaataagaaaagtgtttgaaatataattaagttgtttattggaggtttgtttttgagtaagtttataaaatataaatgtaaatatttttttttggtgaatatttagagttaaattagtggaaagttgattttgataaaattatgtttttttatttttttttgtatgttagatattaattttataatggtgatttttatatttaaaatggagagttgagaatattgttgtaggttgatttgtaatttatataataagttgtttatattttattgggttgatggagggaggaggtagggaagagtaggaggtgataggttggtgggggagggggtagtggggtattattgtttgttgtaaaatttggggttgaaggtgttttttgtatttggaaaataaagtatttgtaattgttgtgtttatttttgtgtattgttagtagtgtaaaaggtagttttaagattgaatttattatttgttgaggtgtttagggagattatttaaattttttttaggttgaagttatagtattttttaaagttttgattaggtgggttgataagatttttagggtgttgggttgggggttgaataggaattaagtgtttaggttttggggttttattattatttttgtttttgtttagtgtttttggtaattagtaagtgttgagttttttgttggtgtttttttaatttattagtgatttggtttgtaaattatttggaaaaggagtttttagagattttggtgtatagtaggttaggaggtagttgttttgggatttagagtaattttggggtaatttttttttttttaaaggttaattttagaagaggtaggtttttttttttttgatgttaatgtttattatgaaatagtaatttttaaatatttaggtgatatggagatgtgtttgttatatgttagtgttttttatatgtaatagttgaagttgtaatttgaatttttttgttaatgtgaggaagttgggatttgaattggggagataaaaggggttttgaatatgtttttggatttaatagatggttggaaattaggggtagtggagttgttaaatgtgttatgtatgtttttttgtagttttttgagtttgttattttttttagtttttagtgaatgatttgggatttagtttttgggagggtttttttttaagttgttaaaatgtagaattgttgtgttgggggagggaggtttggtttttttttgtttttttgttttttttttttattttttttttttttgttttattttaattatttagtgatggtgaattttaggtgtgtgtataatgagtgggggtttttttgtgtgtgtttttttagaatttttgaattgttttttaggtgtgattttggatgtttttttagatatatttgttgtttttgtgagttggtagttttgtgtatgtggagatggagattggtttggggaagtgttaagtttttagatatatttatttgttttttgttattatatttgttaatgttattgagtttgtagtttgattttttatttgagttgaaatgggtttgatgggattagagggggtggtggtgtggtgagttggtgggatttttgtgggtgggtaggggagtgtggggtagtagttgggttttggtagtttttgttgtttgtatttttaggttgttaagggttggttttttggggaggggggtgagaagtagggtggtttgtagtggggtgggtttattttttgtgggtgaatggttgttggaaatttttagtagggttttgtattttttgtttttattttggttggggaggggttatggaggggggttagatgggtgatgaatttttttttttattgtgagtagggtttggttgtgattgagtttttaaaattatgttttttgtagttgagtttaggataggagaatttttaagtggagaaaagttggagatgttagtgatttgagtgagattggtgttggagaagggagggaaggggttgtgggaggggagaggtggtggggaggagaggttggggtaattttagtgttggtgttggtggggttggtgaaggaatgagagtgagttagtatgaggtggggtggagatgttagggttatttgggagttgtgggtgaaggaagggtttgtatggggttttgggaggatttaggaagtttgtgtgaatggtgggtgtgggtttggagggtttggggtgggaggtttgttgggtgttggtggtaggtaggtggattgtggggggtgaattgatggtgggttgggtgttggtgtgggtgtagggttggggtttgggttagggtggttggtgtgtgtgtggttagttttgtggttttttggtttttgggagtgggttggtagggtttggtttttggtttatttggaggtggtttttattttttattggttgttgttgttggtggggtggggttttgttgtttggaaaaaagtgtaattgtgtaaaaaagtttttgtttgggtgatggatgtttaaaagtttagaagtttttttaatgtttttttaagtggttggtgtgtgagagattgagaaaaggtgatgtggggtttgggtaggtggttggtgtgtggttttttttttttttgttttggttatttggttgtttttgttggtagtttagggtagagttttttggaaggtgtaggtagtgtggtgagaagggtgtttgtttgttttttttttttgtttgtttttttttgtttgtgtttggaagttgtgttgtgagtttttgtaaggtggtttgttgtggttgggtttggttttttttttttgtagtgattttgttttgtggttgtgtgggttttgaggtagtttgaggtgttggaggagttagttttagtgagtgttgggagaggtggtagtgtagttggatgtatagtgtagtgggttggtattagtttggttgggtttggatttggatttggtggttggtgtggtgtggtttggtttgagtgagggtggggggtggtgggtggtgtggggtggtggtgagtgggggttatgtaggtgtgttattttgtgtttagttttaattttttgggagtggtgttttattttggtggtgagtagagttattattgtgtggtggttgtggtggttgggggtggttatattgttatgttggtttttatgagtgtgtatttgtattttgtgtatgttgagtagtatttgggtggtatggtttgtgtttatgggttttatatgttgtagttgtagtttaaggatatggtgaagttgttttatagttatattgtgtttattattatggttatttagaatgttttggataagaagattattttgaatggtatttattagtttattatggattgtttttttttttattgggataataagtagggttggtagaatagtatttgttataattttttgtttaatgagtgttttgttaaggtgttgtgtgatgataagaagttgggtaagggtagttattggatgttggatttggatttttataatatgtttgagaatggtagttttttgtggtggtggtggtgttttaagaa

SEQ ID NO: 2413 - DNA, 5352 bp, Artificial Sequence
  chemically treated genomic DNA (Homo sapiens)
tttttgaagtgttgttgttgttgtaggaagttgttgtttttgaatatgttgtaggagtttgggtttagtgtttagtagttgtttttgtttggttttttgttgttgtgtggtattttgatgaagtatttgttgagtgagaggttgtggtggatgttgttttgttagttttgtttgttgttttggtagaaggggaagtggtttatgatgaattggtagatgttgtttagggtgatttttttgtttggggtgttttggatggttatggtgatgagtgtgatgtagttatagggtggttttattatgtttttgggttgtggttgtggtgtgtagggtttgtaggtgtgggttatgttgtttgggtattgtttggtgtgtgtagggtgtgagtatatgtttatgggggttggtatggtggtgtagttgtttttggttgttgtggttgttgtgtggtagtagttttgtttgttgttgaggtagggtattatttttagggagttggggttggatatggagtagtgtgtttgtatggtttttgtttgttgttgttttgtgttgtttgttgttttttatttttgtttgggttgggttgtgttgtgttggttgttgagtttgagtttgggtttggttgagttggtgttggtttgttgtgttgtgtgtttggttgtgttgttgttttttttggtgtttgttggggttggtttttttggtgttttgggttattttggggtttgtgtggttgtgaggtggggttgttgtgaggggagaaggttgggtttggttgtggtagattgttttgtaggaatttgtggtgtagtttttaggtgtaaatgggggaaagtagataaaaagaaagaataagtaggtgttttttttgttatattgtttgtgttttttaggagattttgttttgagttgttggtgaaggtggttaaataattagggtggggggggggggggttgtgtgttggttgtttgtttgggttttgtgttatttttttttggttttttgtgtgttagttgtttaaggaagtattgggaaaatttttgaatttttgagtatttgttatttaggtgaggatttttttatgtagttatatttttttttgggtagtggagttttgttttgttagtggtggtagttaatgggaggtgagaattgtttttgaatgagttggaggttgagttttgttggtttgtttttggaggttggaggattgtggggttgattatatgtgtgttggttgttttggtttgggttttggttttgtgtttgtgttggtgtttggtttgttgttggtttgttttttgtagtttatttgtttgttgttggtgtttggtagattttttattttgggttttttggatttatgtttgttgtttgtgtagattttttgggtttttttgggattttgtgtagattttttttttgtttatggtttttgagtggttttggtgtttttgttttgttttgtgttggtttgtttttatttttttgttagttttgttgatgttagtgttggggttgttttagttttttttttttgttgtttttttttttttgtagtttttttttttttttttttaatgttagttttatttgggttattgatgtttttggtttttttttatttggaggtttttttgttttgaatttggttataaaggatatgattttgagggtttggttatagttaggttttgtttgtggtggggaagaaggtttgttgtttatttggtttttttttatgatttttttttagttgaaatgaaggtaaggggtgtggggttttgttgggagtttttgatggttgtttatttgtgaaggatgagtttgttttgttgtgggttgttttgttttttgtttttttttttggggggttggtttttggtggtttgagggtgtgggtggtgagggttgttggagtttggttgttgttttgtgtttttttgtttgtttgtgagggttttattggtttgttgtgttgttgttttttttgattttgttaggtttgttttggtttagatgaggggttaggttgtgggtttggtgatattagtaggtgtgatgataagaagtaaataaatatgtttaagagtttaatgtttttttaggttagtttttatttttatatgtgtggggttgttggtttgtagagataatgggtgtgtttgggggaatgtttagggttgtatttagagggtggtttaaggattttggggggatatgtatggaagggtttttgtttgttgtgtatatgtttgagatttgttgttgttgggtggttggaatgggataggaagaagagaaatgagggaaagaaatgaaggagtgggaaagagttaggttttttttttttggtatggtgattttgtattttagtgatttgaggagagatttttttggaggttgaattttaagttgtttattagaagttgggggaagtggtgagtttaggagattgtgaagaagtgtgtgtgatgtatttaatagttttgttgtttttgatttttgattatttattaaatttaaggatatgtttgggattttttttgtttttttggtttgaattttggtttttttatgttggtaggaaaatttaaattgtagttttggttgttatatgtgaaggatgttgatgtgtagtaggtgtatttttgtgttatttgaatatttaaaaattattgttttataatggatattgatattgaaggaaagaggatttgttttttttagaattagtttttggaggagggagggttgttttgaggttgttttgaattttggggtagttgttttttggtttgttgtgtgttggggtttttggagattttttttttaggtggtttgtgggttaagttattggtgggttggagaagtattaataggaggtttagtatttgttggttgttaaggatattagataggggtgagggtggtggtgaagttttaggatttgaatatttaatttttgtttagtttttagtttggtattttgaaggttttattagtttgtttggttgaggttttaaggagtgttgtggttttagtttggaggagatttaagtggtttttttgaatattttagtaagtggtgagtttggttttgaagttgttttttatattgttagtggtgtgtggagatgaatgtagtgattatggatgttttgttttttgaatgtgggaaatgtttttggttttgagttttgtaataggtaatggtgttttgttgtttttttttttattagtttgttgttttttgtttttttttgttttttttttttattggtttagtgaagtgtaaatagtttgttatgtaaattgtaaattgatttgtagtggtgtttttagttttttgttttgggtataaaagttgttgttgtgaaattagtgtttggtgtgtgagaaaaaatggagggatgtagttttattaagattaattttttattggtttagttttggatatttgttaggaaaagatatttgtatttgtgttttataaatttatttggaagtaagtttttagtaagtggtttgattgtattttaagtattttttttattttatttttgttgttagtggtgttatttgaatattaagatgtaggtatgaagttttttggggaataggttaaagtttttatttttaggttatagtttttgatgtttttttttgttattttatggggtattttaattatttgtttttgtatattttttgatttatttggtagaagagtttttatgggaattttttggttttttttttgatattttatgtatttgtagtttgaaggttttgtaggtgatagtggtaatggatgtttggtggaattttttttgggtttatattttgtttttttttagtaggttgggtaataatttttagggtttattgaggggtgtttagtttggaggagggggagtgatgttatagtgatgtttaaaataaggttttttttggttttattatagaaaagtattaggaaggggaatgtggtgagtattttaggaaatgtttggattggggattaggtgatattgtaggaatgtgtgtgttgggggatgggatggtgttttaaatatgggttattaggagttagaaggagttttttttttttttttttttttttaagtaaagtagaggaggtggagattgggatgggggtagtttggaaaaattattttttaggggtgtgagtttagtttgtgttgtgtggattgtttttgttatagtttaattatttttgtggtgtgtttagatgtttttttttttatttttttgttttttggtttttttattttttgggttttgggtttagttttgaaagttgaattgtgggttgtagtggggaggtgagggtaggtagaaattagttttagggggggttttatttggtttaggagttgggggataatagaaaaggtaggtttagggtatgagggaaggtgttttttttgttgtattggggtagtgatttttgggggttttgtatatataggagggaggttgtaagtttatagttgttttagtatttttttttttgttggggtagatagagtggaagattaaggtaattaattttagagggttattagaaaattgtttattaggttgttattatagattattggagtaaggtttgtttggggatgtttttgagttttttagattatttagataattgttttagttttttatttggttttttttgtttagattagaattttaggggtaggggaggatatttttgtattaatgtttggtatttgtttttaaattattaggttggtaggtaatgttagttattggtgtgattttttagtggaggaaggagtggggattgaatatttgggtggttgtgattttgggtagatattttttagttgggggatttttaagtagaggatttgttagtatagtttttttaatttagttttgtttttagtagaaaaatttttataataaatgaaaagagtgtttggtttttgattgttttaaagataaagtgatttatattgtttgtttatatggttggattaatttgatagttgtttttttgggggtagatttttatgggaagtttgtgtgatgggataatttaatgttatttaagttttttggaggggtggtttttttaattatttatttaggagaaagttagttaatatttatttgattgtttttgttttgggatggtttatttattgttttttggtaggaaagtttttgttttgaagggtgttttgggggtttagagttgagttaagttgtaagagggggttatggggaatgtgggaagtgaatttttaattttggtgtttggttttaaaagatttagggttttttgtgtt

SEQ ID NO: 2414 - DNA, 2428 bp, Artificial Sequence
  chemically treated genomic DNA (Homo sapiens)
tatggaatattatttagttataaaaaagaatgaaataatgttttttgtagtaatttgatggagttagaggtgttattttaagtgaagtaatttggaaatagaaaattaaaaattgtagtttttatttataagtggaaattaagttatgggtatgtaaaggtatatggagtggtataatggattttggagatttagaaagagggagagtgggaagggggtgagggataaaaaaatatatattgggtatatatatatatttggtgatgggtgtattaaaattttatatatatatgtatatatatatatatgtatatttatatgtatattttatttatgtaattaaaatttatttgtgttttaaaagttattgatatatatatatatatataatttttatatgtttttatatatatgaaaaaagatagtaaatttttgttttttaaattttaagttataggaagagaaaaatatttataaaattttaggtttggagatttgatttgttggttgaaatttttttttgttaatgttgattttttatattggaaaatttttagattattatttgtatgagtgagaattttttttttgatttttaatttaaattatatggaaagaaggttaaaatggagtttgtgtattttgaatttatttttagtatttaggttgtagtattatagtttaatttttattagtaggaggtattatttaaatatgttgagaaatatttatttttaaggaatgatattgtttttttatttggtttaatttagtttgagaaggattgttgtttttgatgaagaaagagttttatttttggttattgttatagttgttttgttaataataaaggtatagtattttttttttgtgtatttttaatatggatgttttttagggtattttaaaatttttttttaattagaaaattgttattggttatagttttatggttttgttgattgtgggaagtgagtgttttttttttgttgtggtttttaagtgtttttgtagtattgagaatatgatttatgggttggtttttttttttgtttttgtttgggtgttattgattttgggattttttttgaataataggttgtggagattttttataggttgttgtgtgaattttaggaaaattttttttagaggttatagttgttgttttttttatgtttttggttagattattttgagtttattggtggttttagtgatgtggttttttgtggttttgtttaatggaattttttatgaatgtgttatgagtgggatgagaagtttaggatttttggaattgatttgtaagggtaagtttaaagagtgttgggaagaattttataaagtattttgtggtaaaattagtatgttatttattgttaatgaagaattgaaattttttttttaggtttagttttaggtaagaaaagataaatttgttttttttttttagtatgagtttgaagtattttttttgtgttttttttagttagggttgtttgtgttttgttagaatattttgaaattaaatggaaattgaaatatgatgtagtattgagattattttaggaaaagtttttgaaaggttgggtggtttaataaagttgttgattggattattttttttttggttttgaaaagaaaatatttattggattgtttatatataaatatttaagtattttaaaatagtttttttgggtttgtaaataaataatgtttaatattaaattataaattgagtgttaatggtagagttgtaattagaaattattgttttttattaattatttatatttaagttgtttttttaaatatatatatgtattatttatttattaaaatgtagttgaatgaaatgagttattattttttaaagttgtatgtaatataattagtgtggagatttttttgaatgatttttggtaattgttatttttgtgtataaatattgttaagattgagaagaattttttttgtatggtaggaattagtagtttttaaatagttttttgtgaaaaagtgattgtattttttagggagattatgttttatattttttgtgttgtatagttaaaggggtttttaattattttagaagtttaagatttgggtattgttttatttaatagaaggaaattatatttttatttaattgatgtagggaagtagtttgttatttttttaggtatatgaatataaatttagatgtatagttttaggaaggattaattttttatttataggtagtaagaattgtatttttaaaagtaaaataagtggtaagagttgataagtagatttataaattgttaggaatgttatttgttttagaataaaggtatagaaatagtattattttatttttttgataaggatttgttttggtaataataaattaaggtaaaatttgtttttaaaatta

SEQ ID NO: 2415 - DNA, 2428 bp, Artificial Sequence
  chemically treated genomic DNA (Homo sapiens)
tgattttaaaaatagattttgttttgatttgttgttattaaggtaaatttttgttgaaaaagtaaaataatgttatttttgtgtttttattttgaaatagatagtatttttgataatttgtggatttgtttattaatttttattatttgttttgtttttgggaatgtaatttttattatttataaatgggaagttagttttttttaaggttgtatatttggatttgtgtttatgtgtttggaggaatgataggttatttttttgtattaattaggtaaagatatgatttttttttgttaaataaaataatgtttaaattttgagtttttgaagtaattaagaatttttttagttgtatagtataaagagtataaaatataatttttttagagagtatagttatttttttatagaaggttatttaaaaattgttgatttttattatataaggaaaattttttttaattttgataatatttatatatagagatagtagttgttagaaattatttaagagaatttttatattaattatattatatgtaattttgaaaagtaataatttattttatttagttatattttaatagatgaataatatatgtgtgtgtttgagaaaataatttgaatgtaaataattgatagaaggtagtaatttttaattatagttttgttattaatatttaatttatgatttagtgttaggtattatttatttatagatttagagagattgttttaaagtatttaagtatttatatgtggataatttagtggatattttttttttagaattggaaaagagataatttagttagtaattttattgagttatttagttttttaaaagttttttttgagatagttttaatgttgtattatgttttagtttttatttagttttaaaatattttgataggatatagatagttttggttgaaaggagtatagagagaatattttgagtttatgttgagagaaaaaggtgagtttgtttttttttatttgagattgggtttgaagggagagttttagttttttattgatggtaggtagtatgttagttttgttataagatattttgtgaagttttttttagtattttttgggtttatttttgtaaattagttttaggagttttgaattttttgttttgtttatggtatatttatagaaagttttattgagtagagttatagaaagttatattattggagttattaatgagtttagagtgatttggttgaggatgtagaagaaatggtagttgtggtttttgggaaagatttttttgggatttatatagtagtttgtgaagagtttttatgatttattgtttagaaagaattttaggattagtaatatttaggtaggagtaaagaggaaaattagtttataggttatatttttagtgttgtaggggtatttaaaagttataatagaaaagagatgtttattttttatggttagtagagttatgaagttgtagttaataatagttttttgattaaggaagaattttaaaatgttttgaaaagtatttatgttggagatgtatagagggaaaatgttgtgtttttgttattggtagagtagttgtggtagtggttgagggtggagttttttttttattagaaataatagttttttttagattgaattgagttagataaggaaataatgttattttttaggaatgaatattttttaatatgtttagataatgttttttattggtggaaattgggttgtgatattgtagtttaaatgttgagaataaatttaaagtgtatgggttttattttaattttttttttatgtggtttggattgaaaattagaaaagaaatttttatttatataaataatagtttaggaattttttagtgtaaggaattaatattaatagaaagaggttttagttgataaattaaatttttaaatttagaattttatgaatgtttttttttttttatgatttgagatttggaagatagggatttgttgtttttttttatatatataaaaatatatgaaaattatatatatatatatatattaatagtttttggagtataagtgggttttggttatatggatgaaatatatatataaatatatatatatatatatatatatatatatatgagattttagtgtatttattattggatatgtatgtgtatttaatatgtatttttttattttttattttttttttattttttttttttttgagtttttaaagtttattatattattttatatgtttttatgtatttatagtttaatttttatttataagtgagaattatagtttttggttttttatttttgagttattttgtttggaataatgtttttagttttattaagttgttgtaaaagatattattttatttttttttatgattgagtagtattttatg

SEQ ID NO: 2416 - DNA, 2443 bp, Artificial Sequence
  chemically treated genomic DNA (Homo sapiens)
atgtgatttgaaggtatttagtatatgtttttgtttgggtaggattagttgagttattttttgttttattaatttttaataattgttatattgtgtgtgtaattagtaagtgagtggtatatggagtttgatttggtattttatttatatattttgtttgatattatttttattgtttgggtttttgtttttggagaagagttgttgaaaagtattatttttttttttattattaatttttatttttatttttatttttaatatgggatgttgaggtgtagaggtattagtattgttttgttattattttagtggatatggatttgattaggtgttttttttttttttgtttatattaaggttttttaggttgtggttgtttattgggaatttttttaggggagtggtggaggggtgaggttatggtgtggggatttgtaagagggttttgattttgatagagaggggttgatgggtggttaggtgggtttgtgggtttattttgttgaggtgagggttttgtgttagtaggtagttgtgttgatgggtgtggtggtgatggggggttttgggttttatggttggtgttgggtttggtggtggggttaggttggggtgggttgtatgtgtggtgtaggtggtggatgttgttggggtgatggtgttgattgtagttgtggtggtggtggttgtattgggaaaggtttagtggttgggggtgggtgtgggtggtgagagggggtggatgtgttgggaggggtttgagtgaagttggtgtttttagtagggtagtttgtgagaagtgttgagttatggtaggagattatttgagttggtgtgtgaggaggaggaggaagagtgagttttggtagtgttgttggtggtggagtgggggtggtggttggagtttttggttttatagggtttttgtttattatgggtttatgattattgttgtggttgtttttttttatgtgggtatgtttaaatgtagtgtattgggtggttttgttgattttagagatttagggtgggggtagggagtggggagtgttaggttaggatttttttgtttgggaaggttggagaaagtgtgagaagatgttagaaggtgtgaatttgagtggtttaggtagagttggtggttgtttagatatttagggggattataggatggaaggatttgtgaggggtttttagaattgttgatagaatattttgataggttgaggagaattagatttgttttttttgttttgttagtgttttggaagttttttttttatagatttataatttttgttgtgttatttaggatgttggttatgtttggggttttgaggttggagggaattaattttgatttagaatgttgaggtttaagggaattgggaggaagtttagagaggagagtttaggtgttatatttgttagtttttatagattttttattggaattgtatttgaatgttaataagataagagttaaggtgttagggtgtaaaggtttaatgaatagttttgtttattttgtatattatttttttgggagttttagaaatttgatgtttaagaattattgttttttttgaataatgatgagtaagtagttttttaggttttttttttaattttaggtgatttgtttgtttttgttttttaaagtgttgggattataggtgtgagttattgtgttgggttatttttttattgttttattgatatttatgtttggaggtttatggattggaggaatagttagattatagttaaaaggagtgtttgtttgataaaaataaattaatagtaatagatattaaagttttttgtgttttagttttttttttagttaaataggattgttagtttttgttttatttgtttttgtatattgatattataaaggatagtgtttgagattatttgttgattttatatttttatatattagatatatatttaattatagtgtttttatttttagttatgttaattttgttttattagaaagattttttatagtaattgtattttgtttgtatttatatttagaagtttttttgattttgtttgaattatttagaatttgttgtttttatagagaatattttttaggtattataaagttttttttgaaaaaaatttttgaagttaaatgatattttttattgttaattttatattttataaatatttaattttataatatttaagaaaaaggtgtattttatataatttatttttttgaattaattgagatatattatagttagggtgttttatgtgagaggaaatagtttaatagttggtatgggagttaatttaagttgtttaagaagaaataaaaatgttagtataatagatttttattataataaagtatttattatatgaatttagatatattatttatttgtttttgtttttgagatttaatatttat

SEQ ID NO: 2417 - DNA, 2443 bp, Artificial Sequence
  chemically treated genomic DNA (Homo sapiens)
gtagatattaaattttagaaataggaataggtaggtagtatatttaaatttatgtaataagtattttattataataagggtttgttgtattaatatttttgtttttttttaagtagtttgaattggtttttatgttagttgttaaattgtttttttttatataaaatattttaattgtaatgtgttttagttaatttaggagagtgagttgtgtaaagtatattttttttttagatgttgtaggattgagtatttatggagtatagaattaataatgaaaggtgttatttaattttaaggattttttttaaaaagaattttgtgatgtttagaaaatattttttataaaaataatgaattttagataatttaggtgaggttaaagaagtttttaaatgtaaatatggataaaatataattattgtaagaaatttttttgataaggtaaagttaatataattagaaatgaaaatattgtgattggatgtgtgtttagtatatggagatataaaattagtaaataattttaaatattattttttgtaatattagtatgtagagataaatgggatagaaattagtaattttatttaattgaaaaggaaattggggtatagaaggttttagtgtttgttgttattaatttatttttattagataggtattttttttggttatgatttgattatttttttagtttatgaatttttaagtataaatattaataaaataataaaaaaatggtttggtgtggtggtttatatttataattttagtattttggaaggtggaggtgggtggattatttgaggttgggaggaaggtttgaaagattgtttatttattattatttagagagagtagtggtttttgaatattaggtttttagaatttttagagaaataatatataagataaataggattgtttattgggtttttgtattttaatattttgatttttattttattgatatttaaatataattttggtggaaaatttgtagaaattgataggtgtggtgtttgagtttttttttttgggtttttttttagtttttttgggttttggtattttgggttaaggttggttttttttggttttagggttttgggtatggttggtattttggatggtatggtgaaggttgtggatttgtagaaagagggtttttaagatgttaataagataggagagatgagtttgattttttttagtttgttgaggtgttttgttaatagttttggggattttttatgagtttttttgttttgtaatttttttaggtgtttgagtgattgttggttttgtttgaattgtttaggtttgtattttttggtatttttttgtattttttttagtttttttgggtagggggattttggtttgatgttttttgttttttgtttttgttttgggtttttggggttagtagagttatttagtgtattgtgtttaggtatgtttatatggagagaggtgattatagtggtgattataagtttatggtgggtagaggttttatggagttaagggttttggttgttatttttgttttgttattagtagtgttgttaggatttgttttttttttttttttttatatgttggtttggatgattttttgttatgatttagtgttttttgtaggttgttttgttggggatattggttttgtttgggttttttttgatgtgtttatttttttttgttatttatgtttgtttttagttgttgggttttttttagtgtggttgttgttgttatagttgtagttagtattgttattttagtagtatttgttgtttgtattgtgtgtgtggtttgttttggtttgattttgttgttgaatttggtgttagttatggagtttgaagttttttgttgttgttatatttattagtgtggttatttgttgatatggaatttttattttaataaggtaaatttgtaggtttatttggttgtttattggtttttttttattagggttagggtttttttgtaggtttttgtattatggttttgtttttttgttgtttttttgggaaggtttttggtgagtggttgtggtttggggggttttggtgtgggtagaaggaagaaggatgtttaattgggtttgtatttattagagtgatggtagggtagtgttggtgtttttgtattttggtattttatgttagggatagaggtaaaggtaaaggttagtgatagaggaaaaggtgatattttttggtagtttttttttaaaaataagagtttagataatgaaagtagtattagataaagtgtgtgaatggagtgttaggttagattttatgtgttatttatttattggttgtatatatagtgtggtaattattggaagttgataaggtgagaagtggtttaattggttttgtttagatagaaatgtgtattgagtgtttttagattatgt

SEQ ID NO: 2418 - DNA, 2489 bp, Artificial Sequence
  chemically treated genomic DNA (Homo sapiens)
atttttagtatagttagggtaggttttattaaattgtaaagtaggaaagttgaataatttttaaaagttaaagtagtttatgattttaaagtatttagttaatttagtttttgatttgtataatttagattatgtttatattttgaagatatttttatttttattttattgataatttaaaagatagtttatttagtaaagttatatttaagtgaatttgaaaattgtttagatttatttatttaatttatgaatatttttttatttataagttaatttggtagatataatatataatagtaagtgtatatataagtaaatatatttagatatgtatatatatatataaatgaagaggtggagtttaaaatatttaaattgggtgtagtgtatattgtttgggagatggatgtattaaaattttataaattattattaaagaatttgtttatgtaattaaataatatttgtttttttaaaatttatgggaaaaaaaaattaaaaaaaatatttaaatggtattatagaattaattagttgaatatagtatttagtatttggttgttatttaatatttgttttatattattatatttagaaaataagtagatattttttttggaagagttttgagggagttattaggaggtttgtatggtttgtttttttgttttttttttgttttgtggttgaattttaattttttttgggtttagattttattgatttgtttttgggtaaagtaaatgatttgattagatggttatgtgtattttttttttttttgaaattagtattatagggtaaaagattatttttatttggttgttttttagatgttttatatttggatagtaaattgattttaaattatttttttttaaagatttttgagggagatattgtatttggttattgtagtttagagtaggtttggttatggttatgagtatgttgagttattatgtttattgtggatgatattttggagtaggttggggagtttggttggttttagaagtaagttttttttattttatgtttgttgttggttgtttttgtgtttatttgtgtgggtattgtttttttgggttttatatttgattattattgttagagttttggggtggttgagttgagttagtgttgtggttggagttttgtggaggagttgaattatatagtgttaggtttggggtttgtgggtgaggttttttttggttagtgtaggtgttatgaagtggattggaattagagtgtttttagttgtgtagattttttggttagtttggttattaataggagttatttgttgttgggtttttgttaggatggttgggtgtatgatatgtttggtttttttattgttattgaggtaaaaaagtttttgtaatatgggagtttttgggatagggagaaatataaagtaaattttatgaagtttagttttatattaggaaagaggtagggggttatgtttattgtgtagtttgtgggtgtttggttgtgttttaggtatggggtatttttttttttagtttaatttattataaattttgggtttttgaggaggaagttgaggtaggagagaatagttagtataagttgggggttaggttgttaggttgtttgaatgggagttgattgggagattaggagtttttttgtttgttttattggttttttttagaattattaatttgttttgggttttgtttttttattaatagtattgtgggttttttttttttgtttaagagtgatgatgattgattttaatgatggtgttgaggtggtttggaattgttttggtttggaagtgagaatatttggtggaattttagttgtgttttttattagttgagtattattgggtaagttattgtttttttaagttttatttttttattagttaattagggatgatgatggttgttttataggggtgtgagttttagttgggatttgtgaaagtattgagtaaatttaaattgagttatattgtgtagtttgatggggtttatgggatagggtgatggttttaaaagggttttgtttgagtagtttatttggttatttgagtattttgttttgagaattttttagtaaaaagtgttattatattttttttttattatgagtttttttgaaattattgtatggtaataagtgtggatgtttggtgggttggagaagttgtgggttaaagtttgttaggggttttttgttagtaatgagtagtggtgtggttttggtgtaggtattgtttttttgaaataagaggtaattgggttttttttgtttttggttttgtttatttgtttgtttttattatttttgtttaagttttttggattttttgggtttttgttttttttttttttttttttttgagtggtattagtggtgatatatttagggttattattggaggaaagtttagggttttttttttttgggtttgagtattgttttatttgtttgtttgg

SEQ ID NO: 2419 - DNA, 2489 bp, Artificial Sequence
  chemically treated genomic DNA (Homo sapiens)
ttaggtaagtaggtagagtaatgtttaggtttagaggggagggattttaagtttttttttagtaatagttttaaatgtgttattgttgatattatttaggaaagggaaaagaggaagaatagagatttaagaagtttggagagtttgggtgagggtagtgggggtagataagtgggtaggattagaggtagggagggtttagttattttttattttagggaagtagtgtttgtattaaaattatgttattgtttgttattaatagaaggtttttgatgggttttggtttatagtttttttaatttattaagtatttatatttgttattgtgtaatagttttaaaagggtttatgatgggaaaaaaatgtggtgatattttttattaaaggatttttaaagtaaaatgtttaaataattaagtaaattatttaagtaaggtttttttgaggttattgttttattttatgggttttattggattgtatggtgtgatttagtttggatttgtttagtgtttttatagattttagttgaagtttatatttttatgaggtagttgttattatttttggttgattgatgaggaaatgaggtttagagaggtagtgatttatttagtgatgtttagttaataaggggtatagttgggattttattaaatatttttatttttaagttagggtaattttaggttattttaatattattattgaggttaattgttattatttttgagtagaaggagggggtttatagtattattggtggggaagtgggatttagagtaagttgatagttttgggagaagttagtggggtaggtagagaggtttttggttttttagttaatttttatttaagtaatttggtaatttggtttttgatttgtgttagttgtttttttttgttttagttttttttttaaagatttagagtttgtggtggattaaattagagaagagaatgttttgtgtttgggatatagttagatatttatgaattgtataataaatatagttttttattttttttttgatatggaattgaattttataggatttgttttatatttttttttgttttaggaatttttatgttatagaggtttttttattttagtgatgatggaagagttgggtgtgttatatatttagttattttggtagggatttagtggtaggtggtttttgttggtggttaggttagttagggggtttatatagttgagggtgttttggttttagtttattttatagtgtttgtattggttaaggaaggttttgtttgtgggttttaggtttggtattgtatagtttagtttttttgtagggttttagttatagtgttggtttagtttagttattttaggattttggtagtggtggttaggtgtgaaatttaggaagatgatgtttatatagatgggtgtaaaggtagttgatagtaggtataagatgaggaaggtttgtttttggaattagttagattttttaatttgttttagaatgttatttatggtgggtatgatggtttagtatgtttatggttgtggttagatttgttttgggttgtagtggttaggtgtaatgttttttttagagatttttgaaaaggagtggtttgaaattagtttgttgtttaagtgtgaaatatttggaaggtaattaagtagaaataattttttattttatggtgttggttttaggaaaaggaagaatgtatgtggttatttgattaaattgtttgttttgtttgggagtgagttagtggggtttaagtttgaagagaattgaagtttagttatagagtaagaagagggtaggagagtaggttgtgtaaattttttagtagtttttttagggtttttttaaaaagaatatttatttgttttttagatgtgatggtatgaggtaagtattgggtgatagttaggtattagatattgtatttggttaattagttttgtgatattatttaagtattttttttagttttttttttttataggttttgagggaataggtattatttggttatatgagtaggttttttagtggtgatttgtgagattttggtgtatttattttttaagtagtatatattgtatttaatttgggtgttttaagttttatttttttatttgtgtgtgtgtatatatgtttagatgtgtttatttgtatgtatatttattgttatatgttgtgtttattaaattggtttataagtaaaagagtgtttataaattaagtaaataagtttaagtaatttttaaatttatttaagtatgattttgttaaataggttgttttttaaattattagtaaaatgaaaatagaaatgtttttaaaatatagatatggtttaaattatgtaagttagaaattaggttgattaaatgttttaaggttataaattgttttggtttttgaaaattgtttaatttttttgttttgtagtttggtagggtttgttttagttatgttggaaat

SEQ ID NO: 2420 - DNA, 2388 bp, Artificial Sequence
  chemically treated genomic DNA (Homo sapiens)
ataaatataataagttataaatatagtattgagaggtttttgtatggttttgttttttttaggtagtattttatataattatagtttatgattataattggaaagttgttattggtattatattagaaattagtttgtagattttgtttagattttattaggttttttgtgtatttatttgtttttttgaaaatattttaatgtttttttatatgatttatttttttgatatattgtgagataaggtttttttttttttgaataagtttagagaataatgaatgtgagaggtgggaaggatgatttggtgtatttttgttttatttatggtgagtttggattttagagtagaaggatttttgttttttttttggggagttttggtgttaatttagtgtaggttgttaagttatttgggtttgattgtttttttttttgttaaaatttgttttaagtatgtaatatagttatgtttattaatgatgaggagatagttaatgaaaattaatttttttaaagatgaatagatatttagatttttttaagtataatttatttaagaaaatattattttattgagttttaaatgagttaggttttatttagaaagtgttttttagtgttaggtaaagtgttttatatttgtaattttagtatttttggagatggagataggaggattttatgagtttaggagtttaagattagtttgggtaatatggtaaaattttgtttttatagaaaatataaaaaaaaaaaaaatagttgggtgtggtggtgtgtatttgtggttttagttattttggagtttgaggtgggagaattgtttgaatttaggaggttaaggttatagtgagttgtgtttgtattattgtattttagtttgggtgatagagttagtttttgtttttaaaaaaaaaaaagaaagaaaggaaaagaaaatgtttttgagttgattatattttaattattgtgttaatttgagagatagtttgttatttttttataggatatgagggttgataattattttattgtatggttttggggattgatgaataaaggttaatatgtggaaaagggtaattaaagaaagaagagttatttttaggttaattagtataagtttttttgttggtatgttttaatatattaaaatagtagtaaaaataatttgtatattggtattgaaggtatagataaatttgttgaggatttttattatggtagagggatgttttatatgagtttttagtagattaattaagtttttgttagttttatttggaaatgatgttgtttttttggggttatgtagagaagtttatgttgatgaaatgagttgttttagaatggtagtttttgggtagtagagtttgggtttaaggaaggttgaaagaaggggtggtgtggagttgttaggtgtaaatgttaggttagtaatgtagtttagtttgtatggatgtgttttgtttaggaagttgtgatttggttgtattttttattttaggtgagatggaaggttgaattttattttattttttggtgaggttgatgttttttggtgtttataattttttttgtaaatatttgaaaggaatttattattttaatgttggaagagatgtttatttttttttaagaggatttgagtggattttgattgtaggttttatgttgggtagagttaaggagaatttaatttgtttttaattttatttgaatgttttttttttttttttttttttttttttttttgagatagagttttgtttttttatttaggttggagtgtaatggtatgattttggtttattgtaatttttgtttgttgggtttaagtaatttttttattttagtttttttagtatttgggatgataggagtatgttattatgttttgttaatttttggtatttttagtagagatggggttttattatgttggttaggttggttttaaatttttgattttgtgatttatttgttttggttttttaaagtattgggattataggtatgagttattgtgtttagtttatttgaatgtttttatgtttgttataagtgtagtagtagaatttttatatattttgtgtgtgaaagttttttgtagtttttttagtatagagaggttggggaaggttagagattgatttgtattttttagatatatagttgattattgaataatatatgtttgaattgttatatatagattttttttaataaatgtgttagaaaatgttttggagttttgtaataatttgaaaaaatttaaagataaattatttagttagaaatattaataaaaatagaaaaagttaagtatgttatgaatgtataaaatatatgtagatatttagtttattttattttttattatta

SEQ ID NO: 2421 - DNA, 2388 bp, Artificial Sequence
  chemically treated genomic DNA (Homo sapiens)
tggtagtaaagaataaaatagattaggtatttatatatattttatgtatttatgatatatttaattttttttatttttgttgatatttttagttggatggtttgtttttgagtttttttaaattgttgtaaaattttaaaatattttttaatatatttattgaaaaaaatttgtgtgtaatagtttagatgtgtgttgtttaatgattaattatatgtttaaagagtataagttagtttttaattttttttagtttttttatgttaaaggaattataggaaatttttgtatgtaagatgtgtggagattttgttgttgtatttgtagtaggtataggaatgtttaaataggttgggtgtggtggtttatgtttgtaattttagtattttgggaggttaaggtaggtggattatgaggttaggagtttgagattagtttggttagtatggtgaaattttatttttattaaaaatattaaaaattagtagggtatggtggtatgtttttgttgttttagatattggggaggttgaggtgggagaattgtttgaatttagtaggtagaggttgtagtgagttgagattgtgttattgtattttagtttgggtgagagagtaagattttgttttaaaaaaaaaaaaaaaaaaaaaaaaaaaaagaatatttaaataagattggagataaattgaattttttttagttttgtttagtataaggtttgtaattaagatttatttaggtttttttaagaaggaatagatgttttttttagtattaaaatggtaaattttttttaagtatttataaagaaagttataaatattaggaaatattaattttattaggaggtgaggtagagtttaattttttattttatttgaagtggaaaatgtagttaagttataattttttaggtgaagtatgtttatgtaagttggattgtattgttggtttgatatttgtatttggtagttttatgttatttttttttttaattttttttgagtttaggttttgttgtttgggaattgttattttaggatagtttattttattaatatgaatttttttgtatagttttaagaggatagtattatttttaaatggaattagtaagaatttaattaatttattaaggatttatataaagtatttttttgttgtggtaagggtttttggtaagtttatttgtgtttttgatgttaatgtgtagattgtttttattgttgttttagtgtattagggtatattagtgaggagatttgtattaattaatttggaggtggtttttttttttttagttgtttttttttatatgttagtttttgtttattagtttttaggattatgtaatgaggtgattattagtttttatgttttgtaaagagatagtagattattttttaagttagtatagtggttaaaatgtaattaatttgggggtatttttttttttttttttttttttttttttttggaaatagaggttggttttgttatttaggttggagtgtggtggtgtaaatatagtttattgtagttttaattttttggatttaagtgatttttttattttagattttagagtagttgggattataggtgtatgttattatgtttagttattttttttttttttgtattttttgtagagatagggttttgttatgttatttaggttggttttgaatttttgggtttatgagatttttttatttttgtttttagaagtgttgggattgtaaatatgaggtattttatttggtattaggggatattttttaagtgagatttaatttatttggggtttagtgaggtgatatttttttaaatgagttgtgtttgaaaaaatttagatatttatttatttttgaaaaaattaatttttattggttgtttttttattattaataagtatggttgtgttatatgtttaagataaattttagtagagaagaagatagttagatttggataatttagtagtttgtattgagttggtattaggattttttagaggagagatgagggtttttttgttttgaggtttagatttattatggataaaatagagatgtattaaattattttttttattttttatatttattgttttttaagtttatttggagaaaaaaaaattttattttatagtatgttggggagataagttatgtagaaaaatattaaaatatttttaggaaagtaaatgagtgtataaaaaatttggtgaaatttgagtaaggtttgtagattagtttttgatgtggtgttaatggtaattttttagttgtaattatgaattatagttatgtaagatattgtttgagggaggtggggttatataaggattttttagtattatatttgtaatttgttgtgtttat

SEQ ID NO: 2422 - DNA, 2433 bp, Artificial Sequence
  chemically treated genomic DNA (Homo sapiens)
tgaagatgtaataaaattttttatttgaaaaatttttttgtgatttaagtaagtttatatttgttttattgttgataatttataattgttattttaggtttttaaggagtttattgatgtatttaaaataaatttaataaaattagtgttttttaattaaatgatattaaatatatatatttgtataatttgttttgtagttttaatttgattttttgttaggattaataaatatatatatatatgtttggtataaatagagtaaattttttgtggaataaaattaattgtgtatattattttattttttgtataaaatatatggtaggttgggtgtggtggtttatgtttgtatttttagtattttgagaggtttatgtgggtggattatgaggttaagagattgagattattttggttaatatggtgaaatttttgtttttattaaataaataaataaatataaatagtagttgggtgtggtggtgtatgtttgtagttttagttatttgggaggttgaggtaggagaattgtttgaatttgggaggtggaggttgtagtgagtttagattgtgttattgtattttagtttggtgatgtagtaagattttgtttttgtttttttttttgtttttatatgtgtgtgtgtgtatatatatatatatatatatgataaaggaattttttttttttttttgttttttgtttaatttaatttttgtaattgttggttgtttttttatttttgatttttttgtaaatttttagtagagtagtatttgggggtagatttgttattgagattgatttttttattgtagaagagaatgtgtggtttttggaggttggatattatagtgggagtaggaatttggtaggtgatgagtagaggtatgagtaagttgtttagttaaatttggtagttttgaggttaaaaatgattttgtaatatttttgtggaggaagttttttttagatgtttgagaaataaatttagttgggaggaggtgttttgtattttataaaatgaaggttttgtgattggtttagagttgtgtggtttttagtgggtttttaagttttggggtattttaggttggtattatattattaaaaagaagtgtaaattttatttttgaagtttagttgaaggtaggtgttggtagggagagttaagaggttgtttagagagtttgggttgggagtgggagtgggataaggtgggagttaatttagttggagtagatgttagaagaagttttgtttagttgaggtgttttgttttaattttaggtttttggggattttaagaagggagttatttggtgtttttttgagtggtttttatagttttggagattttgttgttgtttaggggtgtagttgttggagtttttgggtttgttggggtttagtaggggtagtgggagtttttattttgggagaaattgttagggataaatattgtttgttgatgtaaagtttgttttgtaaaggagttttttttgtatatgttttgtagtttaaattgatttagaaagggatatataggtttgtaaggtgtttttgggattatatagttttatgtttttttttttttttttgttatttttttatgttttttgtttttattttgggtagtagattttagtaggtggggaaatttggggattggtgtttgtattgttgaaaggttggaaagtagagttttgtttatatttatgatgtttttagaatgtggtttttagaaataatttaagtgtgagtagggtgttgaggataggataaggtgtttgttttttagttttgttattggttaaggagaattatagtagtagagttgtattattgttgttgttgtttttaatttgtgttaagtttggtttaggttattggattgggtaggattagttaatttaggttttgaggggtagtgtgttatagattgtagtttattttaattttggtttttggagaaggggtgttgaattttttttgggtatgggagggaaagatattttgagttggttgggtggagtggtagttttgagagtgatgagtgatagtaaagttttgttttagtaaggttttttattaatagtgtggtatgtttttttgaggagagtgttaggtttttgtattttgtaagttaagagagtaaagaaagtggggatagggtgtgtaattgtaatgtttggttgtgtgtgtgtatgtgtttgtgtttgtatgtgtgtgtgagtatgtgtatttgtttaagtgtaaatgtgtttgttggtagttggggtttaagtatttgagaatgtgtgttttttgttgttttaggagattaaaatgtttttttttagtattgagttatattgaggaaataaaattgaaataaattgttaggttttttttaagattagttggattttatgttaaataaaagttag

SEQ ID NO: 2423 - DNA, 2433 bp, Artificial Sequence
  chemically treated genomic DNA (Homo sapiens)
ttgatttttatttaatatagaatttggttggttttgagagaggtttgatagtttattttagttttgtttttttaatgtagtttaatattgggaaaagatattttaattttttaaagtaatagaagatatatatttttaggtatttagattttaattgttaatagatatatttatatttgagtaggtgtatatgtttatgtatatatgtaaatatagatatgtgtatatgtgtgattggatattgtgattatgtgttttgtttttgttttttttgtttttttgatttgtaaagtgtgagggtttggtgttttttttgaaagggtatgttgtgttgttggtaaaaggttttgttaggatgaggttttgttgttatttgttatttttaaggttgttattttgtttagttaatttggaatgttttttttttttatgtttaagagagatttgatgttttttttttaggagttgaggttggagtgggttgtagtttgtgatatattgttttttgggatttgggttagttggttttgtttaatttagtagtttgagttgaatttaatgtaagttggaggtggtggtagtagtggtgtggttttattgttatgattttttttagttagtagtaggattagggggtaaatgttttgttttgtttttggtgttttatttatatttgaattatttttaagggttatgttttagaaatattgtggatgtagatgaggttttgttttttagttttttggtaatgtggatattagtttttgggtttttttgtttgttggggtttgttgtttagggtgaaggtgaaagatataaagaaatggtagaggaaaagaagagggtgtgaggttgtatgattttgagagtgttttgtaggtttgtgtatttttttttaaattagtttgagttgtaggatatatatagggagaatttttttgtggaataggttttgtgttagtaaatagtgtttgtttttggtagttttttttagggtaggggtttttattatttttgttgagttttagtaggtttgagggttttgatgattatatttttgggtagtagtagagtttttaaagttgtaaggattgtttggagaagtattgggtagttttttttttggggtttttgagagtttgggattggggtggggtattttagttgaatggaattttttttggtgtttattttagttaagttagtttttgttttgttttatttttatttttggtttaaattttttaggtggttttttagttttttttgttggtgtttgtttttggttaagttttagaaatgggatttgtgtttttttttaatgatgtaatattggtttagggtattttggagtttggagatttattagggattatatagttttaaattggttgtaaagtttttattttgtaaaatgtaaaatatttttttttaattgagtttgttttttaggtgtttaaaagaggttttttttgtaaggatattataaaattatttttgattttaaggttgttaggtttggttgggtggtttgtttgtgtttttgtttattgtttgttaggtttttatttttgttgtggtgtttggtttttaggaattgtgtgtttttttttataataaaaggattagttttagtggtggatttatttttaaatgttattttattgaaagtttatagagaagttagagataaaagggtagttaatggttgtggagattgaattaaatgagggatgagggagaggaaaaaatttttttgttatatatatatatatatatatatatatatatatatatggagatagagagagagatagagatggagttttgttgtgttgttaggttggagtatagtagtgtgatttgggtttattgtaatttttgttttttgagtttaagtgatttttttgttttagttttttgagtagttgggattataggtgtgtattattatgtttagttattatttgtatttatttatttatttagtagagatgggggttttattatgttggttaggatggttttgattttttgattttgtgatttgtttgtgtaggttttttaaagtgttgggaatataggtgtgagttattgtgtttggtttgttgtgtattttatataaaagatggagtaatatgtatgattaattttattttataagagatttgttttatttatattaaatatatatatatatatttgttaattttaataaaaagttgagttgaaattataaaataaattgtataaatatatatgtttggtgttatttaattaaaaagtattgattttattaaatttgttttaaatatattaatggattttttaaaagtttgaagtaatgattgtaaattgttaatagtaggataaatataaatttatttaaattatagagaagttttttaaatggggaattttattgtgttttta

SEQ ID NO: 2424 - DNA, 2281 bp, Artificial Sequence
  chemically treated genomic DNA (Homo sapiens)
gattattatgtagtaattagaataaataagttgtatatttattgatttggaaagttgtttgtgatattaatataagtgaaaaaataaggttgtagagtaatgtatgtagaataatgttggttttgttttaaaaataatataggtgaatattgtgtatgtgtttatagtttgaatatatttgtatgaatatggaaatagatgtggaagattatttatttaatagtattaattattttaaatatataaaatggggtagaggtgggagatgattattttatatttagtgtttttttatgatgagtagtattggtttagtaatttttttaaagtaggaaaaataaagaaaaaagttgtagggtaggttagggttgaaagtatatttttgtaattattttattgttatattaattagtatttatttatggagtatttattgtttgtaaagatgagaatataagtattggatttaatagtttattagagggttaataatttgattggggagataaaatttttttataggaaaataaaagtatttttatgatgagaatagagttggttaatttatatttattttttgaaatgaatgtagtggaagtggtgtaatgagtataatttagatttggtaatttttttattttgttatatatttgtataaatttaagataaggtttttaatatttgtattattattttttaggttttttatttttgaagttgagaaaggaaatatttggatatgatgtaattagtaatatattaatgggtatgaaaggatttttttttttttttattttagtttttgtgttttatttttattttttaatttttttttagagtttggaatttattggggttatttttttaaaatattttttgaagttaagtttttagttttatagttattagggagatttttgagaattaagttagttttaatagttagtttagaattttggttaaatatgagtttttttatttaatggttaaaatgtaaaattaggtaatttttgtttatggtgttaagttgtaaattatttgtttttagtttttagtgaatgttattgggaagtattaggataaaagttgttatttaaaaattttaattttagtttttttttggtttgggtttaaagttagaggtgattttttataggtggtatgttagtgttatttgattgttgatatattttgtgtggtggttgagaaaattggagaagaaagagttagggtagttaaaggattgtttgttaattttaagatgtgtaggatgaagaggagaataatgtaagggtaggtattttgaataatttgtgttattgatagtattagtaaaaaataattagttggtttttagttagggagttttttatttagttgttgtgtgtgtattataggtttaaagagtgtttatggtttataatattgattagtttgagttttagtttattttgttatgggttgtagattagattgtgttttatgggttttttattttagaagaaaggttgaggagaaagaaagttatatttagtttttttgtgttatttgatatatttaatagtaaggaagggagggagggagggagggaagggaagggaaggaaggattttagtattttgggagtttaaagtataagtattgtttgaggttaggagttttagattagttgagttatataatgagattttgattttataaaaaaaaaattttttttttaattagttaggtatggtgatatatgtttttaatattagttatttaggaggttgaagtaggaggatagtttgagtttaggagtttaaagttatagtgattaagttattgtattttagtttgggagatagagtaagattttgtttttaaaaattataatattaataataaaatggaaagagtaaattttgatgttttattgttttgtgggtttgtgttgtttattttttttttatttttagttttgtattttatagtgttggtgatatatggaaaaaaaattaagatatagttttttaggaattgttaaaatttttatttaaatgtgagtgagtaatgaaaaataagatatatgaaatatgagggttgagaaagtgtgttttagggatgggagtgagagttttttgtattgtgtgggtagattaaagtaagttgttaattaagatttttttaagattatttagtagggggaaggagagaagagggggtgattatttagtgagttgagtataagaggaatattttgtagttttagagaatgtttagaggtagaagtgtgagtggg

SEQ ID NO: 2425 - DNA, 2281 bp, Artificial Sequence
  chemically treated genomic DNA (Homo sapiens)
tttatttgtatttttatttttaaatattttttaaagttgtgaggtattttttttgtgtttagtttattaagtgattgtttttttttttttttttttttttgttaaataattttaaggagattttgattggtagtttgttttagtttatttatatagtatgaggagtttttatttttatttttaaaatatatttttttagtttttatattttatgtattttattttttattgtttatttatatttagataggagttttggtaatttttaaaggattgtgttttagttttttttttatatattattaatattgtgaaatataaagttgaggatgaagggaaagtagataatataggtttataaaatagtaaagtattaaaatttgttttttttattttgttattagtattatgatttttagagataaagttttattttgttttttaggttggagtgtagtggtttgattattgtaattttgaatttttgaatttaaattatttttttattttagttttttaagtagttggtattagaggtatgtattattatatttggttaattaaaaaaaaaattttttttttgtagaattagggttttattatatggtttagttggtttgaaatttttggttttaagtaatatttgtgttttggatttttaaagtattgggattttttttttttttttttttttttttttttttttttttttttttgttgttaaatatattaggtgatatagaaggattggatgtaattttttttttttttaattttttttttaaaataggaggtttatgaaatatggtttggtttgtaatttatggtaggatggattgagatttagattgattagtgttataggttgtgggtgttttttagatttgtgatgtatatatagtagttggatggggaattttttggttgagagttagttggttattttttgttgatgttgttaataatataaattgtttagagtgtttatttttgtattgtttttttttttattttgtatattttaaaattaatgagtagttttttgattattttggtttttttttttttagtttttttaattattatatagaatatgttagtagttagatggtattggtatgttatttatggagaattgtttttggttttaagtttagattaagagaaaattagaattggaatttttggatgatgatttttgttttgatgttttttaatagtatttgttaaagattagagatagatagtttgtaatttagtattatgagtaaaagttgtttggttttgtattttgattattgagtaaaaggatttatgtttagttaagattttgaattggttgttggggttgatttggtttttagaggtttttttaatgattgtggagttaaaggtttaattttaaagaatgttttggagaaatagttttaatgaattttaagttttgggaaggggttgggggataggggtgggatataggggttggagtggggaagggagggaatttttttatgtttattaatgtattgttaattgtattatatttagatgtttttttttttaattttagaggtagagggtttgagagatggtggtgtagatgttaaaagttttgttttaagtttatataagtatgtagtagagtgaaaagattgttaggtttgagttgtatttgttatattatttttattatatttattttaaaaaatgaatataaattagttagttttgtttttattatgaaaatatttttatttttttgtgaagaggttttatttttttagttaaattattggttttttggtagattgttaagtttaatatttgtgtttttatttttgtaaataataagtgttttatgaataaatgttgattaatataataataaggtggttataaggatatatttttagttttggtttattttataatttttttttttattttttttattttaaaaaaattgttgagttaatattgtttattgtaaaaaggtattgaatataaaataattattttttatttttgttttattttatatatttaaaataattaatgttgttaggtagatagttttttatatttatttttatgtttatataagtatatttaagttatggatatatatatagtatttatttgtattatttttaaagtaaaattagtattattttatatatattattttgtaattttgtttttttatttatgttgatattatggataattttttaagttagtaaatatgtagtttatttattttaattgttgtataatagtt

SEQ ID NO: 2426 - DNA, 2313 bp, Artificial Sequence
  chemically treated genomic DNA (Homo sapiens)
ttattgggaggagaagggaaggtgttttgttttttagggttggggattataggtaaggttatgggtttgagggtatttttttaaattttagtagataaattatgtttaaattttatattttattgagaaagtaggtgtttgtaattagttatagaagggaggtgggtggttgtgggtagagaagaaaaaattttttaataaaaaaataaaaattaggtaaaatagaatttgatagttattatgtaaatagaagaaatattatgaaagtgatattattagtatggttgtgggtttgttttattttttggtttttaaagtaggagataatgagagttatttattgatttatttttagtatttgataaaagaaaaaaagttaattaattaggtttattttattgatttattaatgtttttgttattaagggataattttaaaaaggatttttttattaaaagaagagaaattaatttatagatttttttgggttttaatttataatttgtataggataaaattaagtttaaaatagagagtgtatttataaggttgagaagatattttgtggtgatttttttgtataatatgaaataaggttggttggtttttttttgtaaagagtaagatagtaaatattttaggttttttgggttaagaaatataattaaggatattatgtagttatttgtataataagagtaaaattatttttttttataatttttaaaatagattaattttaaaattttatgattagtatagtttgtattttatattgtttttatgtgttatgaaataatatttttattaaatttttttgtaagtatttgaaaatggaaaaagtatttttagtttgtgggttatataaaaataggttgtggtttggatttggttttggggttattatttgttgatttttaatatagaatatttttgagttatgttagggtttttaattagttaggttatttaagtttagattgaattgggatatggttttagaattttttttaatattgtatgtttgttataatgtgggtagggagaggttgttggttttgtagtagttatttgatggttgtttaaaggattgtgaatttagttattattagtattttttttatttttttagatttgggtgtagttggtttagttttttatttttagttttgggaaagttttttttttagatttttgtttttttttaataagtttgtatgttgtgttaaggagtaattgtttttgttgttatgaatttatttgtttttgtgaatttatgtgttttttatttttgttttatttagaatagagaatataattattttaatattttatgtattttttataagtttatagagttttaatggaagtttggagagataatggtagtttatatagtagaagtaatagtatttgtttagtgttattgtttaagttattattatagttaatatttttaggaaatttattttttttgttaggaggtttttatatgttatttaattttgtaataattagtagaaataggttttttttttttaatagttattattttgttttataaaaaagaaatgaagtttaagagattgagtagtttgttaattatagagtaagttaatgatagagatgaattttgaatagttaagttaggtagtgatttatgtttgtaattttagtattttgggaggttaaggtaggtggattatttgaagttaggagtttaagattagtttggttaatgtagtgaaattttgtatgttttaaaaatataaaaattagttgggtatggtggtaaatgtttatagttatagttattagttaggttgaggtgggaggattgtttaaatttgggaggtgtaggttgtagtgagttgagattgttttattttattttagtttgggtggtagagtgagattttattttaaataaataaataaaaattataattaatgatttagaatgtaattaatgatttagagtttatgtatttaaatataatatagttatttttttatagtattttaagtgaatattagattttgttgttgttgttgttgttgttgttgaaagtttttttattatttttttgggaatttttattggtttgattattttataaaatgttttggtttttatttatgtttttggtttttttttttgtttatgttttttttatttttttttttagattgtttttatgaatttttaatattttgatttaattttttagagtaatttagtttttgttagtttatgtttttaaattgagttttagtagaagttttttgagggatataatgttattttatag

SEQ ID NO: 2427 - DNA, 2313 bp, Artificial Sequence
  chemically treated genomic DNA (Homo sapiens)
ttgtaaaatgatattatgttttttagaaggtttttgttagagtttagtttgggaatatgagttagtaagagttaaattattttaaagaattggattaaggtattaagagtttatgaaaataatttgggagaagaggtgagaaagatatgggtaaggagaggagttaggagtgtgggtagaagttaggatattttatgaggtggttaggttagtgagaatttttagggaggtgatagaagaatttttaataataataataataataataataaagtttgatgtttatttaaagtgttgtagagggataattgtgttgtgtttaggtgtatgggttttgggttattgattgtattttgggttattgattgtggtttttgtttgtttgtttgagatggaattttattttattgtttaggttagagtgagatgaagtaattttagtttattgtaatttatattttttaggtttgagtgatttttttattttagtttagttagtagttatgattataggtgtttgttattatgtttgattaatttttgtatttttaagatatatggagttttattatgttaattaggttggttttgaatttttgattttaaatgatttgtttgttttggttttttaaagtgttgggattataggtataagttattgtttgatttgattgtttaaaatttatttttattattaatttgttttgtgattagtaagttgtttaattttttaagttttattttttttttgtaaaataggataataattgttaaaaagaaaaagtttatttttattgattattgtaggattaaataatatgtgaaaattttttggtaaaagaaataaattttttggaagtgttagttatgatgatgatttaaataatgatattgagtagatgttgttatttttgttgtgtaaattgttattgtttttttaaatttttattaaaattttgtaggtttataaaaaatatataaaatattaaaataattgtattttttgttttggatgaggtaaggatgaagggtatgtgaatttataagggtaagtgaatttgtagtagtagaagtgattgttttttggtataatatgtaagtttgttgaggaggagtggaaatttgggagagagatttttttgaggttggggatggaggattgagttaattgtatttagatttgaaagagtagggaaaatgttggtgataattgagtttatggttttttaagtagttattaggtggttattgtagagttaatagtttttttttatttatattatggtaggtatgtagtgttgagaaggattttgaaattatgttttagtttaatttgagtttggatgatttaattgattaaggattttgatatgatttagaagtgttttatgttgggggttagtaaatgatggttttagggttaaatttaggttataatttgtttttatgtgatttataagttaagaatgttttttttatttttaaatgtttgtaggaaaatttaatgagaatattattttatgatatatgaaaataatataaaatgtaaattgtattggttataaaattttgaaattgatttattttaaaagttgtggggaaaaatggttttgtttttgttatataagtaattatataatatttttgattgtattttttggtttagaaagtttgaaatatttattattttgttttttatagagaaaggttaattaattttgttttatgttatgtaaaggagttattataagatgtttttttaattttatgggtgtattttttattttaaatttgattttattttatatgaattgtgggttggagtttaaagaggtttatgaattgatttttttttttttgatagaaaaattttttttaaaattattttttagtgataaggatattagtaagttaataaggtaagtttgattgattgatttttttttttttattaaatattaaaaatgagttagtaagtagtttttattgttttttgttttagagattaaaggataagataggtttatagttatgttaatgatgttatttttgtagtgttttttttgtttgtatggtgattgttaagttttattttgtttaatttttatttttttattaaaaaatttttttttttttgtttatgattatttattttttttttgtgattaattgtagatatttgtttttttagtaagatgtgggatttgggtataatttatttgttagagtttggagaagtgtttttaagtttatggttttgtttgtggtttttagttttgggaagtaggatatttttttttttttttttagtgg

SEQ ID NO: 2428 - DNA, 2339 bp, Artificial Sequence
  chemically treated genomic DNA (Homo sapiens)
ttgttatttttttttttatttattttaagagttattattgggtagtggtaatttatttatggggttgttgtttagattaaatgagttaatatagataaagaataatgattggtatatgggaagtgttaagtaaagattagttattatggtttatttattttttttgaaaaaattttatttaaagatatatattggttaggtgtggtggtttatatttgtaattttagtattttgggaggttgaggtagaaggattttttgaggttaggagttttagataagtttggttaattaatatggtgaaaatttatttttattaaaaatgtaaaaattagttgggtatgttggtgtatgtttgtagttttagttatttaagaggttgaggtaggagaattatttgaatttaggaagtggaggttatagtgagttgagattgtgttattgtattttagtttgggtgatagaatgagattgttttaaaaataaataaataagtaagatagatattattatttagtttatagagatgtaattaaattaaagaattttagaagggtaattatatatatatataaatataaatattttttaaatgaaaaattaaataataaaattagaaaaatatagttaagtatattttaatgtagttatataatttaattaaaatataagttaattattgaaatagaagatttataatatatattagagaattatttaagtttaaaattttaaattatttgataatttggaagtatataaaatggtgggataagagaaattaaaaagtttttaagttttttattttatatttttgataattagaaataaataggtttaaatataaattttagaaaaataagatgtattttatttataaagaaagagatgtatttttaataattatagtatttgttttttataaatgagataaattaatatatagtttttttttaatatagatgttttttagatgtttaatagtggtttaattttttttatttttatagtgtttttaaagtttgttggtatataaatatgaatgaatgaataatgtagaatttatttaagaaattttaaggagagagaggaggagatttatattatatagtaaataatttaataaatttgttaaatgttatgtatgtgaataggtgtttttttttttttgattttttttttttatatagaatttagtgttttttttttgttttttgttatagtatttattgtttttttttttttatgttggggagtagttgaggtttgtgttttttagtggatttgttaaattattttttttagtatgttgtttttttttttttatagattatttgttaagaaaatatattttttatgttgttaatttatatatatatgtgtattatatatatgtttatataatgagagattgttaggaaaattattattatatatatatgtattatatatattatatatatatatatatgtattatatatatatttgtatatatatgtatatggaaaattgttaggaaaaatagtatagtggtagtgttagtgttggttgttttttggtggtgagattatatatttttttttataattttttgtatttttttaattttttgtgatttatatatgtttttaattattaaaagatgttgaaatttaaattatgttttatgtatattttatatttttatttaaagtttttttatggttttttatggtttgtaggatgatgtttgatgtttagtttaagagttttttttttttattttttatttttttgttatttgtagtttatgttttaataatattagagtgttttttgtgtatatttagttgatttatgtttttttgtttttgtttatatgtttatttttatttggaagataatttttttttttttggtgatttttatattatttttttttttttagagtaggtatagttgtttaggaaatatttttggttgagttttttatgggttttaattgtattttattttgaagatgaaatgatttgtgtttttgtttatttttttttttggatggtaagtttttaaagggtagaagttatattttattatttttatattatagtttttagaaggttttgttaatatgatataagttgtaaaaattgaattaaatttaagtgatattagaagtaaaagatttttggtttatagtgaatatataaagtggataaagaagttttttttttattttatgtatgtttataatattattttgattaaatatttaaattgggattgttaagtattaagatttaaaaatatttgttttttgagagataaaatagatattattagttgaaaataatgttttt

SEQ ID NO: 2429 - DNA, 2339 bp, Artificial Sequence
  chemically treated genomic DNA (Homo sapiens)
ggggatattatttttaattagtagtatttgttttgttttttaaaagatagatatttttaggttttggtgtttggtagttttaatttgaatatttagttaaagtagtgttgtgaatatgtatagaatagagagaaagtttttttatttattttatatatttgttgtggattagaggttttttatttttagtgttatttgagtttagtttgatttttgtagtttgtattatgttggtagaattttttagaagttatgatatgaagatagtaaaatgtggtttttgttttttgggaatttattgtttagaaaggagggtagatagaagtatagattattttatttttagggtaaaatgtagttagggtttatggaaggtttaattagaaatgttttttgggtagttgtgtttgttttgaggagagaagggtggtgtgaaggttgttaggggaagggaaattattttttaggtggaggtagatatgtgagtaaagataaagagatgtgaattagttgggtgtgtataggaaatattttggtattattagggtatgagttataagtgatagaggggtgggaagtgaggagaggaagtttttaagttgaatattaagtattattttgtaggttatggagaattatgagaaagttttaaatggggatgtaaaatgtatgtagaatatggtttaaattttaatattttttgatgattaaaaatatatatggattatagaaaattaggaaaatatagaaaattatagaaaaaaatgtataattttattattgaaagataattagtattaatattattattgtgttgttttttttaataattttttatatgtatgtgtgtgtaggtatatatataatgtatatgtatgtatatgtaatatatataatgtatgtatatgtggtagtgatttttttaataattttttattgtataaatatatatataatgtatatgtatatgtaaattaatgatatgaaaaatgtatttttttaatagatgatttgtggaagggagagagtagtatgttggaggggatgatttggtaagtttgttgaagaatataagttttgattgttttttggtgtggaagaaggaaggtgataaatattgtaatggaggatgaggaaggagtattgagttttatgtggaaagaaagggttaaaaagaggaaaatgtttatttatatgtatggtgtttaatagatttattaggttgtttgttgtgtgatgtaaatttttttttttttttttttgaaattttttgagtgaattttatattgtttatttatttatgtttatgtgttagtaagttttgggagtattgtaaaaataaaaaaggttagattattgttagatatttgggaaatatttatgttagagaaggattatatattaatttattttatttatgggaggtaaatattatgattattgaaggtatatttttttttttatggatggagtatattttatttttttaaaatttgtatttgaatttatttatttttaattgttaaaaatgtgaagtgagaaatttaaaaattttttagttttttttgttttattattttatgtatttttaggttgttaaataatttggaattttagatttagataattttttaatgtatattatagattttttattttaataattagtttatattttaattaaattgtataattgtattaaaatatatttaattatgtttttttagttttattatttggttttttatttaggaaatatttatgtttgtgtgtatatatagttgtttttttagaattttttagtttgattgtatttttatagattagataatggtatttgttttatttatttatttatttttaagatagttttattttgttatttaggttggagtgtagtggtgtaattttagtttattatgatttttattttttgggtttaagtgatttttttgttttagttttttgagtagttgggattataggtatgtattagtatgtttagttaatttttgtatttttagtagagatgggtttttattatgttggttggttaggtttgtttggaatttttgattttaggggatttttttgttttggttttttaaagtgttggaattataggtgtgagttattatgtttggttagtatatgtttttgggtaaaatttttttagaaagagtgaataaattatgataattgatttttatttagtattttttatgtgttagttattattttttatttgtattaatttatttaatttagataataattttatgagtaagttattattatttagtagtggtttttgggatgggtggaaggaaggatgatga

SEQ ID NO: 2430 - DNA, 2463 bp, Artificial Sequence
  chemically treated genomic DNA (Homo sapiens)
gatttttttgtgagggggtgtatttataagagggattggatggagtggttggtttgtagagttttagttagttgtttgatgtggttggggttggatatgatgtttaggttaaggttgagttgtgttagggatgtggttttggttagggtttggtagatgtggttaaagttgtggttgtagaggtggtagttgtgtagtgagagtaggtgtatggtgttgttgtgaaggttgtggtagatgttttgtattttggtgttggatagtggtttttttgaaatttggatggagttgggtagtattgtgtttatggttgggtttttgggtatggggttggaatggaggttggtggggttgtgggtggggttggggatagggttggggttggggttttggtaggggttgtgggtggagtggggttgggggtggaggtggtggttgtggtggaggttgtggttgtggtggaggttgtggtgggggtggagaagagttattgggattgagttggagttggttagaggtgtggaggtgtttagggtgtgggttgggttgaagtggggtggtgttggggtgggggtggtttgtatggtttgtgtttgggtgttggggtgggtgtgtgttttgggggttgggtaggtgttgtttggtgtttgtttttgttttttgtggttgtggtggtggtggtggtagtggtagtgagtggtttaagggttttggtttattggttttggttaggaggttgtatttgttttttttttttttgttgtttggttttttttgattattttgtgggtttggttgtatggttggtagagagagtttgaggtgggtggttggtggtagttttggttttagttttagagagtgagtgggtggtgagtttttatggtaatggttgtgttattggtgtttgttttgttttttgtttggttaaggttatgttggtttgtgaggtttgtgtatattgggtggtttggggtaaggagttgggagtgataggttgttttttttttgggagtggggttagttaattggtaggtggtaggtggtagggttgagtgggtagggttgatggggagtggaatggaggtatgttttgtggagatggtgttgggtatggttattgttgtttttgtttatttttttatttttttttgtttttaaggtttatatttttgttggaatttagggtattgtttttttttatttggaaggttttagggtttttttatttgtgttgtgttttgtttttgtttttgtgatttgaggtgtagtgtgtgtggtgattttggtttatggggatttttttgtttgttttttgttaagatggtggttttattagggaggttttaggggttatggttgggtagagttagtttgagttgttggggagaagggtattttatagggtttttagggtaggggagttttagatagatgtaaggttttggtgttatatttttttaggtatgtagggtattgttgatatttgagggtgtgtttgtgttgtgagattggggtagttaatataaagaaggtgttagggttagggttttggagtattggtgaggatgtgaaggtggttgagttatattgtatggtgtaggtggtgttgttttaattttgttttttggttagggtggtgggggatttatttgtgtaatgtaggataaatgaagggtatttttgtttgtttttttgttaggagggatagatgttgttgatttagatttattagtgttaagatgattattttatataaaatataatatttaatatagtgaagggaggttaaaggttttatttttatttttagttatttgaattaatttattaagtggagtatattaaagaggtggtgggggtggatggtgttatgttaggagtggtggttggttttaagaggaaagatagaaaaattaaaaggagttggttttagtattattaaggtaaagttaaatttggttttaattaagagttttataggaaaattattaatataatgtttaggtgtagaagatttttgttttgatatggggtttaagttgggatgttttgtttaattgttattgtttttttggttttttaagagagtagttgagtttagatttaagttggttgtagtgttttattaggtttatggtttttgtgtttgaggtttttttgttgttttatgggttaggtgtgatatttaattattgttttttatgtagtttggtttgttttatttttattttgtttgggtgaggatatgaagaagggaatatatgatattattattgttgattgagtaggaaagtatataggaagtgggatgatagggaggattattggattagttgttgtagttttagattttaattaatattttaattattaagtttatatttagtaagataatgtgggagagataaagaggaaggaaggggtaggtggggaggggtttttaaaggagttgatttattt

SEQ ID NO: 2431 - DNA, 2463 bp, Artificial Sequence
  chemically treated genomic DNA (Homo sapiens)
aaatgggttagtttttttgagaatttttttttatttatttttttttttttttttattttttttatattgttttgttaaatatagatttggtaattaaaatgttgattgaagtttggaattgtagtggttgatttagtggttttttttgttattttgttttttatatatttttttatttagttaatagtggtaatgttatatgtttttttttttatatttttatttaggtaagataaaggtgggataggttagattatatagaaggtagtgattgaatattatatttgatttatgaagtggtagggaggttttaagtataaaagttataagtttgatggaatattgtagttagtttgagtttgggtttagttgtttttttgggaagttaaggaagtagtgataattgaataaaatattttgatttaaattttgtgttaaaataaggattttttgtatttgggtattgtgttgataatttttttgtggagtttttaattgaagttaaatttggttttgttttggtggtattggggttagttttttttagtttttttgtttttttttttaaaattaattattatttttaatatagtattatttatttttattatttttttaatatgttttatttaataagttaatttaggtggttaagagtgggaatagggtttttgatttttttttattatattgaatattatattttatgtaaaataattattttaatattagtaaatttgggttagtagtatttattttttttaataaagggataaatagaggtgttttttatttgttttgtgttatataagtgagttttttattattttggttagaggataaagttgagatagtattgtttgtattgtgtagtgtggtttagttgtttttatgtttttattagtgttttagggttttggttttggtattttttttgtattggttgttttagttttgtggtatggatatatttttagatgttaatagtgttttgtgtatttgagaaggtgtggtattaggattttgtatttatttgaggtttttttgttttagggattttatggggtatttttttttttagtagtttaagttggttttgtttagttgtggtttttggggtttttttgatgaggttgttattttggtgaggagtaagtggggaagtttttatgggttgggattattatgtatgttgtgttttgagttatgggggtgggagtgaggtgtggtgtggatgaaagggttttggggttttttaaataggagggaatagtgttttggattttggtgggggtatggattttaggaatggggaaggatggaagaatgggtagaagtagtagtaattgtgtttaatgttatttttatggggtgtgtttttattttgttttttgttagttttatttatttagttttgttgtttgttgtttgttagttggttgattttatttttaagggaagagtggtttattgtttttagttttttgttttgaattatttagtgtatgtgaattttgtgggttggtgtggttttggttgggtagggggtggggtgagtgttggtgatgtggttgttgttatgggaatttgttgtttgtttgttttttggagttggagttggagttgttgttagttgtttgttttaggttttttttgttagttgtgtggttaggtttgtggggtggttggggggagttgggtggtagagaaggagggagtgggtatggttttttagttgagattggtaagttgaagtttttgagttgtttgttgttgttgttgttgttgttgttgtgattgtgagggataaggataagtgttgagtagtgtttgtttaatttttggaatgtgtatttgttttaatgtttagatatggattgtgtgggttgtttttgttttagtgttgttttattttagtttggtttgtgttttggatgtttttgtatttttggttggttttggtttagttttggtagtttttttttgtttttgttgtagtttttgttgtagttgtagtttttgttatagttgttgtttttatttttggttttattttgtttgtgatttttgttggggttttgattttggttttatttttggttttgtttgtggttttattaatttttgttttggttttgtatttggaggtttagttgtgggtatgatgttgtttagttttatttagattttgggggagttgttgtttggtgttgaggtgtgggatatttgttgtggtttttgtgataatgttgtgtgtttgtttttattgtgtggttgttgtttttgtgattgtgattttggttgtatttgttgggttttggttggggttatgtttttggtgtagtttaattttaatttgggtgttgtgtttagttttagttgtattaagtagttggttgaggttttgtggattaattgttttatttagttttttttgtgagtgtgtttttttgtaagggggtt

SEQ ID NO: 2432 - DNA, 2458 bp, Artificial Sequence
  chemically treated genomic DNA (Homo sapiens)
atatgaaattgttgtttaataggtgaagatgtttatgattttgtgttatttttggtttttaggtttagtttttttttattgtagagagaaagagagaaattttatatatatatatatatatttatatatatttttttttatatatttagatttagtatttttgtataaaggtttatttttttttttttatttttatagtttttttttttttttttatttttttatggtttttagtgttttattttttttatttagaattttttaaaggaagaatgggggtgttggtggttttgggatgggtaattgaggtttggtttagggtttgtttttttatgatagataaaattattgaagtgattttattgttgtttttaattagaggggagttttaaaagaagttatgggatttggggtttttggagttgtatttggttaggagggaggtgagggtgaggagattggttttgggttatatttttttagagatggtgttagttttattttgtggttatgagattgaattgttttgggtttaggtttgggatgtttgggttaggtttagttatttttttgggttgttgttgttgggatttggagatgaataaagaattagttttaaattgttttttttgatatgttaggtaaatatgtgtaaaaggttagttttatgttgtggagtagagatttgttttttaggtattaaaattttttttttttaattgtgtttgagagtttttgatttttgggttttgtttaggtggttttgtattttttggtttttttaggggtggggtggaggtgtttttttttggagtttttttattggttttgtattttatttatttttgggttataggatttttattttaatgtttattttttagttgatttaaaattttttgggatttgttttagaattttggttaaggttgggggtttttgtgggtagtttttttggtttgttttgttttgttgagaatttaaataaattagatgaagtttttaatttttaagtgtattttttttggttttttttagatggtggaaatagggtggtgattaattttttagagtggaagatatgtatgaagggtgtatttgtagttttttgggatttaggtgggggttgttgtgtttttttaaaagtgagtggtggttttagtttgttattgttttgttttgttagtttggaggaaattttggttggaggtgattttgggtttagttggatgggttgggttgagtttaggaggggttggtagatgtgttttagggttagggtggggtgtagggagtgttgtttttatttttagtatttttggggtgggggatttgagtgtgtggagagtgggaggtagagttgagagtggggttaagtgtgaagttaaggtgttgtatagggttgggtgggaatggatagggtgagttggaagtgaagtattttagttaggttttaggagagaggattgttggtatttgtgtatattttagtgggtggatgatgtgggagagaggtggagggaggtgaaatgtgggagttagaatttagttttgtagtgaggttatttggggtttgtatttagttttgatatatatatgtaggggttgtgtgattttggggaagttattgattttgtttgaatttttgttttttggtttgtaaagtggttaattggtgggaatttaataggagaatgtgtgtaaaatgtttagtatagtgtttggttaataatgtgtttttaagaaaggttgttgagttttgtttaggatggtttatattgttttatgtttaagatgagtttatagtgtttaagatttgtttaatttaagatgatgtaaattgtattgttttttttagatatgtagtagttaggagttggttatttgtattttttgtgattttttttttagaattttagttttgttagatttgtgtttttttttggttttttaaatatttgttgtattgtttagagtttttttttattttgattttttttgtagttttgtattagtgagattgtgttttgtggtattttgggggtgttatgattggtgggggatgggggatgttttttagttttatttgttttttgggttttagataattattttggagagttagttgtttttagtgtgggtaggtttaaggttattaattgtatttggtgatttatttttgtttttaagaggttttggaaagtgtggttttgggttttttttgaaatagagatttgtggtattttgtttttttttttgggataggagagggagagttgtgggagttttgtagttatttttggtgttgttattatgaagtaggtttattagttaatagggtttgggatattgagttgtgttgtaaatttttttgtgttttatttaatgagggaagtttgagttgtggtgaggggtgggatgatttggtgttgggttgagtggagtttttagttttagg

SEQ ID NO: 2433 - DNA, 2458 bp, Artificial Sequence
  chemically treated genomic DNA (Homo sapiens)
tttgaagttgggagttttgtttaatttaatattaggttattttgttttttattgtagtttaggttttttttattgagtggggtatagaaaagtttgtgatatggtttagtgttttaggttttgttagttagtgaatttgttttgtggtggtagtgttaggagtggttgtggaatttttgtggtttttttttttttattttagggggagaagtggggtgttgtgggtttttgttttaaaagagatttgaggttgtattttttgaggttttttgggaatggaggtgggttgttaagtgtagttagtggttttgggtttgtttgtattgagagtagttggttttttggaatggttgtttggaatttggagagtggatgaagttgggaggtattttttattttttgttaattgtggtatttttgaggtgttatggggtgtagttttgttggtgtggagttgtggaggaggttggggtggggaaaggttttgagtggtgtagtaggtgtttgaggagttagggaaggatgtaaatttggtaggattggggttttgaggaggaaattgtgggaggtgtagatgattagtttttggttgttgtgtgtttaagaagggtaatgtagtttatattattttaaattgaataggttttgggtgttgtgaatttattttggatgtggggtggtgtagattgttttggataaggtttagtagttttttttgagagtgtattgttggttaggtgttgtgttaagtgttttgtgtatatttttttattgaatttttattaattagttattttataaattaggaaataggagtttagataaggttggtaatttttttaggattatatagtttttatatgtatatattggagttgaatgtagattttaagtgattttattgtaaagttaaattttagtttttgtattttatttttttttgttttttttttatattatttgtttgttaggatgtgtatagatgttgatggtttttttttttaaggtttggttggggtgttttgtttttagtttattttgtttatttttatttaattttatgtggtgttttagttttgtgtttaattttgtttttagttttgttttttgttttttgtatgtttaggttttttattttaaaagtattgagggtggagatggtgttttttatgttttattttggttttgggatatgtttgttagttttttttaggtttggtttggtttgtttggttgggtttgaggttgtttttagttagagttttttttgagttggtgaggtgaagtggtggtaggttgaaattgttgtttatttttaagagagtatagtgatttttgtttgaattttggagagttgtaggtgtgttttttgtgtgtgttttttattttgaaaagttagttattgttttatttttattgtttggaaaaagttagggaagatgtatttaggagttaaaaattttatttaatttatttaaatttttagtaaaataaaataaattaaaaaaattatttatagaaatttttagttttgattaagattttaaggtaggttttagaaagttttaaattaattaaaggatgggtattgggatgaaagttttgtagtttagggatgaataaaatgtggaattgataaggggattttagggagaggtatttttattttatttttgggaaggttgagaggtgtaaagttgtttggatagggtttaggggttggaggtttttgggtatggttagaaaggggaggttttggtgtttgggggataggtttttgttttatagtgtggagttgattttttatatatatttgtttgatatgttagagaagatgatttaaaattggttttttgtttgtttttaagttttggtgatagtagtttgggagggtaattgggtttggtttaggtgttttaggtttagatttaggataatttgattttatagttgtggaatgggattggtattgtttttgggagagtgtggtttgaggttaatttttttatttttattttttttttggttaggtgtggttttgggagttttaaattttgtggttttttttaaagtttttttttaattagaagtagtggtgaaattattttagtgattttatttgttatgggaaagtaaattttaaattaaattttagttgtttattttagagttattaatgtttttattttttttttaaaaagttttaaatggaaaagataaagtgttggaagttatagaggagtgggagaggggaagggaattgtgaaagtaggaagaagggggtggatttttgtatagaagtgttaagtttgagtgtgtaagagagagtgtgtgtgagtgtgtgtatgtatgtgtagagtttttttttttttttttatgatgggaggagattaaatttagaagttagaagtgatatagaattatgaatgtttttatttattgagtaatagttttatgt

SEQ ID NO: 2434 - DNA, 2656 bp, Artificial Sequence
  chemically treated genomic DNA (Homo sapiens)
attatattgaatttaattttttttttaattattaaggattttagatttattgttaattttttttttgtatttatttttattgtttagttttgggttaaaagatagtggggtttgaatgaagtgtttataaagtatagtatttggagaagttttgttgttgttttttaaaataatttttttaaaaagggattttggatattttttttgtttttttaaaaaattttttttttatgtatgagaaatatagggaaaaaaagtaattaggttaatgaattattttggtttattggattttaattggtagagaatttaaatttaaaaattaaataaaatgaaagagttttttagttattttatgttgtaaatgagttaaaagttttgttatttttgaaaaattaaagagtattatttgtatatggttataattgtaaaggaaataatggtgtatttaggatagggggagtttattttaagaagttgtgtttttttggattatgtttttttggggttgatttttttggggagtttggtttttaaagtgtggattttgtgatgtgtggtttgtaggattgtggggtttggtggttgagatgtggtatttataggggtttttttgtgtggttgtggtggtggtggtgggaatttgggattggttggtgaggggttttgtatggtaattgtttttgattgtaagttataggttgtgggtattgtgtagagtgtattttttattgaattttttttattttattttaatttttgagattgaaagtgtggagtgtggagttttgtaaatttgattttgagttaaggtgtgtgaggtgatggtgagtgttttttgggttttttgtagttttggggttggaagttttggtttttgtgtattttgttttttgtttgtttgaaagtgaaatttggttggtgggtaggaggggagagtttggttttgagttttgtttggtggggttttggtttggaggtatttttgatttgtatttggtggtgtgatttatttatttgtttgtttttaaggtgttgttaggagtaatagtagtagtggtggtagtggtagtggttgtagggttgggtggttgggagtttgtatgggtggtggggttgggttatatgttggggggtagtagattgtttagttttatgtttgttggggttaagtgtggttgtgtggttttagttttgtgtttggggttttgtgtgttatgttttaggtgatttgagttttagggtgtttttgttatagttgtgttttttaggtttttttagaaattaagggtgagtgatttgtggagtttttatgtgtgtttttttggttatttagttggatggtagtgtgagggtagtttttgtggatttatagtttttagttatttggttgttagttttgagagtttgagagtttttattttttggggtttatgtttagattaattaggttattaggtaggtaaaatttttttttggtaatgagtgaggtgagtgtattgtaaagagattttggtatttaggttggtttgatggttagttaaagtttaatattggaagatggatgaaatagagtgttattttttgatatatagttaggtatttagttgtagattttatagttatgtattatttaagatgataggattattttttgagaaatgttttaggtgagttttttgtgtgaatattttagagtgtatttatatttatatggtatagttttttatatgtttatgttatatggtataggttgttgtttgtttttaggttataaatttgtatggtaagtgattatattgaatattgtaagtaattgtaatataatggtaaatatttgtgtatttaaatatgtttgaatgtagaaaaggtatagtaaaagtatagtatgaaagattttaaaaatggtatatttgtatagggtattttttatgaatggagtttgtaggattggaagttgttttggttgagtttgtgagtggtgagttaatgtgaaggtttaggatattattgtgtattattataggttgtataaatattgtattatatttaggttatgttaaatttattaaaaaattatttttttaataataataaattaattttagtttattatgattttttattttttatttttaaattttttaaattttatttatttatttatttttgagatggagtattgttttgtagtttaggttggagtgtagtggtgtgattttggtttattgtaatttttgttttttggttttgatgattgttttgttttattttttagagtagttgggattatatgtgtgtgtttttatgtttggttaatttgtttgtatttttagtatagattgggttttgttatgttggttaggttggttttgagtttttgatttttggtgatttattttttttggttttttaaagtgttgggattataggtgtgaattatgatatttgatttaaattttttgatttgtaataatgtttgatttaaaatataaatatattgtgtagtagtatgaaaatattttttttttgtattttttttataagttttttttatttttaaatttttttttttttttattttttttttattttttaaatttttttgttataaattaaggtataattatatatattagtttaggtttgtataggg

SEQ ID NO: 2435 - DNA, 2656 bp, Artificial Sequence
  chemically treated genomic DNA (Homo sapiens)
ttttgtgtaggtttaggttaatgtgtgtggttgtgttttagtttataataaaaaagtttaaaaagtaaagaaaaaataaagaaaaagaaaaatttaaaaatagaaaaagtttatagaaagaatataaagaaaaaatatttttatattgttgtataatgtgtttgtgttttaagttaaatgttattataagttaaaaagtttaggttgggtgttgtggtttatgtttgtaattttagtattttgggaggttaaggagggtagattattggaggttaggagtttgagattggtttggttaatatggtgaaatttagtttgtattaaaaatataaataaattagttgggtgtgggggtatatatatgtaattttagttattttggagggtgagataggataattattaaaattggaaggtagaggttgtagtgagttgagattgtattattgtattttagtttgggttatagagtaatgttttattttaaaaataaataaataaataaagtttaaaagatttaaaagtagaaagtaaaaaattatagtaagttaaggttaatttattattattgaagaaataattttttaataaatttagtatagtttaagtgtaatatagtgtttatatagtttatagtagtatatagtgatgttttaggtttttatattgatttattatttatagatttagttagagtgatttttagttttgtaagttttatttatggaaagtgttttatataggtgtattatttttaaaattttttatattgtatttttgttgtattttttttatgtttagatatgtttagatatataaatatttattattgtgttataattgtttgtagtatttagtatggttatttgttgtataggtttgtagtttaggagtaaataatagtttgtattatatagtgtaggtgtgtaagaggttatattatataggtgtgagtatattttaagatgtttatataagaaatttgtttaagatattttttaggaggtaattttgttattttaaatgatgtatgattgtaagatttatggttgagtgtttaattgtatattgagaaataatgttttattttatttgttttttgatattgaattttaattgattattagattggtttgaatattagaatttttttgtaatgtatttgttttgtttattattagaaggaggttttatttgtttagtgatttggttggtttgggtatgaattttgagaggtggaaatttttagatttttaggattgatagttgagtggttggggattataaatttgtgagaattgtttttgtgttgttatttagttgggtagttgggggagtgtgtgtgggggttttgtgagttgtttgtttttggtttttggggaagtttgggggatgtggttgtggtggaggtgttttgggatttaggttgtttggagtgtggtatgtagagttttaggtgtggagttgaggttgtgtggttgtgtttggttttagtgggtgtgggattgagtagtttgttgttttttgatatgtgatttagttttgttgtttatgtgggtttttggttgtttggttttgtggttgttgttgttgttgttgttgttgttgttgtttttggtggtgttttggggatgggtaggtaggtgggttgtgttgttaggtgtgggttggggatgtttttaggttggggttttgttaggtagagtttgaggttgagttttttttttttgtttgttggttaggttttgtttttgggtgggtagaggatgaggtgtgtggaggttggagtttttagttttggggttgtagggagtttgggggatatttgttgttgttttgtgtattttggtttggggttaagtttgtaggattttgtgttttgtatttttggttttgagaattgaggtggggtggggggagtttggtggggggtgtgttttgtgtggtgtttatagtttatgatttgtggttggggatggttattatgtggggttttttgttggttagttttaggtttttgttattattgttgtggttgtgtggaggggtttttgtggatgttgtgttttggttgttgggttttgtagttttgtaagttgtgtgttgtgagatttgtgttttaaaagttaaattttttgaaagggttagttttgaaggaatatgatttagaaagatgtagttttttaaagtaagttttttttgttttgggtatgttgttgttttttttgtagttatgattatgtatagatagtgttttttgattttttagaaataataaaatttttaatttgtttatgatataaggtaattgaagagtttttttgttttgtttggtttttaagtttaaattttttattaattggaatttagtaaattagaatgatttattaatttgattgttttttttttttgtattttttgtatatgagaaaaagattttttaaaaaaataaaaaagatatttgggatttttttttaaaaaaattattttaaaaaataataataaagtttttttaaatattgtgttttgtagatattttgtttaggttttgttgttttttaatttagaattgaatagtaagagtgaatgtaggaagaaagttgatggtgaatttggagtttttggtagttaaagaaaaagttaaatttaatatagt

SEQ ID NO: 2436 - DNA, 2242 bp, Artificial Sequence
  chemically treated genomic DNA (Homo sapiens)
ttatatatattatatattttatatattatatatattatatattatatatttttatatattatatattttatatattatatattatatatattatatattttatatatattatatattttatatattttatatattttatatatattttatatattttatatattatatatattttatatattatatattttatatattttatatattttatatattatatataatatatattttatattttatatatattatatattttatattttttatatatattatatattttatatttttatatatattatatattatatatattttatgtatattatatattatatatattttatatattatatattatatatattttatatattatatattatatatatttatatatattatatagtatatatatttatatatattatataatatatattttatatataatatattatatatattttatatattatatatattttatatatattttttatatattttatatatattatatatttttatatatatattttatatatattatatatatttagagagagaaagagagaatttgggtattgtgatttatgtttgtaattttagtattttgggaaattgaggtaggaggtttatttgagtttgggagtttgagattaatttgagtagtatagtaagattttattttggaaggagggagggaaggaaggaagggaaaaataatatttaagtgaatgaatgaatgaatgagaaatagagtgaagatttgtgtgtttaggatttttaattttttttttgatgattagtgttgtttggtggtgaagtttgggtgtgtattatgtgaagatagtaggtagtgtgtaagtggggttttggttggggaggtgggtttaggaggtgttttttgttgtagtatttattgatatttgtgtgttggagaggggaggggagtttgggtgttggttgtgtgggggtggggtggtgtggtttgggtggtatagtggtgaattttgtggtggttgtgtgttgtttatgttgtttttttagttgttgttatttttgtgggttttttttatttaaggggaatggagttgttattttttgttgtttttatagtaattgtagttttgtgtggggagtgagttagtgaattaggtttggtttgtgtttggttttttgggatatgttggttgtgtggggtagaggtggaagaataggggtttggaggaagagggagaaataggtgatatgattatgtgtttatttattatgtgtttatttagtaaatggatgtttgttgtgtgtaaggttttgtgttagttggggttatggtggtgaaaaggaaaatttataaaattttgagtgtttattttgtgttaagttttatgttagggaaaggatttttttattgttgtaagaaggttaaatgtttgattggttgtttaagagtttatatttgtgttatttgtgtagattgttagttttgtttgaggaataatagggagaggagttgtgagaatagtaatagttttagtaaagagttgttttgtttagtttagtttgggatatatatattgtggtattaggaaaatgtttaaagagttgaaattttgtagtttatttttgttagtgttttttttattttttttaagatttttttattatgtgttatgtttaaattattgggtgtttttaatttattatgtatgaataaaaagaattgttattaattgaatattataattatggattaggtattatgtaaggtattttatgtagattatttaatatttataataatttttagaggtaaatattattttttttttagatgaggaaattgaagggtagagaaattaaagatatttattttaggttatatatataggaatttaaatttattttaaggattagaaaatgaaagagagagagagagtttaaatttagttttgttttattttataagttttataattagttatattattgtgaaagatgaatgtgtgggatattgtaatttggagagaaatttttttttttttttgagatttttgttttgaagaaatatttttattaaagttatgtaatatattaatgttttgaaagttaatagtttttaaatgtaggaataaaaaattaaatatttgtatgtttttatatataagtaggagttaaatgaggagaatttatggatataaagaagggaataatagatattggggtttatttgagg

SEQ ID NO: 2437 - DNA, 2242 bp, Artificial Sequence
  chemically treated genomic DNA (Homo sapiens)
ttttaagtaggttttagtatttgttgtttttttttttgtgtttgtgagttttttttatttaatttttatttatatgtgagaatatgtgggtatttggttttttgtttttgtgtttgaaaattgttaatttttaaagtattaatgtattatatggttttaataaaaatatttttttagaatagaaattttgaaggaaaaaaaaagtttttttttagattgtaatgttttatatatttattttttatagtgatatgattggttatggagtttgtggaataagatagaattgggtttgaatttttttttttttttttgttttttaatttttagaatgggtttgaatttttgtgtgtgtgatttgaggtaaatgtttttgatttttttattttttagtttttttatttgaggaaagaataatatttatttttgaaggttattgtgaatattagataatttatataaagtgttttatataatgtttggtttatggttatagtgtttaattaatggtagttttttttatttgtatatgatgagttaggaatatttagtaatttggatatgatatatggtagaaaagttttaggaggaatgaaggaaatattggtagagatgagttgtaaaattttaattttttaaatatttttttggtgttataatatgtatgttttagattggattggataaagtgattttttattggggttgttattatttttataatttttttttttgttattttttagatagagttaataatttatataaatagtatagatgtgggtttttggatagttagttagatatttagtttttttgtggtagtgaaaaaattttttttttggtgtaaagtttggtatagggtaggtatttaaaattttgtaggtttttttttttattgttgtggttttaattagtatagggttttgtatatagtaggtgtttatttattgaatgagtgtatgatgaatgagtgtatgattatgttatttgtttttttttttttttttaaatttttgtttttttgtttttgttttatgtagttagtatattttaaggagttaggtgtaagttaggtttggtttattgatttgttttttgtgtgaggttgtggttgttatggaaatagtgggaaataataattttgttttttttgggtgagagaggtttgtagaggtaatagtagttggaggaatagtgtgagtggtgtgtagttgttgtagagtttattattgtgttatttgagttgtattgttttgtttttgtgtggttggtgtttgagttttttttttttttttagtatgtgagtgttggtaggtattatggtggagggtattttttgggtttgtttttttaattagggttttgtttgtgtgttgtttgttgtttttatgtgatgtgtatttgagttttgttgttaggtggtgttgattattggggagggggttaggggttttagatatgtgagtttttgttttgttttttatttatttatttatttatttaaatgttattttttttttttttttttttttttttttttttgggatggggttttgttgtgttgtttaggttggttttaaatttttgggtttaagtgagttttttgttttagttttttaaagtgttggggttataggtatgagttatggtatttggattttttttttttttttttgaatatatataatatatataaaatatatatataaaaatatataatatatataaaatatataaaaaatatatataaaatatatataatatataaaatatatataatatattatatataaaatatatattatatagtatatataaatatatatattatatagtatatataaatatatataatatataatatataaaatatatataatatataatatataaaatatatataatatataatatatataaaatatatataatatataatatatataaaaatataaaatatataatatatataaaaaatataaaatatataatatatataaaatataaaatatatattatatataatatataaaatatataaaatatataaaatatataatatataaaatatatataatatataaaatatataaaatatatataaaatatataaaatatataaaatatataatatatataaaatatataatatatataatatataatatataaaatatataatatataaaaatatatgatatataatatatatgatatataaaatatataatatatataa

SEQ ID NO: 2438 - DNA, 2371 bp, Artificial Sequence
  chemically treated genomic DNA (Homo sapiens)
atatataaatagatagttttagtgtagtggatatatatggtaatagaggttttaagatgtataaaaggttgtaggggtttaaaggatggagaaaggatattgattttttttttttaattttttaagttatttgtttattttgtttttttttttttgagattaaatatttttatttttttttaaagatttaattttgttattatggtgtttaattttttttttatattgtgatgttggggaaagttttggggtatttttgtttttttgtgaatttttgaagttttattttaaaaaatatatatttatttttttgtttattgtaaattttgatatttgtaaatattgataataggaattttgaaaaaatatatgtttttagaaataagtaagtaaataaaaatatgtagaatgttagagtttttttttattttatattttttttttaaattgatgttaaggtgggtttagtgagggttagtgatggaatttgtagtttgagaaagatatggtagaagtataaggttagaggttgtttttgttgttttattaaaaataataatttttttttaaatttggattgaaattgatatttaatgttaagtgtgattttagtttaatttgttttggtagatatgtatatattttttatgtgtattattttatgtgattgtgtttatagttttgtgagttgagaggggtgggagtgattatttttaattataagtaaggtttttgggttttaagggttggagattatttagggtttggttagtattagaattaatggtttttaattttaaattaaatgatggtttatgttatattataattttaaataaatgaattgtgatgtgttttatttttttgtgtaagtggaagatgttaatatatgtgtattatgagaaaggattttataattttttttttttgggttttgttgagatgtttttttgatttagagagaattttttaggattagtaagaaaagtatgttattattttttaaattttataatttaggaaatagtttattattttataaaattataaaagtgaattatttgagtttttttattatttgtttttttttttttaagttggttttgtataaatatgatgtatgtttattgggtgataagtttgttgtaagtgaaatgtttataggtattataggaatgatttggtgttttgtttattttattagaattttaattggggtgtgtaggagaggattttataaatggtaaggtaatttttggtagtttgtttgttagtattgtttgtgttatttttagaggagtttgagaagaggtagaggaaggtgaaatatggttggtgagtgtatggtattttttttattaggtttttgttagaagtttgtgttttttttgggttagtttgttaagttagagtgtttggttaggatagttgtttgttttgggggttttgaaggttagattttttattttagggtgttagttagaggtggtttttttttagtggtggttgggtttttttagtatatttttggggtagaatattattggaatgtagttttgaataatgggtagggtgtttagtgtagttggatattgtatttttttaggtagaggataagttttgttttgtttgtgtttgtgttttttttatatatttgttgttatttgtaaagttaaagtagataggatttgggttttgtgttttttagtgtagttgtatttagttgttagtagtgttagtaaagaagtatattttagaattattagggagtgagagtggtaatatgtaagttgatttgaaagaaattattgtttattttaaattaatttatttaggagtattaggaatgtttttaagtaagttatatattagaagtattagataggttttgtgtaagtgatttgatgagttgaagtttttttgtagtaggagtaggtgtgttataagatgttttggtttataggagagtattagggaataggggttataaagaataataggaagtgtaggtttttttattttatgtttattgttgaggatatgggtttttgttaattagtatttttgttaagtagtatgttaattattatttgttttgtgtgtttagtttagtaggttgatagggatgttaaatttaaataagatatgagttaaatttgtaaaatattgtgaatggtgattagggttgttggaagattggttaaagatattattgagttaaatgtaataggtaaatgttggttattttagaagttataaaaattgggataggtgattgtatattaggtttttttttttgttttttattttttgttgtaatgtatagtatggttgggatgttaagaagaggagttttggattttatatattg

SEQ ID NO: 2439 - DNA, 2371 bp, Artificial Sequence
  chemically treated genomic DNA (Homo sapiens)
tagtgtgtagggtttagagtttttttttttagtattttagttatgttgtatattatagtaaggaatgggagataggggagggggtttaatgtgtaattatttgttttagtttttgtggtttttgaagtagttagtatttgtttgttgtatttggtttagtgatgtttttggttaattttttagtagttttaattgttatttataatattttataagtttgatttatattttgtttggatttggtgtttttgttaatttattaggttgagtatataagatagataataattagtatgttgtttagtaggggtgttgattaataaaggtttatatttttgatagtaagtatagagtgggggaatttgtattttttgttgttttttgtaatttttgttttttggtgtttttttgtggattaggatattttgtggtatatttgtttttgttatggggaggttttagtttattaagttatttatatagagtttgtttgatgtttttgatgtgtagtttatttaggagtatttttaatgtttttaagtaagttgatttgaaataaataatggttttttttaaattaatttatatgttattatttttattttttggtagttttgagatgtgtttttttgttgatattgttgatagttggatatagttatattgagaaatatgagatttgagttttgtttgttttggttttatgggtggtgatggatgtgtaaaagaaatgtaaatataaataaggtaaagtttgttttttgtttaaggagatgtgatgtttagttgtattgaatattttgtttattatttagagttatattttaatgatgttttattttaagaatatgttagagggatttaattattattgagaaagagttgtttttggttagtattttaaaataggaagtttggtttttagagtttttaaggtaggtagttgttttggttggatattttggtttggtaggttggtttaggggaagtataggtttttggtaaggatttgatggagaagatgttatgtatttattagttatgttttgtttttttttgtttttttttaggtttttttgggaatggtatggatagtgttgatagataggttgttaaggattgttttattatttatagaatttttttttatatattttaattagaattttaatgaagtgggtgaggtattaggttatttttgtagtgtttgtaaatgttttatttatgatagatttgttatttaatggatgtgtattatgtttgtataagattagtttggggagaagggggtagataataaagaaatttaaatagtttgtttttataattttataaaatgatggattattttttggattgtagggtttaggaaatgatgatatgttttttttgttgattttgggaagttttttttgaattaaagaaatgttttagtagaatttagaagaagaaaattgtgaggtttttttttatgatatatatgtattagtattttttatttgtatagggaagtgagatatattatagtttatttgtttagggttgtagtgtggtataaattattatttgatttggaattagaagttgttggttttgatgttggttgagttttgggtggtttttaatttttgaagtttggaagttttgtttgtggttggggataattatttttattttttttaatttataaagttgtggatatgattatatgagatggtgtgtatgggaagtgtatgtatatttattagggtaggttaaattgagattatatttggtgttgaatgttagttttagtttagatttgggggaaaattgttgtttttaatgaggtagtaggaatagtttttaattttatgtttttgttatgttttttttagattgtaggttttgttattgatttttattgggtttattttgatattagtttaaagaaagggtgtggagtggggagaagttttgatattttatgtgtttttgtttgtttgtttgtttttaagggtgtatgtttttttaaagtttttattattgatatttataaatattaaggtttatgatggataaaggagtgagtatatattttttaaagtgaggttttaaggatttatgagagaatagaaatgttttaaggttttttttagtattatagtgtggaaggaagattgagtattatgatgataaggttgggtttttagagagaagtgagaatgtttgattttgagaaagagaagatggaataggtaggtggtttggaaaattgaaaaagagaaattagtgttttttttttgttttttaggtttttatagttttttgtatattttagaatttttattattgtatgtatttattgtattggaattatttgtttatatat

SEQ ID NO: 2440 - DNA, 2419 bp, Artificial Sequence
  chemically treated genomic DNA (Homo sapiens)
ttagggttgttaggttttttttagttttgtatttgttgtgttgttttattttgttaggaagttttagagattttggggatggggtgggagtgtttttttattgtgggtttaaaaagaaggaaggatgtttttaggggttgtagaaggaggattagttttaagttataattttttttggatttaaggtaggttggttggggttttgtgtttatatggtttttggtgggggtttgtgtgttttgggagttttgtggtttggggaggaaagaggagataagagataggtgaggattatggggttgatttagttggggtagggattattgtggaaaaattttggtgaggtggggggatgtggaaagagagtggtttgtgttttgtattttgtgttgggtattttgtgttagtgttttgtttttagtgttttgtgttttgtgttttgtgttttgtttttattttgggttagttgtattgtgtttgtgttgtaggaattgtggagttggaaagtgggggtgttgtggttggggggttgttttagttgtgttttggttagtgattggtgggttgggtttaaatttagttaggttgggtaggtggtggttgtgtgattggggattgggtgttttgttttttttgtttttttttttttttttttttttttttttagttttttggttttttttagtttttattggatttgtttgtttgttgttttttttttttttttgttttttatattattttttatttttttgttttgtttttgtttttttttttttttttgttttttgttttttttttttttttttttttttttaggggtggagtttttttttttttttttagataatgttgtggttgtgtttttttttttgttagtttgtttaggtttttgttgttagtgatttttttgggttgggggtggggaggtggggggggagtgtagggttggggaggatgagttggttttttttatttttttgttgttgttttttttaagagggatggagatttggtttaagttttttggtttatttggagttgtgatagttatttttagggaatagttatgttgttttattaagtttatttttagtggtttggattttttaggtagaggttgtgggattttgttttttttaatattttagtttatttttaaaagggtttgagttggataggggttaaataggtttttttgatttggtgggttggttagatgtgatagtaatgttaaggaggttaagtttttttgtttattttttattttttttttttttatttttggattttttggtgtttttagtatatagaggtttttgagtagtttggttgtaggttttttatttatttagagtttttttttttatgtgtttatttttaattttgtagtgtttgtggattaaaggggaagggagttttaggttaatttttaaggtatagttagattagtttatttagtttggaagttaagtattttttattaaatttattgtttggattttggaatgtgttttttttagaaataatgttataaatggtgatttgttttttaggttagttataaaagtttgttgaatttaaaatgtagttgtagggtggtgttgagaattgtgttagttattttgaaaaaggaggttattgattagttttatttgtagaaaaaatatgtatatattttttggttttttttttttgggttataaatattataaattaaataagttaaagtttttttattaagtttttttatatggatttattattttatgtgttaagttttttttttttgtaggtaatagaaataattttgggggaatgtatttgtagatgtagtggttttttgataattttatttaattttagtgttagaattgtatggagagtttagtataagaggtaaatttagagtttaaagggttttttgtaatttagaaagttttttttgaggggttttttttttttttttattatagattggttttttttgtattttagatatttggtgaaaggtggttatgatttttatttttggggtttggagttttgttgtttaggaaagtagttagatgttgttagaattttttattttttaatttaattttttaaaagagtagtttatttttttgtgatagtggggttagggatgagtttaggttgtatatattgggttattagaaattttgaatttaggttttatttaaaattaaatttattatttttgtttttgtttttgttttgttttgtaattttgagatggggttttattttgttatttaggttggagtgtagtggtatgattatagtttattgtagttttaattttttgggtttaagagatttttttgttttagttttttgagtagttgggattatagttatgtgttattatggttagttaatttttgtattttttgta

SEQ ID NO: 2441 - DNA, 2419 bp, Artificial Sequence
  chemically treated genomic DNA (Homo sapiens)
tataaaagatataaaaattagttggttatagtggtatatggttgtaattttagttatttgggaggttgaggtaggaggattttttgagtttaggagattgaggttgtagtgagttatgattatgttattgtattttagtttgggtgatagagtgagattttattttaaaattataaaataaaataaaaataaaaataaaagtaatgggtttagttttaaatagggtttaggtttagggtttttggtagtttagtatgtataatttgagtttatttttagttttattgttataggaggatgagttgtttttttgggagattagattagagaataagggattttagtagtatttggttgtttttttgagtagtagagttttaagttttggagatagaagttatggttattttttattaagtgtttggggtgtagggagggttagtttgtgatgaaggagaagaaagaattttttagggaagattttttgggttatgggaagttttttaggttttggatttgttttttatattgagttttttatgtagttttgatattgagattagatgagattattgagaaattattgtgtttgtaaatgtatttttttaaggttatttttattatttgtaaaggaaagaagtttaatatatagagtagtgggtttatatggggaaatttaatgggagaattttaatttatttaatttatagtgtttatagtttaagaagaaagaattagaagatatatatatattttttttataaataaagttgattagtggtttttttttttagggtagttgatatagtttttagtattattttatagttgtattttgggtttaatagatttttgtggttggtttgggaagtagattattatttataatattgtttttaagggagatatattttaagatttaaataatgaatttagtaaagaatgtttggtttttaggttggatgagttggtttggttgtattttgggggttggtttgaggttttttttttttttggtttgtagatattgtagggttggggataggtatgtgagggggagaattttgagtagatagggaatttgtagttgggttgtttaagggtttttgtgtattgggggtgttaggaggtttagggatggaaaagggggaggtgagaaatggataaagaaatttggtttttttggtattgttgttatgtttggttggtttgttaagttgaaggggtttgtttagtttttgtttggtttaaatttttttgggaataagttgggatgttagaaaaaataaaattttataatttttgtttggggaatttaggttgttggaggtgggtttggtagggtagtgtgattgttttttgggagtggttgttatagttttgggtgaattgaggagtttgggttaagtttttattttttttggagagggtagtagtaaggaggtgaggggagttagtttattttttttaattttgtattttttttttatttttttatttttagtttggaagaattgttggtggtgggagtttggatgagttggtggggaaggggatgtagttatagtattgtttgggagggaggggagaagttttgtttttagaggggaggggagaagaggagggggtaggagataaggggaggaagaaaggtgaaggtaaggtgaaggggtggagagtgatatgaagagtgagagaaaagagaggatagtggatgagtagatttggtaggggttgaaaaaggttaaggggttggagggagggagaggaaggaggaggggagtgaggagggtggggtgtttggtttttagttgtgtggttattgtttgtttagtttggttggatttgagtttggtttgttgattgttggttgaggtgtagttgaagtagttttttagttgtggtgtttttattttttaattttatggtttttgtggtgtgggtgtgatgtagttggtttggggtgaaggtaaggtgtggggtgtggggtgtggggtattgggagtgaggtattggtgtgggatgtttggtgtaaggtgtagggtgtgggttgttttttttttgtgtttttttattttgttaaagtttttttatgatggtttttattttggttgggttagttttgtaatttttgtttgttttttgtttttttttttttttttgagttgtggggtttttggggtgtgtggatttttgttaggggttgtgtaggtgtggagttttagttggtttgttttgggtttgaagaaagttgtggtttggagttagttttttttttatgatttttgggggtgtttttttttttttttgagtttgtgatgggaaggtgtttttattttatttttggggtttttgagattttttggtgaggtggggtggtgtggtaggtgtagggttggggagggtttgatagttttgg

SEQ ID NO: 2442 - DNA, 2480 bp, Artificial Sequence
  chemically treated genomic DNA (Homo sapiens)
tagtatgaaatataaggtttagtatatattattatttaaatgttttttgtttgaataaatatatgattgttagtgaatatttgttgaatgaataaaggggttatatttaatagttaattgtagtgtttatgttatttaaatatggtggttttttaggtgtttttgttttagtttttgagagttttgttttttttttattgggatttagatatgtagttataaggagttaaattttatagaggtgtgtaaagatgataagttataggtagtagggtggtaattaatatttttttgtttggatattgagatttttatatttgttggataatagtgaatttataagggattatatatttaatggtaatatttatatataataaatatttatttaaaaaatttatatgaattaattaatttttagaatgtttttatatgggattttttattagtttttgtatttataagtatttattgaatattttttgtatattaagaattagttattttttaaaattttggtgagattaatagattttatattattagttagtgagtttttttaaaagtgttggtttatttataattagtgagttgtattttttttgtggtattggttagattttataaattgtagttttttgtttatttataatggatttagatttttggatgagatgtattatatatgtgtgaaggattagagggtattttttaataataataggaataatattgttttgtgttgttaaattgtagatttttttttttaaagatttaaagtttattatagatataatttgattgttgttgtattgtaatagtgtttttttttttttttttatttaggtagattttttttttgattaaagatggtatgaatatttttttatgttatgatttatttgataaatagtttaggatgttataaaagtaaagtaggagatgttttaaataattagtggtagaaagtttgttgttgtttgggtgttaattttgttagaaagtttagatatttgtgggttgtattgtaaatttttgtatagatgtgtgtgaggttgagttttagttatatgtttgtaatagtattaggaaatattttgttatgttatttttttgggtgattttttatgattaaaagaaaaaaaaagttatatttttgttttgtgaaattgagtttgaattttgggtagtttagtagtaattagtatatgtttgaattatagttgtgtgggatggtttgtattatatattaatggtaattattgttttaaatatggaaattaaatattttaggtttaggttgattttaatttgtgggtaggaaatgtttgatttattttaagataagtttaaaagtgtgtggagttttttttggggttataaattttgtttatatttatatgtattttttttgagatagttttttgaggttttttggtagttatttttttgaatgtgggaagagattgggatttttaggaatgtaaaaaaggagaaattaaaatgtttttagaaaattttagggtgtggttggtttagagatttaatttaatagttttaagatttaaaagatgagtattaaattatatttggtttttttttttttaggtatgagatatttatatttatttagaattagtttttaatttggaagttttttgtgtttttagtatttttagattttgtattaaattttttgtaaatttttttaataatgagtagttatgtatagtattatagttgtggttttgatgtttttattattagttgattattttggttttgtttttttgtggttttgtggttatgaaataatattttaataggtataagatgattggtgaaatttatttagtaagttttgggttttttttaatgtgtataattagtgtatattatagtttatttaaaaatgtgttaatgggtgaaattaatatgatattttagaagttgttgattatttatttatttttttgagatagggttttattttgttatttaggttgtagtgtagtggtgtgattatggtttattgtagttttgatttttttaggtttaggtgatttttttagttttttgagtagttggttttataggtatgtgttattatatgtggttaatttttgtattttttgtagagatagggttttattatgttgtttaggagggttttgaatttttgggtttaagtaatttatttgttttggttttttaaggtgttgggattataaatatgagttattgtgtttggaaagaagttatttattattattttgttagataatttgtttgtgattttttaaatatttaatagaatatgttgagttttgtttttatttttttatttattttggaggttatttgtaatgttggtggatgtttttagttatattaatagttttttattttaggtatttgtgtttttttgtttgagggtttttattggtttgagggtttttttagtttggtttggggtaggt

SEQ ID NO: 2443 - DNA, 2480 bp, Artificial Sequence
  chemically treated genomic DNA (Homo sapiens)
atttgttttgagttaggttgagagagtttttagattaatgaaagtttttagatagagggatataaatgtttgaggtgggaagttgttggtgtgattgaaagtatttattaatattataggtgatttttaaaatagatggaggggtaagggtagggtttagtatattttgttaggtatttaggaggttatagatagattgtttagtaagataataatagataatttttttttaggtataatggtttatgtttgtaattttagtattttaggaggttaaggtaggtggattgtttgagtttaggagtttaagatttttttgggtaatatgatgagattttgtttttataaaaaatataaaaattagttatatgtggtggtgtatgtttgtggaattagttatttaagaggttgggaggattatttgagtttggggaggttaaggttgtagtgagttatgattatattattgtattgtagtttggatgatagagtgagattttgttttaaaaaaataaataaataattaataatttttgaggtattatgttaattttatttgttaatatatttttaagtgagttataatatatattaattatatatattaaggaaagtttagagtttattaggtgagttttattagttattttgtatttattaaagtgttgttttatggttatagagttataaagaaatagagttagaatgattaattgataatagaagtattaagattataattataatgttatatataattatttattattaggagagtttataaaaaatttggtataagatttgagaatgttgggaatataagaagtttttaaattaggaattgattttgggtaaatgtggatgttttatgtttgaagagagggaagttaagtatagtttgatatttattttttgagttttggaattgttggattgggtttttggattaattatattttggaattttttgaggatattttgatttttttttttttgtatttttagggattttaatttttttttatgtttaagaaggtggttgttaagagattttaagggattgttttaaaagaaatatatatgaatgtgaataggatttgtagttttagagaaaattttatatatttttaaatttattttgggatagattagatgttttttatttgtagattggaattagtttgaatttaaagtatttaatttttatatttaaagtagtagttgttattggtatataatataaattattttgtgtagttgtgatttaggtatatattgattattattaaattatttagaatttgagtttaattttataagatagaaatatgatttttttttttttttggttatagaagattatttaaggaagtagtatgataaaatgttttttgatgttgttataggtgtatggttgaaatttaattttatatatatttgtatagaaatttatagtgtaatttataaatatttgagttttttggtaagattaatatttgagtagtagtaagttttttgttattaattatttaagatattttttgttttgtttttgtaatattttgagttgtttattaaataggttataatatgagaaagtatttatgttatttttaattaagaaaaaaatttgtttggatgaggagagaaggaaaaatattgttgtaatatagtaataattaaattatgtttataatgggttttaaatttttagaagaaaagatttatagtttagtagtataaagtagtattatttttgttgttattaaaaagtgttttttaattttttatatatatgtaatatattttatttaaggatttaagtttattataaataaataagaagttatagtttataaaatttggttaatgttataaaagagatataatttattggttataagtaagttaatatttttagaaaaatttattagttaatgatataaagtttgttggttttattaaagttttgggaaataattggtttttggtatataaaaggtgtttaataaatgtttataaatataaagattgatagaggattttatataggaatgttttagagattagttaatttatatgagttttttaaataaatgtttgttatatataaatgttattattaagtatataattttttatgaatttattgttatttagtaggtgtggaaattttagtatttaagtagagaaatattaattattgttttgttgtttgtagtttattatttttgtatatttttgtagaatttaattttttataattatatgtttaaattttagtgaagaaggagtaaagtttttaaaaattgagataagaatatttaaaaagttattatgtttaagtagtataaatattgtaattagttgttaaatgtaatttttttgtttatttaatagatgtttattgataattatgtatttatttaagtaagaaatatttgaataataatatatgttggattttatgttttatattg

SEQ ID NO: 2444 - DNA, 2464 bp, Artificial Sequence
  chemically treated genomic DNA (Homo sapiens)
ttgtagtgagttgagatagtgttattgtattttagtttgggtgatagagtgagattttattttaaaaaaaaattaatttggaaatttatgttttagaaagtatgattttagttattttgaatatttttagtgtatagatatgttttgagtggttatatagagagggtataggggtattaaaggaagggaggaattaggagtttttatggaggttttatagaggaatttaaattatgtttttaggagttttttttataattagttgttgttttttttttttgttttaaatttagtaagatataattgataaaaattatatatatttatggtgtataagttaattattatataatatatgtattgttttatgtatttattatttttggtggtgagaatatttaagttttatttttttagtagtttttaagtatataatatattattattattatagttagtatgttgtataataggtgtttagaatttatttattttgtataattgatattttgtattaattgattgatattttttaattttattgtttttttttaattttttgataattattattttttttttttttggtgtatttggtttttttagattttatatataaatgagattatgtaatatttgtttttttgtgtttggtttattttatttagtataatgtttttaggtttatttatgttgttaaaaatataagattttaatttttttaaggtttagtagtattttattgtgtatatggattgtattttttttatttatttattgagggatatttgggttgattttatgttttggtttttgtgaatagtgttgtagtgagtatgggagtgttgatatttttttgatatattgattttattttttttggatatatatttagaagtgggattgttagattatatggtatttttatttttaattttttgaggaatttttatattgttttttataatggttttattaatttatattttaatgagtaggaattagttttttttttgtatagttttagttattgtttttattgttttattttttgttttttttttttaggatgtttgtgggtattgaagttttttttttagattggatatgagttagtattttagtattttgtgagttgagtgttaggataaggtgtgatttgatttttttagaaattttttttgttttagagatagttttttgggttagggatttttaaggattaaagtttaatttttattattttttattatattgggaattttagaatgtgtgagttttatgttttttggtgttgatagattagaggaggattagatgtgataatatggttgttgttggaggggttgagaggtgattgattagtttaagtttgtatagtttgtggaggaagtattttgtttttgtttttttaagtgataaagtttatgttggaatatagagttttttgttttgagtatttaaagttttgatttttttgggggaaaattttttgtagtttttttttttagtattatttgtgttagtgagtaattttttaattaggttgtgagtttttggagagttgagagtgtgttttggtttttgtatttatgaagtgttgggttatgtttttattttagggttatgattgaaaaaaaatgttagagggagaaaattgtaagatgattattatattttgtttaattgaaaaggaatgtgttaattagtttatatagttttatttatttttggaaaaaatatatttttatattatttgttttttgtttttttttaattttttttttttttttaattaaaataaggaaaaaaaaattatagaatgttatttataatatgttaattgttggttatttttagatgttgggattatgttttaaataataattttgagtaatttaaataaatatggaatgttttggaagttgtggggtaggatatagagttgagggaaagtttaagatttagaaattagaaggttagtgttaaaaatattttttagatgtgggtagtgagaaataaaggagagttttttgtgtagggggttattagttttaagtatttttttatttttatatatttttttttaagatttagaattttaggaggagtttgattgatttagtatgggttatatgattagttttggtgagaggagggtaggattttttaaataatgggaaatttgtgttattattaaagatagggagaggagaattgtgaaggtaaaatatagatgattattatgaataaggggtattttttttttttatttgtggtttttaatgtttttgttataaataaaatataaaaaatatttaagaaatatttatgtattatatatataatatatatatttataaatgttataataaatattttaatatttgtttttttaatagtaagaagaaaagatagtagtaatattattaagaggaagttagtttattggaagggatttaga

SEQ ID NO: 2445 - DNA, 2464 bp, Artificial Sequence
  chemically treated genomic DNA (Homo sapiens)
tttgaattttttttagtgaattagtttttttttaatggtgttgttgttattttttttttttattattaaaaggataaatgttaaaatgtttattataatatttataaatatatatattatatatataatatataaatattttttaaatattttttgtattttgtttgtagtaaaaatattagaaattatagatagaaaagaaaagtattttttgtttgtgatggttatttgtattttgtttttgtagtttttttttttttatttttggtaatagtataggttttttattatttaaagaattttgttttttttttgttaaggttggttgtataatttatgttaggttaattagattttttttagggttttgaattttgaagggagatgtataaagatgagaaaatgtttggagttgatgattttttgtatgaagggtttttttttattttttattatttatatttgagagatgtttttaatattgattttttaatttttgggttttgggtttttttttaattttgtattttattttatagtttttagaatattttatatttatttaagttatttagaattgttgtttgaggtataattttaatatttggagataattaatagttaatatattgtggatagtattttgtggtttttttttttttattttgattaaaagagagagagaagttaaaggaaggtaggaagtaggtaatatggagatatattttttttaaaaataaatggaattgtataaattggttggtatatttttttttaattggataaaatgtggtgattattttgtaattttttttttttaatatttttttttaattatggttttggagtaaaggtataatttagtattttatagatataaagattaaaatatatttttaattttttaggagtttataatttggttaaggagttatttattaatataaataatattagaagaaagagttatagagagtttttttttagaaaaattaagattttaggtgtttagagtagggagttttgtattttagtatagattttattatttgagaaggtaggaatgaggtgttttttttatgggttgtgtaggtttaagttaattagttattttttagtttttttagtagtagttatgttgttgtgtttggtttttttttgatttgttagtattgggaaatgtggaatttatatattttgaagtttttagtgtaatggggagtggtgggaattgaattttggtttttaagagtttttggtttaggaggttatttttaaaataagaaagatttttgggagaattaagttgtattttgttttgatatttaatttataaagtgttgggatgttggtttatatttagtttgaagagaaaattttagtgtttatagatattttaaagggaggaggtaagagatgggatagtgagggtgatgattgaaattgtataagagaaagattggtttttgtttattgaaatgtaagttagtaaggttattatgaagaatagtatggaggttttttaaaaaattaaaaatggaagtattatatgatttggtaattttatttttgggtatatatttaaaggaaatgaagttagtatgttaaagagatattagtatttttatgtttattatagtattatttataagagttaagatatggaattaatttaagtgttttttaataggtgaataaagaaaatgtagtttatatatataatggaatattattaagttttaaaaagattaaaattttatatttttaataatatagatgaatttgaggatattatgttaaatgaaataagttaagtatagaaagataagtattatatgattttatttatatgtggaatttaaaaaagttaaatgtattgaagaagaggggaatggtggttgttaaggggttgggggaaggtgatggaattaggagatattagttaattggtataaagtgttagttatgtaggataaataagttttggatatttattgtatagtatattgattgtagtaataataatgtattgtatatttaaaaattgttaagagagtagagtttaaatgtttttattattaaaaatgataagtatgtgagatgatgtatatgttatataataattagtttgtatattataaatatatataatttttgttaattatattttattaaatttggggtagggggaagagatagtaattggttatagaagaagtttttggagatataatttggatttttttatagaatttttatggggatttttgatttttttttttttttggtgtttttgtgttttttttatgtgattatttaaagtatatttgtatattaagggtatttagggtggttggagttatgttttttgaggtatgagtttttaagttaatttttttttaagatggagttttattttgttatttaggttggagtgtagtggtattattttagtttattgtaa

SEQ ID NO: 2446 - DNA, 2482 bp, Artificial Sequence
  chemically treated genomic DNA (Homo sapiens)
aatggggagtgattgttaaagggtatatgggattttttttggggaataagaatgttttaaaagtgattgtgataatggttatataaatttgttattatattaaaaataatggaattgtatatattaaatgtgtaaattatatggtatgtgaattatattttagtatatgtttaatttttttttaagtgggttgtggttatgtagtatgtattttttttaggtgggtatttgttatagtttttatagttttatattgattgttttatattgggatttagttaatttttttgattttggtttttgttggtatttgatattttagttttagtttatatttatgagtatttttttttttttagtatttttattatgataagttttttttttttatttttttttttatgaaaattatttttattggttattttagagtatattttttataatattttttgatatgtagttattaagtttttgataaagaaatgtatttttttattagtaataatattgttataaaattatatgttattaaattaaattgttttataaatataatttggattttgggttttataaataaatatagtgtattatgttaattgaagaataataggaagtattttatgattttatattatttaatagtttttttttaaatatttttgtagtatgattaggtaggagatgttataagattgggaatagagttgtaattattggtatttttaaatagtttgttgatggattgggtttgtgagaaaattaatattatattgaaatttttagggatattttaaattggtggattagatggttgtttgattaagtttgggttatgtaaatagtggagtgtttagatttaggtttggttgttggagtttaggtagttgtttgtatttaagtttagttagaagttttgttaattaaagaattgattgaattttttttttttttttatttttgtttgttttttttttttgtatttgtgttgtttttttttttgtttaaattttttgggtttaggattgtaggtaggtaaggtagagtattttgaatgtttttttgaggattaggaatttatttttttgattatatagtgatgtgttttatagattttttttattgtgaggtaattattttatttatttaagttttataaagtttttattattttggttagtttatatttttgaagttaagttattagtttgatgtgtttgttgtaaaatgtggtttaatagtttgttagtatatttattttttttttaatggaatttaaaggtattttatgtttgagtagtagtggatttaagagttgatgaaaagttttgtgagttgggtgtagttagtataaaataatgtggggaatattgtggagttttatgtagagttatttttagtagtggtgtgtgggttttttgaattttaagttatgttttttgtttttttttttttttgatagtgttttataaataatttatgttgttttatgtgtgttggttttagattgtttaggatgtattggattatttgagtagtttgtgtttatgtggttttttttttttttgaagatgatttgattttgttttgtttataaaggggagatgtggattgttgttttttgttttttaagtgtggttttgtaaagttgttttagaattaatgggttggaattgaaaattattatggagtttggtgaatgttagtgagtttttgaaaagtaaaagttgggaagtgataaattttttttatagttttattttaaatataaatgaggttatttttttgggaggtagtaaaagtgagtattttgtgtttgattaaagataattttttggttgaggttttgattatttagggatgaaatggaggtaaatggttttttttgtttaaatttagatttatttttgtattaggttaggtatttgttggattgaaaggagtgtagtttttggagagtagttttatggaattggaattggtaaaaatgggttttttgattatattttatatattattattagaatgtattattatatattagatttatattatatttaatatagatttaatatattagattataattagattatattaaattataattatatattagatttatattattatatttaaaatgttttattttattagttttgttatttgtatatttgtgttgttagtttataaattagattataatgattttttattatttaagttagaatttttatattttatttatattttagaaagtagagattaaagaaaagtattgagaagagaaggttaatttttttttatataataatatttgtggtttttaaattgaaatgatagttgatatagtgtttagagtttaaattttatttttatttatttttttagaaagagatattgaaatatataagggaaagagaggagattatatgtgaaaaattattaattattttgttagtgattatttaataatgaa

SEQ ID NO: 2447 - DNA, 2482 bp, Artificial Sequence
  chemically treated genomic DNA (Homo sapiens)
tttattgttaggtaattattggtaaagtagttggtaattttttatatatggtttttttttttttttttatgtgttttaatatttttttttagagagatagataaaaataaaatttaggttttaagtattatattagttgttattttaatttgagaattatagatattattatgtaagaagaaattagttttttttttttaatatttttttttaatttttattttttggaatataaatgaaatataagagttttgatttgaatggtaaaaaattattgtaatttggtttatgaattgataatatagatatgtaaatggtaaggttggtaaggtaaaatattttagatataataatatagatttaatatataattataatttaatataatttaattataatttaatatattagatttatattagatataatatagatttaatatgtaataatatattttaataataatatataagatataattagaaagtttatttttattaattttagttttatgaaattgttttttaagggttgtattttttttaatttaataaatatttagtttggtataaaggtaggtttggatttaggtaaagaagattatttgtttttattttatttttggataattaaaattttaattaaaaggttgtttttggttaaatatagaatgtttatttttgttgttttttaagaaaatgattttgtttgtatttgggatggaattgtggaaagagtttgttgttttttagtttttattttttaaaggtttgttgatatttattaagttttataatagtttttagttttaatttgttagttttgagatagttttataaagttatatttggaggatagaaaatagtaatttatgttttttttttgtggataaaatagaattgaattatttttagaggggagaaaaattatatgaatgtagattgtttaaatgatttagtatattttagataatttgaaattaatatgtataaggtaatatgggttatttatgagatattgttagggaaaaagaaaagtaaaaaatgtaatttaaagtttaagaaatttgtatgttattgttgggggtagttttgtgtaggattttataatgttttttgtattgttttgtgttgattgtgtttagtttgtggggttttttattggtttttaaatttattgttgtttaagtatgaaatatttttggattttattaaaaaaaaaataaatgtgttaataagttgttaaattatattttataataaatgtattaaattgatgatttagttttaaaaatatgaattaattgaaataataaaggttttgtagaatttggataaatgaagtgattgttttatagtgagggagatttgtggggtatattattgtgtaattaaaaaaataagtttttggtttttagagaaatatttaaaatgttttgttttgtttatttatagttttgagtttaaagggtttgaatagggggaaaaataatataggtataaaaaaaagaagtaggtaggggtgggagaaagaaagaaatttagttagttttttgattaataagatttttagttggatttaagtataaatagttgtttagattttaatagttaagtttaaatttaaatattttattgtttatataatttaaatttaattaagtgattatttaatttattaatttaaagtatttttaagagttttagtgtaatgttggtttttttataagtttagtttattaataagttgtttaaaaatgttagtgattgtagttttgtttttagttttgtagtattttttgtttggttatgttatagggatgtttaggggagaattgttagataatgtggggttataaagtattttttgttattttttggttggtatagtgtattgtgtttgtttatgaaatttagaatttaggttgtatttataagatagtttggtttgataatgtataattttatagtaatattgttattaataaggaaatatatttttttgttagaaatttgataattatatgttaaaaaatattataggagatgtgttttaggatgattagtaaaggtaatttttatgaggaaaaggataagaaaagggaatttattatgataaaggtattagaaaaaggaaaatgtttatgaatatgaattgaggttaaaatgttaaatgttaatagaggttaaaattaaagaagttaattgggttttagtgtagggtagttaatatggaattatggagattatggtaggtatttatttaaggaaggtatatgttatataattataatttatttaaaaaaaaattaaatatgtgttgagatataatttatatattatgtaatttatatatttaatatgtgtaattttattatttttagtatagtgatagatttgtgtaattattattataattgtttttagaatatttttattttttaaaagaaattttgtgtgttttttagtagttattttttatt

SEQ ID NO: 2448 - DNA, 2345 bp, Artificial Sequence
  chemically treated genomic DNA (Homo sapiens)
agttattgggtttattaaggtatttttatagttggtagtttatttttttttttattatttttttttattatattaatatttttttttttgtttatttttatggggttttttatgtttttttgttagttttaaagtatgtgtgaagagtagatatatttatgtaaatggtttatatttattgtgaaaatttatgaaatatttatgaattattaatgttgtttttagggttataataaatttttttttttttttttttttttgtgtgtgtagtgtgtgtgtttttttttttttttgaagtgtaattttttaatatggtataatttttttagattgattttgttatttatttaggagggaatgttaaattttatttattttgttttagtttgtaaattttttagtgttttttttttttaaattggattgttagattatttgagggtatttattttttttgtttagagtatagtatttggtgggttgtaaaatagaagagtttttttagatttgtttgataaatgagaggaaaggggtaatggtggtaggagtttgtatagataaaaaggttttttattttgggttaaaaggtgttatttggtattatttttattttttgtttttgtttaggaaagaaatttgataaagtaggagatagtttttgttttgttttttttatttataatttttttttttgagaattgttattttgtttttaagatgggttatatattagtttttatttttatttttttagtttttgtttatgttatttagataattatgatggtttttttttagttattattttgtagattagttttgtattattggataaatggaattttatagtttttgtttggaataatttagtttttggaattttttatttaatatgatgtttgtggaatttattatgtagttgtatatagtaatattttatttatttttttgttgaatattattttattatttttgttagtttgaatggattttttttttatagttaagtaggttatgattaagggagataatgaagtatggaattgttttttttagagaaattataggtatggaataagaattttttgaggaggttttttttgttttttttttattaagttgtgatattatttttatatttagagaattttagagtaatattgagttttgttgagtgggtttagagttttatatggtagttgttttagtttttggtatgaggttaaaggatgatagtttttatttttttttatgtttttttgtttaattttagggaatatttttttattttgtgattgtttatatttgaaaattttatttatattttataattttttattagtttaatgttatgtggtgttaattttttgtatgttgtagtgttgagttgtaaatttgttttttttttgtagtaatttaaagtgtttgtaaagttttgaggtagataatgttattttgttatgtatgtttatataatattagtaaattatttattgtgtttttgtttattttttagatatggtggttgttttgtagaattaaaatttttgttatttttttttataattagttaataaatttaagttgagttaaggagttaggtgaagttattgtgatttgggtaaggtttttattgatagatatgtgtttttagatataagatgtgtttttagatatataattttgtttggttagagtagaatagaatgggtggtgtatatttttattatgtaagtatattttgttttttttattggtaataatattttaaggagtgtaaggaaatttaggaaggaatattttataatgttaagaatatttattaagtaaattattttttagaataaatttgagagatggattgttatattaaagttaatagaaattgaagtatgataatgttaatgtatattttttttgatatattgtagatttgtagttttaaaagtttgtttttttattttgttagttgaattttttttattttgttgttattttttttatgggatgttttaaaattttatagatttttgtttggtaatggggaaaaatgagggtgtttattattaagaaagttaattaaagaagtaattgatggattatttagtttatagattaaataaaatggatgttattttatgtttttaaatatttaggtattggaattagaaaatgaatttttaattagatttttttgttttttttgtagggaaaatgagatgtaaagtagagttagagaaaaatagtaaatggttatttgtttgttgggagataaaaattttatttagaggttaagttatatttaaattggttgattttatggagattgattttgttttgtggga

SEQ ID NO: 2449 - DNA, 2345 bp, Artificial Sequence
  chemically treated genomic DNA (Homo sapiens)
ttttataggatagagttagtttttatgggattaattagtttgaatgtgatttgatttttgagtaagatttttattttttagtagataaatggttatttgttatttttttttgattttgttttgtattttattttttttgtaggaaaagtagggaagtttgattgggagtttattttttgattttagtgtttagatatttgaagatatgaagtaatgtttattttgtttggtttatgggttggataatttattagttatttttttaattggtttttttagtggtaaatatttttatttttttttattgttaggtaagagtttgtaggattttgaggtattttatgagaagagtggtagtaagataaaagagatttagttagtaaaataaaaaagtaggtttttaaaattatggatttatagtatattagggaaaatatgtattgatattattatgttttagtttttattggttttggtatgataatttattttttagatttattttaaagaataatttatttagtaggtatttttgatattatgaaatgtttttttttgaatttttttgtgttttttaagatattattattaatgggaaaaatagggtgtatttatataatgaaagtgtgtattatttattttattttattttggttaaatagaattgtatgtttgaaagtatattttgtgtttgaaagtatatgtttattgatgggaattttgtttaaattatagtggttttatttggttttttagtttaatttgaatttattaattaattatgaaaaaagataatagaaattttgattttataaagtaattattatgtttggaagatagataaagatataatgaatgatttgttgatattatatgaatatatatgataaaataatattgtttgttttaagattttatgggtattttggattattgtaagaaaagggtaggtttgtagtttaatattgtagtatgtaaagggttaatattatatggtattgggttgatggaagattgtagagtgtgagtaagatttttagatatgagtaattatagggtaaagaaatattttttaaggttgggtaaaagaatatgaaagaagataagaattgttattttttggttttgtgttaggaattgagatagttgttatatggaattttgaatttatttagtgaaatttggtgttgttttgaagttttttgaatatgaaaataatgttgtagtttgatgaagaaaggatagaaaaggtttttttagggaatttttattttatgtttgtggtttttttggaaaagataattttatgttttattattttttttagttatggtttatttgattgtaagaaagaaatttatttaaattggtaaaagtaatggaataatatttagtaaaagaataaataaaatattgttgtatgtaattatatggtgaattttataagtattatgttaagtaagagattttgaagattaaattattttaaatgaaaattataggattttatttatttaataatgtaaaattaatttatagggtaataattaaggagaggttattatagttgtttgggtggtatggataagagttggagaaatagaaatagagattagtatatggtttattttgagaataagatggtagtttttaaaaaagggggttgtgagtgaggaaggtaaggtaaggattgttttttgttttgttagattttttttttgagtaaaagtaggaagtggaggtggtgttaagtagtattttttggtttaaggtgaagagtttttttatttgtataagtttttgttattattgtttttttttttttatttgttaaataagtttgaaggagtttttttgttttatagtttattaaatgttgtgttttgaataaagggagtgggtatttttagataatttaataatttagtttgaaaaaagagaatattagaaagtttataaattgaagtaaaataagtagaatttaatatttttttttgagtgagtagtagaattagtttgagaaagttatattatattgaagggttatattttagagagagagaaagatatatatattatatatatagagagagagagaaaaagagagatttattgtggttttagaaatgatattaataatttataaatattttataagtttttatagtaaatataaattatttatatagatgtatttgttttttatatatgttttagaattggtaaggaagtataaaagattttatgaaggtaaataaaggaaaaaatattggtatgatgaaggagagtggtagaagaaagagtaagttattagttatagaagtattttggtggatttagtgatt

SEQ ID NO: 2450 - DNA, 2435 bp, Artificial Sequence
  chemically treated genomic DNA (Homo sapiens)
attagttgttttagaaattgtagattgtgttgatttggagggaggaagatttttttaaatttttatttagatttttataagatttagatttttaaaataaagtaaaatataaaagtaattttttgtttgtggatgatttaattttttttttggtaggtttaattttgttttttaggaattagtagtgattagtgatagaaagagtagtttttatgattttaggtgattattaggatgttagggtaggaaggagtttgttgattgagtgttgatttgtaaaattattagtataggtgtttaataattttatttttgagaagttagagttgagtttttggggttgttttggagggtttaggatatgttgtagggtaataggaaggatatggggtgagaaaaaggtttttgttaagttgttgaaagatatatgatagtttaatagggaattaagagttaggtttaatattgtttttgtattatatttaataattgaggttaatggtttattaagtttttattgagggttatagagaggataggtttttaagtgtagagaggtagtagtaaaggttgaggttgtgggaaatataattagagtttaaaatattaatatttatttgttggtatggttgagaggtattttaataatttttggtttttgattttttattgtgttaaaatttaaattattatattaggttttgaataatttttgaaaatgtgtgtttttttatttagttaaggtaaagttgttttaaagataaatattatattagtatagatgtttttataagagtaattattattaatggttattgtttggaagttggatttggaaatgatatgttggatggttatagttttgttagatgaggtgtgtgtgtgatgataagtgggaaatagtttgatttaagggatattttagtttatggttagtatagtaatgattttgggaagtttgaagttatgttttttgttgagtaataaggtatagggtgtagaaggggtaaaataagttagggagtttagttaatatgtgagatggaaatttaaggatagggatagagtatgtataaagtttagggatatagttttttgttggatattttgtttgtattaattggtaaattagattgtataataggaaagaagtttgtgatagtaaaaggggttgaaaatgggaaggatatttagagggtaggaattatgatggggttttgtggttttgtgggtagtagggagagtgtatttttggtttgtgggttttgtgagttggaagaaattaggaaagggaagttgagtatttaattttatatagattataggttaattgtgtttatttagtgtttgaaagtgagaagttgttaaggttttgtgatagttttgaaattgtaggtattagaggatagaaattttgagtttagagggaggtaggtatttttatttgtttaatttggtttttaatagtttttaattttttaatatttttaagtagaattagattaagtagaagtgtttataatagttttttaatttagtttgtatttttttttttttttttttgttttgggggttatgtgttattaggagtagaggttgtgaatgttttagaaatttttttgggatgtaggttttttttttatgtagaaaatgtttattgaatatattaaatgttaggtatatgttttgtattggggtgtaatggtgaggggtgatatttagagggagtgttttttttttttgtattattttttgtttgatttttttagtagattttagagttggttattatgattttttgaatttatttttttttattttttttttttgagttttgagaagtaaagttaatttaaatttaaagtgttgggtataggagtttgttttgtaagaatttaaattttattgttttatttttaaatttggtttgtttttatagtgtttgagatttagtaattttttattatttttagttgtttttgttgttgtggttgttaatattatttaaaattgataaaaattgtatagggaagttgatatagttagatattaagttgatatgtttattattgaatgtttggagtaaggtaattttattttagatttgatttttaataaattttagtgaatatttaatttttgttttattataaatgtattattatatttgtttatatgggaaggtgaagatgggttagttgtttgttttgaaaggaggaaagagtgagaatgtataattgaatgaaaaaaaatattttggttatagatatttttttttttggttttataataataaaatatgtagtgggatttttattttgttttagaatttttagttgtttttttttttttgaagtgtttttttagaggaaataaatttttttattgatattgaaaatgagttataagagaagtgttgttattttttttttgag

SEQ ID NO: 2451 - DNA, 2435 bp, Artificial Sequence
  chemically treated genomic DNA (Homo sapiens)
tttaaaaggaaagtagtaatattttttttatgatttatttttaatgttaatagaaagatttgttttttttgaaggagtattttaaaaaggaaaaaataattaaaaattttaaagtaaaataaaaattttattatatattttattattgtaaagttaagagaaaaagtgtttgtggttaaaatatttttttttatttagttgtatatttttatttttttttttttttaaagtaaataattggtttatttttatttttttatataggtaggtgtaataatatatttgtgataaaataaaaattgaatatttattgaagtttgttaggaattaagtttgaggtgaggttattttgttttagatatttaatgataggtatattaatttaatatttgattgtgttaatttttttgtgtagtttttattagttttaaataatattgatagttataataataaaaatagttaagagtagtgagagattgttaagttttaagtattatagaagtaggttagatttagaggtaaaataataaagtttgaatttttatgaaataaatttttatgtttagtattttggatttgaattgattttgttttttagagtttaggagagaaagatggaaggagatgagtttaggaagttatgatgattaattttgaagtttattgaaaaggttaggtaaaaagtaatatagaagagggggatattttttttgggtgttattttttattattgtattttagtataaggtatgtgtttggtatttagtgtgtttagtaggtattttttgtatgggaggaaggtttgtattttaaagggatttttggaatatttataatttttgtttttaatggtatatggtttttaggataaaagaaagagagagaagatataggttaaattggagaattattatgagtatttttgtttaatttgattttgtttgggaatattgaagagttggaagttgttgaagattaaattgggtagatgggagtgtttgtttttttttgggtttaggatttttattttttaatgtttgtggttttaaggttgttataaagttttgataattttttatttttaaatattaaatgggtatgattagtttgtgatttatgtaggattaaatgtttagttttttttttttgattttttttagtttatgagatttgtaggttaaaaatatattttttttgttgtttataaggttgtagagttttgttatagtttttgttttttgagtgttttttttgtttttgattttttttgttattataagttttttttttgttgtgtagtttaatttattagttagtataggtaaaatgtttagtaaaaagttgtgtttttgggttttgtgtgtgttttgtttttatttttaagtttttattttatatgttaattggattttttgatttattttgttttttttgtgttttgtattttattgtttaatagaagatatagttttaggttttttaagattattattgtgttggttatggattaaagtgttttttaaattaagttgttttttatttattattatatgtatattttatttaataagattatgattatttagtatgttatttttaggtttaatttttaggtagtgattattgatggtaattgtttttataagagtatttgtgttaatgtgatatttgtttttgaggtaattttgttttaattaggtgggaaagtatatatttttaaaagttatttaagatttagtgtaatagtttagattttggtatagtgaaaagttaggggttaagggttattggaatgttttttaattatattagtaggtaagtgttagtgttttaaattttgattatgttttttgtagttttagtttttattgttgtttttttgtatttagaagtttgttttttttgtggtttttagtgaggatttgataaattattgattttaattattaagtgtggtgtagaaataatattaaatttgatttttggttttttgttgagttattatgtgttttttagtaatttggtaggaattttttttttattttatgttttttttattattttgtagtatgttttgaattttttaaagtaattttagaaatttaattttggttttttaagaatgaaattgttggatatttgtgttggtaattttgtaggttagtatttaattaataggtttttttttgttttagtgttttgatggttatttggggttatgagggttattttttttattattaattattgttgatttttgggaagtagagttgagtttattaaaaaggaagttgagttatttgtaagtaaagagttgtttttgtgttttgttttgttttaaaaatttgagttttataggagtttggataggggtttggaagggtttttttttttttaggttagtatagtttgtaatttttaggatagttgat

SEQ ID NO: 2452 - DNA, 2450 bp, Artificial Sequence
  chemically treated genomic DNA (Homo sapiens)
ttaaagttagaatgtatattatattatttttttgtttagtttttttttttggtttggttaaatttgttatttttgttttttgaggatttatttttaataaattatatgtgtttgaaattttatttttagttttttttttttttagatttttttatttaggatagttgtaggtaaagtgaggaattttaagagagaatttagaaaagtagaaattataaaggtaatttagttaatagtgaaatgtatgataaaatggagggattttgttgataaataaaatgatatttgaaaagttttattaataaatattaaagattattaaatgtatattaatttttggatgttgaaattaatattgaatgtttaaaattaatttaaataattatattaaatatatatgtatatatgtgtatatatatatattaattataaggatttaaaatattttgaaattattttattttttttttttttttttttttattaaaaaaaaaaaataatggttagaatattggtttttataatattagtttttgttttggtagattaaaagaggtagaatttttttagtataattttgttttttaaatattttaaaagtatttaattatttggttttgtattatttataaaattttgtagttatgaagaaagtttttttttttaaatttagtttatttttttaaattaaaagtgtttttataaataagaagagaagttgtttttgttaaaattttgggtttatttaggattaatggagtttttttgttttgtaggaaaattttttgtttttagattagttgttaaagttgaatattatagatgatttttttaaagtgattttgaaaaattatatgttggaatttaaattttttaaattttatatataagattagaattttatattttaatagttatataattttataaagaattatttttgatttttttggtagattattattgtagaaggaataaaaaaaggttttataaaagtattttatttgtattgttggtagatgatttataaatgttgtatagatatgggttgattattggtttatagaagaagtattaaatgaatgatgagatatttgttggtaaatatatagtaaataaaaaatgtaatttagagttaaatatgtgtatagtgtgggttttatttttgtttataaattaagtaatgtgttttgttaattattagtagagttattgattttagatgtgtattatatagttataattttgttagagagtagattatataagttgttttttttttggttgttttattttgttttattttaagagtttgtaaattgatgattgggataaaaattataattgatattatttgtgggaaatattttataaaataataggtttagatgtaggattaaagttatgtggtagtaaaatattttattgaaaaggggttaggttttatgattttttaagaaaatagatgtgttttttttttttttgtttgttttttaattttttttttttaaataaatttttttttaattattaatgtttttttttttttgtttttttatgattgtattggagagagtttataaatggattatagatgtaggtttgtattttaaaattttaattgttataatttttggaataaaataaatgaaatatttggaaaaattatattgaattattgtaaaggtaatgatgattatgtaaatatgtttgtttgatatttatttagtatttttgggtatgagtatatgattttttagatattttaagttggagtttagggagtaggaagtaatttagagtttgtttaaaatgtagtaatagtaattttttttgaaagttttttgttttgaaggggaagtttttatttttgaagttttgataagttggtaaaagggtttttatgtattttttttttttttaaggtgagatttttggataaaatagtataggaaaataagaatttaatatattttagtttttatttatttaagttttttttatttatattatgttttataattttttttttggaaatgttgtgaattataagaaaaggattttagggtataaatataggttatattgtttaataattaatttataagtgttgtgaagaattgtatataattgggtttttgttaaaaattttggtgttatatggaatttattgtagtattattgattataattaattaatttagtatttatgttgtattttagtatttatttttagtaatgtgttaagatggtttagtgttgggagaaaataataaagtgtaaaagaaattaaatttttattatgtgttatgttaagattttaatagaatatttgtattttttaattgtttttttttagttttttaaaaattgaagtaaatagtatataaatttgtttagaaattagaggagtttgattttaatttttttgtattgtttttttagtttgt

SEQ ID NO: 2453 - DNA, 2450 bp, Artificial Sequence
  chemically treated genomic DNA (Homo sapiens)
atagattaaagaaataatgtagggaaattggagttaggtttttttggtttttaaataaatttatgtattgtttgttttagtttttgaggggttgaaaagggatagttggagagtgtagatattttgttgaaattttaatgtgatatatgatggaaatttagttttttttatattttattatttttttttaatattaagttattttggtatattattggaggtggatgttgagatatagtataaatgttgaattaattaattgtaattagtgatattgtaatggattttatatgatattaaggtttttggtaaaaatttggttgtgtgtagttttttatagtatttgtagattagttgttaaataatatagtttgtgtttgtgttttaggattttttttttgtggtttataatatttttaaaggggaaattgtagagtataatatagataaaaggaatttgaatgagtagaggttgagatatattgggtttttatttttttgtgttgttttatttagaaattttattttaagaagaaaaaaagtatgtgagaatttttttattaatttgttgaaattttaaagataaaagttttttttttagaatagggggtttttagaaggagttattgttgttgtattttggataaattttaaattattttttattttttgaattttagtttgaggtatttgggagattatatgtttatgtttaaagatgttagataaatgttaagtagatatgtttgtataattattattatttttataatagtttaatgtaatttttttaaatgttttatttattttattttagagattgtgatagttagaattttgaagtataagtttatatttgtaatttatttatgaattttttttagtgtaattgtgaggagatagagaggaaaaaatgttggtggttggggggggatttatttggagaaaaaaaattgaaaaataagtagagggaaaaagagtatatttgtttttttaagaaattatggaatttggtttttttttagtggggtattttattattatatggttttaattttatatttgggtttgttgttttatgaaatattttttatagatgatgttaattataatttttgttttggttgttaatttatggatttttggaataagataaaatgaaataattagaaaaagaataatttatgtggtttattttttgataaaattatagttgtgtgatatatatttaaaattaataattttgttaatgattagtagaatatattgtttggtttatgagtagagatggggtttatattgtgtatatgtttggttttgagttgtattttttgtttgttgtgtatttattagtagatgttttgttgtttatttaatgttttttttatgagttagtagttagtttgtgtttgtgtgatatttataagttatttgttaataatataggtggaatgtttttatgaagtttttttttgttttttttgtagtgatgatttattagagaaattaggggtaattttttatagagttatatggttattaagatgtggagttttgattttgtgtgtaaagtttaagaaatttagattttagtatatggttttttagaattgttttgaaagaattatttgtggtgtttaattttagtagttggtttgagggtaaaaggtttttttatgaaataaagaaattttattagttttaagtagatttaaagttttgatagaaatagtttttttttttatttatagggatatttttaatttagggagataaattgaatttaaaaaaaagaattttttttataattataagattttgtaagtaatataaagttagataattggatatttttaaaatgtttggagggtaaaattgtgttgggaagattttgttttttttggtttgttagagtagggattaatgttatagaagttagtattttggttattattttttttttttaataagaaagaaagaaaaggaaagatgaaataattttagaatattttaaatttttatgattagtgtgtgtgtgtgtatatgtgtgtatgtgtgtttgatataattatttgaattaattttggatatttaatgttgattttaatatttaaagattaatgtatatttaatgatttttaatatttattagtgagattttttagatattattttgtttgttgataagatttttttattttgttatatattttattgttgattaggttgtttttgtgatttttgtttttttgggtttttttttaggattttttattttatttataattgttttaggtagagagatttaggagaggaagaggttgggaatgaagttttaggtatgtgtgatttattaaaggtgggtttttaggaagtaggaatggtaaatttagttaggttagggaggggaattgagtaaagaagtggtatgatgtgtgttttgattttag

SEQ ID NO: 2454 - DNA, 2493 bp, Artificial Sequence
  chemically treated genomic DNA (Homo sapiens)
tttagttaggtagtaaattttgaaatttttggttatagaggtttttatttttatattatgatgttttttttttttagttgttattggtaatggtttttattttataatgagataagttggaaattgtagttgttattttattatgtttgttttttttttttttttttttttttttttttttttttttttttttttttttttttatatatatatatatatatatatatatatatatatatagagtaggttatattgttaataatatatattattttgttattgggatattttgagaggtagtgtatttttaaaattttaaataggaaaaatagtaattgtatttgtttttttttttttaattgattgataaagatattttataagatttgagagaggaatgtaaaggtattgtatgaatttgatttgttgttttttttttttattgatttttttttttttttgataatttatataggtagaagttttgggatgtttttattttatttttttttggttggtattttttttgttatatttttttttttattggtatattaaagtttaaggtttaatttaattagtgaaataatttatgatttaggtaaattagatatgattttagtatagaattgttagatattttaggaataaggtaattggaggatgatagtttattagttaatattttaaaaataatatttttagattattatttttttttgaaaattattttttttagtatgttgtgtagaatgattttagatttttaatgagtttagttttttaatgagtgagagtagagagttttaaatatttttgtgttttgttttggatggagatttttgtttaagttattggtttaatggtttaatttttgaggagatagaatttaagtaggtagatttgtatatttttatatgatatttattatttttttttttgtgtgttttttttttttttttttttttttttttattttttttttttgtttttttaaattttttagttaattttttttttgttttttagtttttgtttatatagaaaatttggttttagagaatagtatttaaatagtttttaattaaaatgtattatgtgtggtaatgtaaaaaattattagaatagtttttttttatttaaaatatgatttttgtttattgttttggtttttttgtttttgtgttttaggttaaatattatttagatttttgtgaggttaggtgtttttttattaattatttgaaaggtttagagaatggtatttatattaaagttagttttaatgataaaggatatttggttatggtaaatataagtattttttagttttttgttttatttggtaaaaagttatttttattttagttataatataataaaggattaattgatgggagtattttttttattttttaaaaaataaattgagttaattttatgagtttatttagaggaattaattagggaataggaaatttttaaagttatttttaaattgatattgaataaagtttagggaatagatggttttttatttgaattttttaaaatttttagtattttattaatttttttataggaatgaaaaaaaattgttaaatgaatttgagtaaattattttattaggtgtttagtttttttaagattttttttgtattaagaaaaaaagaaaatataataggtattttttttattgatattattataattttatttgtatatgtgagttttttttttagggtttattttaaattttttttgtatttttgattattaagttgggggaatgatttttttaattggtgtagttgattatgtataattgtttagagtataaggatagtgttaatatatataaagttgagaatgaggttattgtttaagtaaaatagaaaaatagaaaataatttttgttattttgttttagatatttggagatttttggggtaagagatggagaggataaattgtattattttaatagttgagtagattttttttttttgtataaatttgatatgtagaaatattgtgaataagagagatattgttttttatttgtatagttaataagaagttgttttattaaagtttttagaaggatgaattgttggaatttatattttatttatttaaaggatgtttatatataattttttaagataatttggtagaaaattttaaaatatttttttttttttaaaatttgatagataaaattgtatatatatattatgtataataggatgttttaaaatatatggatattgtaggatagttaaattaagttaattaatatgtatattattttatatagttgttatttttgtaataagtatatttaaaatttatttttttagtattttttaagaatataatatattgtgatgaattatatttttatgttgtagaatagagtttttaaaaatattttttttatttaattgaagttttgtaattttttattaataggtttttattatttttttt

SEQ ID NO: 2455 - DNA, 2493 bp, Artificial Sequence
  chemically treated genomic DNA (Homo sapiens)
gaggaaggtaatggggatttgttggtaaaaagttataaaattttagttaaataagaagaatatttttaagagttttattttataatatggaggtatagtttattataatgtattatatttttgaaaaatgttaagagagtagattttaaatatgtttattataaaaataataattatgtaaggtaatgtgtatattaattagtttaatttagttattttataatgtttatatattttaaaatattttgttgtatatagtatgtatatataattttatttgttaaattttaaaaagaaaaaagtgttttaaaattttttattaaattattttggaggattgtatgtagatattttttgaatagataaagtataaattttagtagtttatttttttagaggttttaataggatagttttttattaattatgtaaatgagaggtaatgttttttttatttataatgtttttatatgttaaatttgtatggggaaaaaaaatttatttaattattgggataatatagtttattttttttattttttgttttagaaatttttagatatttgaaataaaatgataaaaattgttttttatttttttattttgtttgaataatggttttatttttgattttgtgtgtgttgatattgtttttgtgttttgagtagttgtgtatgattagttgtattaattaagagaattatttttttagtttggtagttagaaatgtaggggaagtttagaatgagttttgggggaagaatttatatgtataaatgaaattatagtaatattagtagagaggatatttgttgtatttttttttttttttagtgtaaaaggaattttaggggaattgaatatttggtgaaatagtttgtttaaatttatttagtaatttttttttatttttataggggaattagtagagtgttaaaggttttaaagaatttagatgaaaagttatttgttttttgggttttgtttaatgttaatttaaggatggttttggagattttttattttttaattaatttttttagatgagtttgtggggttggtttaatttattttttgaaagatggaaaaaatgtttttattaattagttttttgttatgttgtgattgagatggaaatagttttttgttaaatggagtgaggagttgagagatgtttgtgtttgttgtggttaggtgttttttgttattaggattggttttgatgtaagtattattttttgggttttttagataattggtgagaaagtatttggttttgtagaaatttgagtaatatttagtttgaagtataaagatagggaaattaaagtagtgaataggagttatattttaaatagaaaaaaattgttttaataattttttgtattattatatgtaatgtattttagttggaggttgtttgagtattgttttttagaattagattttttgtgtggataaggattagggggtagggaaagggttaattgaggggtttggagaaatagaaaagggaaatagagaaaaagaggagggggaaaaagagatatatgagaggagaggtgatgggtgttatgtaaaagtgtatagatttgtttgtttaaattttatttttttaaagattggattattgagttagtggtttgagtaggaatttttatttaggataagatataaagatgtttgaggttttttgtttttatttgttgggagattaggtttattgggagtttaaggttattttgtgtagtatattgaaagaaatgatttttaaggaaaaatgatgatttgagagtattatttttagaatattaattaatgagttattattttttaattgttttatttttaaggtgtttgataattttgtattgaggttatgtttggtttatttaaattataggttgttttattagttaggttaagttttgaattttagtatgttagtgggaaggagggtatgataggggaaatgttagttagaaaggaataggatgggaatattttagaatttttgtttgtgtggattgttggaaagagaagggaattaatgaggagggagagtagtaggttagatttatgtagtgtttttatattttttttttaaattttgtagggtgtttttgttaattagttaagggaaagaaaataagtgtagttattgttttttttgtttgggattttgggaatatattgttttttaggatattttagtaatagggtgatatatattattagtaatgtgatttgttttgtgtgtgtgtgtgtgtgtgtgtgtgtgtgtgtgtgtgagagagagagagagagagagagagaggagagagagagaaagagagagagagaataggtatgatggagtagtagttgtaatttttggtttgttttattatggagtggaagttattgttgatgataattagagaggaggaatattatggtgtaggaatagaaatttttgtagttaagagttttagggtttattgtttggttaaa

SEQ ID NO: 2456 - DNA, 2438 bp, Artificial Sequence
  chemically treated genomic DNA (Homo sapiens)
gagttagtgaaatttaattttgttgtttataattaaagaattttaattaagtatgttatttattaaaatggagatagttaaagtttaatgtttagtatttaaaatttttagtaaatttttgtgatataaaaaaaaattattgtttgggtgtagtggtttatgtttgtaattttagtattttgggaagttgaggtaggtagattatgaggttaggagattgagattattttggttaatgtggtgaaattttgtttttattaaaaataaaaaaaaattagttgggtatggtggtgggtgtttgtagttttaattatttgagaggttgaggtaggagaatggtgtgaatttaggaggtggaggttgtagtgagttaagattatattattgtattttagtttgggtaatagagtgagattttgttttaaaaaaaaaaaattattaaatttttatttgttttgttgatatatattgtagtttaagtttatttttttaattttattaggaattagaatttttttatgttttatttgtttttattttaaaaaatatttatgtttattttgttttaaaaataagatgatgtaattgatatttatatagaaaattgaaataatgaaggaaaagttaaaatgaagggttttttttttaaaaagagttataaaataaatttaaaagtttataattttgattattggattaatttgttttaaatattttatttttggtttgttattttattttggtttttttttagatttatttgggaagatttttttttttaaatatatgtgattagtttttattaaagattagttttatttgaagatttaggtgtaggatttgggatgtaaatatttttaaatgtattgggtaaattttgatgtataataaaggttgagagtttgagatttagggatttaattaattatgtaagatgtttaaaatggaatgttgatttttatatgatatttgttaaatgtagaaaattttgtttggatttggaaataaaaatgtgagtatgaagttttggtaaaataaatttttttgaaaaatattaatattttataattatttttttattaaaataaaatagtgttaagtatatagttttttttaagtaataaatttttaaaattaaagtgaaattttgaaattatttttttaaatagtatttgtttggtagatagatggtatgttttattttattttttgtttttatttggtggagtttatggggtattttgagaattaatgggtaattaagaattgggtgttaatttaggtatttgatttggaaattgagtttttgaaaattattaattttaaatatagtgtaagttttttttattatgttattttagaaattggtaataagaatattttaaaaatatttagaaatgtaggagttagattttttgggttgtaggtggaggatatatagttgttaggaaatggaagatatttgttatgtttttgagtttttttttggtgggtagtggatggaggataataaggtttgttgtagtattaatttgggtattaaatagtaataaataaatgtgatttaagagtattgttgggagatttttttgaaagagtatgtatagtagtttttggtagtaaggaattaaggttggtagttttaagttatttttgttaaatgtaaagagtgttgaaaaagttttatatttgtaattattagttagtagtattttaggagatattattttattagatatgattaattttttgttttagagagtttagtagaagtttatagaaatttatagtttatgtgatattgtgttaggttgataggtattaatttgagattgaggtgtgaaaaaagattatttgaaaattttattaaaaggtagatttttgaggtttagttttatatattttgatttataaaaattgtagaggaattaggaatttgtattttattaagtattttaggggtatttttggtataagtggtttgtaggtaatatttggggaaattaataatgattaatattatgtttttattaaggaaagttaattttagggaaaaaagagtatttgaaaatttgagtaaagaaggatttggtaggggtttttggtttaagtaagaaagttttaaagaatagggagtgataggtaagtttagattgtaagatattttagaaagaaggggagaattaaagggaggagaggtgagtagttgttaggaataaattttagaattataaaattttttttaagatttattttggggaggagaatagtttgagaagtaaaagattataaggaaatattggattatttaatattgattaaatgttattattagttagtattgtattaggtgttttagaaatattattattattaataggtagttgtagtttataggttaggtgtgtggattttaggggtagtggttgtttatgtat

SEQ ID NO: 2457 - DNA, 2438 bp, Artificial Sequence
  chemically treated genomic DNA (Homo sapiens)
atatgtgagtaattattgtttttagagtttatgtatttaatttataggttgtagttatttattagtgatggtgatatttttaaagtatttggtgtaatgttgattggtagtaatatttggttaatgttggatgatttgatatttttttatggttttttattttttaaattgtttttttttttagaatagattttaggaaaagttttgtaattttgaggtttgtttttagtaattgtttattttttttttttttggttttttttttttttttggaatattttgtaatttggatttatttattattttttgttttttgaggtttttttatttgagttagaaatttttgttagatttttttttatttaggtttttaaatatttttttttttttaaaattaattttttttaatggaagtatgatattaattattattggtttttttaagtgttgtttatagattatttgtattaaaagtatttttggaatgtttgataaagtgtaggtttttgatttttttataatttttgtaaattagaatatgtgaagttgagttttagagatttgttttttaataagatttttaagtgatttttttttatattttagttttaggttgatgtttgttagtttagtataatgttatatagattgtaaatttttatagatttttgttgaattttttagaataaggagttaattgtgtttgatgaagtaatgttttttaaggtgttattgattggtagttgtaggtgtgaaatttttttagtattttttatatttaataaaaatggtttagggttattagttttgattttttattattaaggattattgtgtatgtttttttagaaaggttttttaataatgtttttaaattatatttatttattattatttagtatttagattaatattatagtagattttattgttttttatttattatttgttaaaggggggtttagggatatagtaggtgttttttattttttggtagttgtgtgttttttatttgtagtttagaaaatttggtttttgtatttttaaatatttttagagtgtttttattattagtttttgggatagtataataaggagggtttgtgttatatttggaattgatggtttttaaagatttaatttttaaattaaatatttaaattggtatttaatttttaattatttattgatttttaaaatattttatgaattttattaagtagaaatgggaaatgaaataaaatatgttatttgtttattggatggatgttatttgaaggagtggttttaaaattttattttggttttaaagatttgttatttggaagaagttatgtatttggtattattttattttgatggaaaaataattgtagagtattagtgttttttaagagagtttattttattgaagttttatgtttatatttttgtttttaaatttagataaaattttttatatttgataagtattatgtgaagattaatgttttattttaagtattttgtatgattgattggatttttaagttttaagtttttaatttttattgtgtattagaatttatttgatatatttgaaaatgtttgtattttaggttttatatttagatttttagataaaattggtttttagtgagagttagttatatgtatttaaaaaaaaaaatttttttaagtgagtttaagggaaaattagagtagaatagtagattagaaatgaagtgtttgaaataaattaatttgatgattaggattatggatttttaaatttgttttataattttttttggaaaaaaaattttttattttaattttttttttattgttttaattttttatgtaaatgttaattatattattttatttttggaataagatgagtataaatattttttagagtggaagtaaataaaatatgaaagaattttgatttttaatggaattaagagaatgaatttaaattatagtgtatattaataaggtagatggaggtttaataattttttttttttgagatggagttttattttgttgtttaggttggagtgtagtggtgtgattttggtttattgtaatttttgttttttaggtttatgttatttttttattttagttttttgagtagttgggattataggtatttgttattatgtttagttaatttttttttatttttagtagagatggggttttattatgttagttaggatggttttgattttttgattttgtgatttgtttgttttagttttttaaagtgttgggattataggtgtgagttattgtgtttggataataatttttttttatattataaagatttattgagaattttaagtgttagatattgggttttggttgtttttattttggtagatgatatatttggttagggttttttggttgtaagtaatggaattaaattttattaattt

SEQ ID NO: 2458 - DNA, 2449 bp, Artificial Sequence
  chemically treated genomic DNA (Homo sapiens)
taattgtggttattaaattttgtttttgtaatgtaaaagtatagataatatgtaaatgaataagtgtggttgtgtttttataaaattttatttataaaaataggtggggggttagattgttttttttttattgtatataaattgaaaaataagaggtaaaattagagggattttagggtggtttttaattttgtttttttttaattgtgttagagaaagagagaatataagttatatttgtttttttggttgttaatttttttgttaattttatttttatatataaaaggtgagtattaagtttatttggtagtgttgatggggggattaagtgaaataatgtaaaaatttgggatgatgttagatttgtttaaagatatttatattttttttgttttttgttatatttttttatttgtttttagaatttagttttaaggtttgggaatttaaatattgtttttaattaagtagttaaggttttagatgataagtttgtgtgtgtttggaaaatgtggttttatgatgtgtatatttaggattggtgtagttgttatattgttattttttagtgtagggtgttggggtttgaattttgataatttttgtgggatattttagaaggattaggttttatttttaaaggggttatagtgagtagagttttggttttatttttaaaggggttatagtgagtagagtttaggatgttatggggttgtagtttagaattattaggtatttagttttattttttttttaagaagatatgttgttttttgtaaatattatattttagttttttggtataattttaaataatgttatttttgggaaaagttgataagtggtgagaatttaagtttttttatttgttgggaataaaagtgggtagatatgtagaagtttttttttattttatatagttgtatttttttggtatttattttttttttattttttggaattgagttggttagagatgaggattggtatgttgttttttttagttttgttttgtgtggtgtttgttttgtaatttttttatgtttgttttaataggaaaaaaagtaaagagattgatatatagttattttgaggttagattgttattgaaatagatttttttaaataaaaataagggttgtttttgtttgtaaggttttgtaatgaaatagagttaataaaaattgtatgggaaatttatattgtagttataaaaatattaaaaaatagaatttttagttaaagttagtagtgattgttggtttgaggtagaaattagggagtaaaatattttgaaatatttattgaaagtgaagagagggaagaattattattttttatttatttggttaattttttagaagtaaagttagagttatatttgtttagtaagtgattaagtattgggtttttaagtgtaggatagattatttttttttgtggttaatttgtaataaatagaaaatagggttatttaaaaattagtataaatatatataagaaataaagttgttttaataggaaaatttggtaagattattgatgaaaatgtttatagttttatttgttttttttttttagtttttgtttttgtgtgtgtatattagatgtttttgaggttaaagtttgtgtgtttttttgggttggagtatagggatattttttattattttttagtttttagtgtttagtgttattatttggaatattttttggaattttggagggatggtttgtttttatagttttttattagtaggggttttttttttaagaatggtgtttttaggatttttttaggtttagttttaggtgttattagattattagggaatggtgattgattatttgagaaatgtatttatttgtatttaggatttattaagttattattttaatgggaatttattaattggttttattaatttttatttagaattataagtattaaaagttatagtatttaagataagtgagtttttagtttttggttgtaataggggaatttataagaatatttagaagtgatttaggtttttttttttttttttttttaaagtatataaattttggttatttttataggtttttgttaattaatattattattgtggaaatgggggttgttttataaataagttgtaataaatgggatttttattgttggtggaaaagtttggggaataattagtagatttatggagattttttgattttgggtatttgtatggtaatggttaattttggagattatttagggaaatggggttggattttttattttagggtatatttatattgttagttatagtttttaaattgtagtgggataaatgtgggaaaatattttgtgaaatattagataaatgaatttggtgttgattaattttaattaggaaaattggttttgttttgttaagtgttgtatagtagttaagatttg

SEQ ID NO: 2459 - DNA, 2449 bp, Artificial Sequence
  chemically treated genomic DNA (Homo sapiens)
tgagttttggttgttgtatagtatttagtaaagtagagttagtttttttagttgagattggttaatattaggtttatttgtttagtattttataaaatatttttttatatttgttttattgtagtttgaaggttgtaattgataatataaatgtgttttaaggtggaaagtttgattttatttttttgagtgatttttagggttggttattattatgtagatgtttggagttaagggatttttatagatttgttaattattttttagatttttttattagtaataaaaattttatttgttgtagtttgtttgtagaatagtttttatttttatagtggtggtattaattagtaaaaatttgtgaaaatgattagagtttatgtgttttaaggagagggaaagaaaggaatttggattatttttaaatatttttataaatttttttattgtaattaggagttaaaagtttatttgttttagatattgtgatttttaatgtttgtagttttaagtgggaattagtgaagttaattagtgagtttttattagaatagtgatttggtgaattttgaatgtaaatagatatattttttagataattaattattattttttgatgatttagtggtgtttgaaattgagtttggagagattttggaagtattatttttagaggaaagatttttgttagtggggagttgtagaaataaattatttttttagggttttagaagatattttagatgatgatattgggtattggggattggagagtgatgaagggtgtttttgtattttagtttaggaggatatataagttttaattttagagatatttgatatatatatatagggatagaggttgaaggagaagaatgaatgaagttgtagatgtttttgttaatgattttattaagtttttttgttggagtagttttgttttttatatatgtttgtgttaatttttaagtggttttattttttgtttgttataggttagttataggagaaaatggtttgttttatgtttaaaaatttagtatttaattatttgttaagtaagtgtgattttagttttatttttgaagggttaattaaatggataaagggtaataatttttttttttttttatttttaatgagtgttttagaatgttttattttttaatttttattttgagttaataattattgttgattttagttaagaattttattttttaatatttttatagttgtaatgtgagttttttatgtagtttttattaattttgttttattgtaaggttttgtaagtaaaaatggtttttatttttatttggagaaatttattttggtgataatttagttttggggtagttatatgttaatttttttgtttttttttttgttgaaataagtatgggaaagttgtaagataaatgttatatagggtagggttgaaggaagtagtatattgatttttatttttggttagtttaattttagaaagtgaaaggaaagtgaatgttgaggaggtgtaattatgtaaggtagaagaaaatttttgtatgtttatttatttttatttttaatagatgaaaaggtttaaatttttattatttattaattttttttagaaatgatattatttgggattatgttgggaggttggagtgtaatgtttataagaagtagtatgtttttttaaaaaagaaatgggattaggtgtttggtgattttggattgtaattttatggtattttaaattttatttattgtgatttttttggagataaagttaaaattttatttattgtgatttttttggagataaagtttagtttttttgaggtgttttatagggattattaaaatttaaattttagtattttatattaagaaatggtagtatgatagttgtattagttttaggtgtgtatattatgaggttatgttttttaaatatatataagtttgttatttgaagttttggttgtttgattgaaaatagtatttggatttttaaattttaaagttaaattttgaaaataaatgggaaaatataatagagagtaggggaagtgtgaatatttttgaataagtttgatattgttttagatttttatattattttatttaatttttttgttaatattattaagtagatttaatatttattttttatatatgaagataaggttggtaagagaattagtagttaaagaagtaggtataatttatattttttttttttttagtataattagaaaaagataaagttggaagttattttagagtttttttggttttattttttgttttttagtttatgtgtaatagaagagggataatttagttttttatttgtttttgtaaatgaagttttatggagatatagttatatttgtttatttatatattatttatatttttgtattgtaaaggtagggtttaatagttataatta

SEQ ID NO: 2460 - DNA, 2482 bp, Artificial Sequence
  chemically treated genomic DNA (Homo sapiens)
tatttattattttttataaatttatggattggttggtttggaagttttgttgatttggtttgagtttggttgatttagtttggtttgatttattaatttttggtttgtttggataatttgtttttttttatgttgttttttaatttttagtagattagtttggtttttttgtgtggtggagtttgagattttaaagagtaagtaaaagtttgtaaggttttttgaggtttaggtttggaattggttttgttatttttgttatattttatgtgttagtttaagatatatggttaaatttaggtttaaggaatggaaaataaatattattatttgatggaagaaattgttaaattatattgtatggaagagaaataattggaggaaattttgtaattaatttataatagagtagtttgattgttttaataaataaattttaaattttaggattaaatattataatgtttattttttgtttatagtttaattttgtattatagtttaatagaggtgggtaggggagtgagagagattgttttatatagttatttaggtattaagtttttttttgtttagttgttgtgttatttaaagttatagagtttttgattgggttttgtgtttttatttattagatgagagaagagagtaaatatgtagaagaaatatttgtttttaattgttttaatttggaggtgttatatatattatttttgtttttttttagggttagaatttggttatatgattgaatagaattgtaagggaagttgggaaatgtggtttagttgttaggagaaagaggaaaatggtttattgagtatttagttagattttgttgtagttataggttttgtgattgaggaatttatttttaaagaaagtgtattgggatatattttaaaagttgatgtatgatagtatggggtagataaaggttaaaaagataaggttatgattaagtaggggagaaatatatagatatttatgtaaatatttagggtatgagtaagaatttggggaaagatttggagttaggaggaggtgggtgtttggtaggtggtgagattttaataggtagaggtagaagtgaagggtaaagggaaattttgggttatatggggaaattagatttgtttgtttgtttaatattgtggtttttagtgggatttaaagttgatgttttaatgtaggatggttatgttagtgttgattagaataatgtattttttagggttatattaaaaaattatgtttagtgttttatttgtatttttaaaatatgtatatatatgtgtgggttagaaaaggttgtgtttaggatatgtatttttatgtgaattgtaggtaattgtataagtaaataggaagttgtgtaggtatgtaggtagttgtttgttgagaggtgtgtgtgggtatgggtaggtgtgggttttgtttgtttgagtataattttaaaggttttttttgatggaagggagggtaagtaagtttttgggtatttgtttttttaattgttgttgttgtttgttttttttaaggttttttttttgggtagggttatgttagggagtatttgtggttgtaagaaaaaggtgttgttttaaggtttttgttaattgttgagttggtgaataaatgttttgaaattttttttgttgagaattttattttttggttttttttttgattttatggtttagtttttttagtttattttttgttttttttttttgtttgttttttagatgtttttttgtgaatttgtttttaattattttttgattttttgaattagagttatttaatagaattatttgtaaaggtatttgtattgttttttgttgtagttattagttatatatagttattgagtatttgatatggggtttatgggtttgagaaattgatttttaaattttatttaagttaaatataaatagatatatgtggttagtggtttttttattggatagtatagttttagaatagtttttatgggtaataattttttttttatagtttgttttattatttttagtttgtatttttttattttatttgtttttttgaattatgtttataaatattttaatttgattattttgtggtttttttaatgtaatgtggttaaggttgaattttttgtttttatttataaaatttatttttttttgattttttttttgttattttatttttggtttttttttattagggaatagttttgattagattatgttatttatatatattattattaagataggtttaggttttgtggatttgagttaatttgggatttttatttaaaaaaaaaattatagagtataaatgtaaaattagatttagagttttggagtatttttggtaagtgaagatgtttgtgaagtttaagttttatttgttttattgtaaattggttttagtttattattggaatattttatagtttttgggtttgaattttagtttgattatt

SEQ ID NO: 2461 - DNA, 2482 bp, Artificial Sequence
  chemically treated genomic DNA (Homo sapiens)
agtggttagattgagatttaaatttagaaattgtagaatattttaatgataaattgaggttaatttgtagtaaagtaaataaagtttaagttttatagatatttttatttgttgaggatgttttaaggttttaaatttaattttgtatttgtattttgtaattttttttttaagtagagattttaaattgatttagatttataaaatttggatttattttgatgataatatatatgagtaatatggtttgattagaattgttttttaataagggaggattaaggataaagtgataggaggaaggttaagaagaaatgagttttgtgggtagagataaagagtttaattttagttatattgtattaaggggattatagaataattaaattggagtatttgtaaatatggtttaggagagtaggtagggtaaggagatatagattgggaataatggggtagattgtaagggagaaattattatttataaagattgttttagagttatgttgtttaatagagaagttattagttatatgtgtttatttatatttaatttaaataaaatttaaaagttagttttttaggtttataagttttatgttaagtgtttaatgattatatgtggttagtggttataataaggaatagtgtaggtatttttgtagatagttttgttggatagttttggtttagaaggttagaaagtgattagggataggtttatgggaaaatatttgaggaataaatagaagaagaagatagggaataaattggggaaattgggttatagaattaggaagagaattaggagatggaatttttagtaaagagaattttaaaatgtttatttattagtttggtagttagtaaagattttgaaatggtattttttttttatagttataaatattttttgatatggttttgtttagaaaggaaattttgagaaggataaatgatagtagtagttagggaagtaggtgtttagaggtttgtttgtttttttttttattaggagaagtttttaaaattgtatttaaatagataaggtttatgtttgtttatgtttatatgtattttttaataggtagttgtttgtatatttatgtaattttttgtttgtttgtgtaattatttatggtttatataagaatgtatgttttgagtgtagttttttttggtttatatatgtatgtgtatattttgaaggtgtaaatgaggtattgagtatagttttttaatgtagttttaaggggtatattattttgattagtattaatatagttgttttatattaaggtattgattttaggttttattggaggttatagtgttaaataagtaaataaatttagtttttttgtgtggtttaaagtttttttttgttttttatttttatttttgtttattaaagttttattgtttgttaagtatttatttttttttaattttaagtttttttttagatttttgtttatattttaggtatttatataggtatttgtgtgttttttttttatttaattatgattttgtttttttaatttttgtttgttttatattattatgtattaatttttgaaatgtgttttagtgtattttttttgggaatgagttttttagttatagagtttgtgattgtagtagagtttagttaggtgtttaataagttattttttttttttttttaatagttggattatattttttagttttttttgtagttttatttaattatgtgattaagttttagttttggaaaggggtagaagtgatatgtatgatatttttaggttgaggtaattaaggatagatattttttttatatatttgttttttttttttatttagtggatggaaatgtaggatttaattaaaggttttatggttttggataatatagtaattagatagaaggaaatttggtatttgaatggttgtgtggagtaattttttttatttttttgtttatttttattggattgtgatataagattggattgtgaataagaaataaatattatgatgtttaattttaagatttgagatttgtttattagagtaattaggttattttgttgtaaattgattgtaaaattttttttaattattttttttttatataatgtgatttagtagttttttttattaagtggtggtgtttattttttattttttggatttaggtttggttatgtgttttgaattggtatatgaaatgtagtagaagtgatagagttagttttaagtttaggttttaagagattttgtaggtttttgtttattttttgagattttagattttattatgtgaagaagttagattagtttgttgaaggttgagaaataatatggagaagagtgaattgtttaagtagattagaagttaataaattaagttaagttgaattaattaaatttagattagattagtagaatttttgagttagttaatttatagatttatgaaaaataataagtg

SEQ ID NO: 2462 - DNA, 2492 bp, Artificial Sequence
  chemically treated genomic DNA (Homo sapiens)
ggttattgatatggtttggttttgtttttatttaaattgtattttgaattataataatttttgtgttaaaggtggggttaggtggagaattattgatttatgggggtagttttttttatgttgtttttgtggtagtgaataagttttatgagatttgatggttttaaaaaggggagtttttttgtataagtttttttttttgtttgttattatgtaagatgggatttgttttttttttgttttttgttatgattgtgaggtttttttagttatgtggaattgtgagtttattaagttttttttttttataaattgtttaattttaggtatattttgattagtagtttgagaatagattaatatagttatttaaattaattttgtaatgattagaggtataaatatagatgatgatgatggtgatgaagataatagatttattttagaataatgagaaattgtggaaagtttgtttgagttgattttaaaatagatattagtagataatattatagatgaaattaaattgtagttttaggaaaaatattatttttaaatttagggttattaattattttggaattattttatagttgtttaaatgtagtttgtatgtggttgtttatttgatggttttatttttttttgattttttttttattttaattttgttgaagagattaaatgattgtttgttaaaaaggtgtataaagtggaattttgtagaagaaataaaaataaatttttttgtgtatttgaatttattgatatatttagtgtttgattttattttttagtgtttgtgattttgggtaagattttttgtttagggatttggagttagttaggtaatgattgttgtgtgtatttagtatgtatgttaggtatagttgtaaggtttttaatttttttgtttgtttgttagttattattttagatttatttgaaagttagtaaggagatagtggttgtaaagtggttttttgtttttaaagtttaggttttttgaggttttagaatgataaaatggagaggtagggttaggggaagagggtttggtgagatttgttttggtttttgttggttttttgttaatgtttgtagatggtgggggtttatggttgggatgtttgtttaggttttggtagttttatgtgttttagtatttttttaaaagttgattatttggtttgttttttttgtgagttggtttattattattttattgtgtggtggtaatttttatttgtattatgaatattgattttatgtttgtttttttatttgaattataggtgggtaggttggtggtttgtattgtttgtttagttttagtttttttggtagttatttgaatagttttaaagaaaagttgtttgtttgagtatttagggataatagagagtggttataggttgttatagtgatttattaaaagataggaaaatgagagaaaagatttttattttttgtattagttgtttgtttttttgtttttttttattttttgttttttttttttttttttttttttttttattttttttttttttttattttttttttttttttttttttttgtttttttttttttttgtgtttttttttttgtttttttttttgtttttttttttgttttttttttgtttatatttttaaaatgagagagggaaaaagatggttgtgtttttaaaatttgtataaatttatgggatataaatattattttattatatggatatattgtatagtagtgaagtgtgagttttttgtgtgtttgttgtttaaatgttgtgttaagtagatgtttgagggatgttgggtttgtttgttatatttaatgatatattttattaaaggtagatagaatttagggttagtttttgaaggatatgagaggagattgagtatttgtaggtgtgtgtgtgtatttagtgtatatatatatatatatatatatatattgtaaatggtgttagttgttttggaaaaaggaagttttttttttagaaaaataaggtagggtgttttttttttttaatttttttttttttagatatattttagtagtttatgattttttgagtttttattttgaatatagtgtttgttatttgaagaggttatttttgtattgtttagtttgggttttttttaagggaatgatgtatggagagttttttttttttggtgtgttggtttttttagttttaggtttagttttattattattttgatggtttttttttatatgtaggaaatttgtgggaagtaaatatggttggagtgtgtgtagatttttaaagtgaaggttatattttggtgataatttttgtttaattaattgatttattggagtattaagtaagttgggttaggaaggatatgggagggtgggttgggtgattttggtatgttggttgtttggtgtgagtaattgtatgggggtagtttttttaaattgagttgtaaggattttgtttttagatttt

SEQ ID NO: 2463 - DNA, 2492 bp, Artificial Sequence
  chemically treated genomic DNA (Homo sapiens)
aaggtttggaaataaagtttttgtggtttagtttggaagagttgtttttatgtaattgtttatattaagtggttagtatgttagggttatttagtttatttttttgtgttttttttagtttagtttgtttagtgttttaataggttagttggttgaatagaaattgttattaagatgtagtttttattttgaaggtttgtatatattttagttatgtttattttttatagattttttgtatgtagggaggagttattggggtggtgatggggttgaatttgggattggaagaattagtatattaaggagggaagattttttatgtattatttttttgagagaagtttaggttggatagtgtaggggtggtttttttagatggtagatattgtgtttagggtaggaatttagaaggttatggattgttggagtatgtttggggagaaggagattgagaggagaggatattttgttttatttttttgagaagagagttttttttttttagaatagttggtattatttgtagtgtgtgtgtgtgtgtgtgtgtgtgtatattaaatgtatatatatatttgtaagtatttaatttttttttatattttttaaaggttaattttgggttttatttatttttaatgggatgtgttattagatgtagtaaataagtttaatgttttttaagtatttgtttaatatagtatttgggtgatgaatatataaaaagtttatgttttattattatgtaatatatttatgtagtaaaatggtatttgtattttataaatttatataaattttaaaagtatagttgttttttttttttttttattttaaaaatgtgaataaaaaggaggtagagaaagagatagaaagaaaggtagagagggaggtatagggagggaggaagatagagaaagggaaaaaaggaaaggatggaagggagggaggaataaagagaaaagagaaaagaggagagagatagagaataaaaggaagtaagagagtaggtagttggtgtaagaagtaagggtttttttttttatttttttgttttttaataaattattgtagtggtttgtgattgttttttgttatttttaaatgtttaagtaaatagtttttttttgagattatttaagtggttgttagggaggttggagttgagtaagtaatgtgagttgttggtttgtttgtttgtaatttaggtagaaaagtaagtataaagttaatatttatggtgtgggtaagaattgttattatataatgaaatggtaatgagttggtttataaaggagataagttggataattagtttttaaggaggtgttggggtatatgaggttgttagggtttgagtgggtgttttggttatgggtttttattatttgtgggtattggtagaaggttggtgggagttagggtgggttttattaggttttttttttttggttttgtttttttattttgttattttggggttttaaggagtttaaattttgaggataaaaagttgttttgtagttattgtttttttgttggtttttagatgagtttggggtgatggttggtaggtaaatgggaaaattggaaattttgtagttgtatttggtgtatatgttaaatgtatgtagtggttgttatttgattagttttagatttttaagtaggaaattttatttaaaattatagatattggggagtggagttaggtattgggtatgttagtaaatttaaatatataaagggatttatttttattttttttataagattttattttatatatttttttaataggtgattatttaatttttttagtaaaattagaataaaagaagggttaaaaggaaatgaagttattagatgaatgattatatgtaaattgtgtttagatagttatgggatggttttagggtgattggtggttttggatttgaagataatgttttttttgagattataatttgattttatttatggtgttgtttattgatgtttgttttgagattgatttaaataggttttttatagttttttattattttagagtaaatttgttgtttttattattattattattatttgtatttgtatttttagttattataaaattaatttaggtgattgtattggtttgtttttaagttgttaattaagatatatttgagattgggtaatttataaaggaaagaggtttaatgaatttatagttttatatggttggggaggttttataattatggtagaaggtaaaggagaagtaagttttattttatatggtggtaggtaagagagagagtttgtgtaggggaatttttttttttaaaattattagattttatgagatttatttattattgtaagaatagtatggggaaaattgtttttatgagttaatgattttttatttggttttgtttttgatatggggattattataatttaaggtgtgatttgggtggggataaagttaaattatattagtgatt

SEQ ID NO: 2464 - DNA, 2491 bp, Artificial Sequence
  chemically treated genomic DNA (Homo sapiens)
gaaaaaataaaaaaagtagttttaaataaatgaaatgaatgattgtaattaaaatttttttagttatatttttttatgatttttatgtgttgagaggattttaagtaaaaatagagatgggttgtttgtttattttaattattaaaagttttttataagtgagttgaattttgtttaaaaggatattagattttgttatttaattattgtttgttttttagagttattatgaggaagtttatttttaagaatttgggaggttttagttgtagtggattataagaggtattggaatagttgatatattgaggtgttattaagaattatattattattgaagtataattttgttgtagatatgattgttttgggtgtaggtttttatgttagtgttaaaaatgttaagatttggagaaaggagaggagaaagtagagttattttttttgtatgttttgttgtttggaaaggagatagaaaaatagtaggaaatgtttatttttttttttgggattttttagggattttttatttgaataggatgattgaattttgttttggtaagggatgatttgttggaagatgaaaagttttgtggtggaatatgagtggagttttttatagttttttaggtattgttggtgtagtatggggtagagggtgtggtataggtgaggaggtgggtgtggttttagtttatggttgatagtttttttgttttttgttagggtagttttggtatgagtagttgggaattagattttgggtaaagtaggagtaaagagtttttttgagtttttttgattgattttaatggatttgtttttagaggggtatgaaggtggttgtgattttataagtagaatggaagtgatttgatttatattgggtttgggaaaattggtttaggtgtggtaaaggtatagagtgtgaaataggtggggaaaataaatttaagattttgaatttttttatggtttttaaaggggaagttatgggtatagtgaatggaggggttgtttttagtttatttggtgttgtggtgaattgttttagggtttggtatattgttattattttaagatagatgggaaataaatattattagtatgttgataagtgtttgtttttttttagtattagggttaagaaaaataaagtggggagggtattaagttttggagtaagtttttaaaaggtttttttttttgaattttttatggttgtttatttataatagttataattataatagagaggaaaagattttaattatttttgggatatattttgttaaaattatatttaagtattttttatttgtaagtgagaagtattattttttattatgtttttaaagtagtgtggggaagttgtgtgtataaattaaggtgttgttgtggtttgttgttttttgtgaatttttggaaaggattattaagaaggatgttttgataattgtttgttaggtaatttgtataagaggaaagaggtttttttgaagattattaaaaatgatttattattattggttatatatatatatgttgttttattatttaaaagtataaattatatattggtaagtaattgtgtttattagattattttaggttttgggaggagtagagaggtataaagtgtggtgattatttttaaggaaagtgtattttaattagggagataagaataattatatgtgtagtagttaaaagttatataaaagtttatgattaagtggtgagttgtgaataataggttatttatgttgtgatttttttagtgatgatataagtgatattttggaagaggtaaaatttgagataggtttttaaggattggtgttatttggataggttgaagaggagtaggagggtttttggatgtggagaatggtatgtataaaagtatggaggtgagaatgtatatatgtgtttgggatttttaaaatagggtagtttgattggattggagtttttgggtaatgatgagtgagtaataaaatggaagagaatagggttagaaggggtagataggagttatttatttttataatatgtatttattttttaattttattataaatttatattaaatttttttgtgttgattatttgagtattgtaatttaaaaagagtaatttgtgtatagagttttgtattgggttatagagtttgttttagttgagttttttttagaagtagatatagatagaaagagtttagagtaagtagtttattagggaggttattttaggaaattttagtagaggggtaggaaagtgagataggaagggaaaggaaggtagttagggaagtgttattaagatattaatatggataaatggagtaaaattttagtggtgaattttagaaattagtgtataaaatgtgttttagagtgaatttatttgggaggtgaggaagttggggtatttatttattagttgttattagttattgggtgagggttgtttttgagggtattaattt

SEQ ID NO: 2465 - DNA, 2491 bp, Artificial Sequence
  chemically treated genomic DNA (Homo sapiens)
aagttaatgtttttaaaagtagtttttatttagtgattgatggtaattggtggataaatattttaatttttttattttttagatgagtttattttgaggtatattttatatattgatttttagagtttattattgggattttgttttatttgtttatgttggtattttaatagtatttttttgattgtttttttttttttttttgttttatttttttgtttttttgttaaagttttttagaatgatttttttagtaaattatttgttttggattttttttatttgtgtttgtttttggggaaaatttaattaagatagattttgtaatttagtatagggttttgtatatggattattttttttaaattataatatttaaatagttaatatagaaaaatttggtgtgggtttgtaatggagttgagaagtgaatgtatgttatgaggatgggtaatttttgtttgttttttttgattttgtttttttttattttattgtttatttattattgtttaaaggttttaatttaattaggttgttttgttttagaagttttagatatatatgtgtatttttatttttgtgtttttgtgtatgttattttttatatttgaaagtttttttatttttttttaatttgtttagatggtattaatttttgaagatttgttttaagttttgttttttttaagatgttgtttgtgttattgttaagagaattatagtatgggtagtttgttatttataatttattatttaattataggtttttgtatagtttttaattattgtatgtgtaattgtttttgtttttttaattaaaatgtattttttttgggaataattattatattttgtatttttttattttttttagggtttaaaatagtttgataaatataattatttgttaatgtatgatttatgtttttaagtaataaaataatatgtatgtgtatgattaatagtaatgaattatttttaatgatttttagaaaggtttttttttttttatgtaaattgtttggtagatagttattagagtattttttttggtgattttttttagaagtttataaaagataataggttatagtaatattttggtttatgtatataatttttttatgttgttttaaaggtataataaaagataatgttttttgtttataaataaaaagtgtttaaatgtaattttgataaaatgtgttttaggggtgattgaagtttttttttttttgttgtgattgtaattgttataaatagataattgtaagagatttaaaaggggaaattttttaaaggtttattttagggtttgatattttttttattttattttttttagttttaatgttgaaggaaaataaatatttattgatatattaatggtgtttattttttatttgttttggaatggtggtaatgtgttaagttttgagatagtttattatagtgttaagtgagttgaaggtagtttttttatttattgtatttatggttttttttttgggggttatggaaaagtttaggattttgaatttattttttttatttgttttatattttgtatttttgttatatttaagttaatttttttaggtttggtgtagattaaattatttttattttgtttatgaagttatagttatttttatgtttttttagaaataggtttattgaagttagttgaggaaatttagaaaggttttttgtttttgttttgtttagagtttgatttttaattgtttatgttagagttgttttagtagggaataggaaagttgttggttgtgagttggagttatatttatttttttatttgtattatattttttgttttgtgttgtattagtaatgtttggggagttgtgaagagttttatttatgttttattataaggttttttattttttagtaagttattttttattaaagtaaagtttaattgttttgtttaggtgggaggtttttgaaagattttaagagaagaagtgagtattttttgttgtttttttgttttttttttaagtagtaaagtatatagaggaagtagttttattttttttttttttttttttaagttttagtgtttttggtattgatatgggagtttatgtttaaagtaattatgtttatagtaagattatgttttggtggtgatataatttttaatggtattttagtatattagttgttttagtgttttttataatttattgtaattgaaattttttaagtttttgaaaatggatttttttatggtgattttaaaagataagtagtaattaggtaatagaatttaatatttttttagataaagtttaatttatttgtaaggggtttttagtgattggagtgaataggtggtttgtttttatttttgtttaaaatttttttaatatatgagagttataaaaggatatggttgagaaagttttagttgtaattatttgttttatttgtttagaattgttttttttattttttt

SEQ ID NO: 2466 - DNA, 2463 bp, Artificial Sequence
  chemically treated genomic DNA (Homo sapiens)
gaaggtatttatgtttttatttaagttatttagaggaaagaagttgttgtgtgttatatttttgggtagagaagagagtatttaatgaagtttttataagtgaatttttatgttatatgtattttttgtgtataattttttggagtaatgttaagtatatattggtatttatagtaatattttaatgtttttagtttgtttaattaatttttttttaatatatgtttatataatattaaaaatgttttattaagttagatattaggatattgttgaatatgtagatatttattatatatagatggatttaaatttattttgagtttatttatttatttattagtagtgtttgtggttttgtgatattatttgtgatttaattttaagtgtgattttatttatatgtggaaattaaataagtttattttatagaagtagagagtagtaaaggtagtagaggttggggaggagaggaagagaaggggtaagtggagatattgattaaagggtataaagtttttgttagattggaggaataagttgtagtgatggatagtattgtatggagattatagttaataataattgtattgtatattttaaaattgttaaaagaatagatttttaatgtttttattataaaaaagtatgttggtgaggtgatggatatgttaattagttttaatgaatttttttataatgtatatatagtttaaaatattatattgtatttaatagatataaagaattattatttgtaaattaaaaattaattaataaaaaattagaaagttgttattttttaaatatatttatgggttaatttttttatgtggaaaagtaatgttggttttattataaatatttttttagttggttaagtagattatttaatttgaattaatatattttttttttatgaggttaataaagatattttaattaaaattaaaaaaaaattttagttttattttttttttttgttttttgatttagtttttgtaggtaagaagttgtttattattgatagagataaaatattttaatgagtgatggaatttttattttttatttaaatattatgttaatatttaatataaaatattattgttttgttttatatagaaattgtaagtttattttgtttgaaatatggggaaataaatttttgttttgattttttttttgttgttttagttgtgtgttattgatattggtgtgatttgttatgggaaggtgtaatgaggtaagattgggattgtaataattattaatttataaatatgttatggtaaagttaaggtaagttagagtgatatttttaaatattttaggaaatagtatttatgtttgaattatttattttattagtttgttttgatgaatatgggagaaattaataattttttaatataaagagtaatttaatgttattaattgggtattttatatgggttgatagattgtttttttttatttttgtttttttggtggtaatttattgagttgggaaagtttgagtttggtgtagtatttggtttttagtgatattttgttggttttatttaattttttagttgggagtatgaggtatagggaggttgaatgatttgtttaaaggttatttggtagtttaattgggattataatttaaaatttttttgatttttttattttttgtttattggattataaaatttttttgattttgtttttttaagtttgtttgagtaggaagtaaatgtttaggtttagaaaaaagaattttaaattaagtattggttaaaattatttttaaaaatgtgtgaaatttttattggtataatttttaagaaatattttatttttattttaatatttgagaatatgtgtgattatgggagtgttgtttttttttaaggggttattatgggaaagtttatatttattattgtttggatgttgttttggttaaaatattttaggaattttaaaatttgatgtttgtggtagaatataattatttgaatatataatggattttgtttatattatatttagaaatagggtatttgattttattaagtgttataaattatttggtttattttgtagtagaatttttaggtttgttttttttttagtttgtaaattttttttgggatttttttatggttggtaattttttattatttaggttttagtagaaataatatttttttagagtgagatttgttttaattttttgatgtaatggttttttttgtttgatggttttatttttttttttattatatttattagtatttataattattattgattttattttaaaaatttggtatgttttaattttgagtgtaggagtttgatttgttttgttttttagtatattttagataatgtttgatatataaaagaagtttaataaatattttttgaaagaatggatagttatttttggtaaaagaaggtttttttttt

SEQ ID NO: 2467 - DNA, 2463 bp, Artificial Sequence
  chemically treated genomic DNA (Homo sapiens)
agaagagagatttttttttattaggaatggttatttatttttttaaaaagtgtttattgagttttttttatatattaaatattgtttaggatatgttggaaaataagatagattagatttttatgtttagagttaggatatattgaatttttaagatgaaattaatgataattgtaaatgttgataaatgtaatgaagaaaaaaatggggttattagataaagaaagttattatattaggaggttagagtaagttttattttgagaaggtattatttttgttaagatttgaatgatgaaaagttgttagttatgaggaaattttggggaaaatttgtaggttgagggaggagtaagtttaagagttttattataggatgagttagatggtttatagtatttggtggagttaagtgttttgtttttgagtataatatgagtaaggtttattatatatttaagtggttgtattttattataagtattaaattttggagtttttaaaatgttttggttaaagtagtatttaaatagtgataggtatggatttttttatggtgattttttggaaagggataatatttttatggttatatatatttttaggtgttagaatgaaaatgaggtattttttaagagttatattaatggaaattttatatatttttaaagatgattttggttagtatttaatttgggatttttttttttaggtttaaatatttgttttttgtttaggtaagtttgagaagataggattaagggagttttgtggtttagtgagtaaaggatgggaaaattagaaagattttgagttataattttagttgagttattaggtgatttttaggtaagttatttgatttttttgtgttttatgtttttagttggaaaattggataagattagtaggatattattgaaaattagatgttatattgaatttaagtttttttagtttaataaattattattaaaggggtgggggtggggaggggtaatttattagtttatgtgaaatgtttaattaatgatattaggttattttttatattaaaaagttattaattttttttatatttattaaaatgaattaataaaatgagtaatttaaatatgagtattattttttgagatatttagaagtgttattttggtttgttttgattttgttatagtgtatttgtaggttaataattgttataattttagttttgttttattatatttttttatggtaagttatgttagtgttaatgatatatagttagaataataaagagaaggttaaaatgggagtttatttttttatgttttaaataaaataaatttgtagtttttatatgaaataggataataatgttttgtgttagatattaatgtgatatttagatggagagtaaaaattttattatttattagaatgttttgtttttgttaataatgaataattttttatttataaagattaaattagaaaataaaaaagaaaaataaaattggagtttttttttagttttaattaaaatgtttttattagttttatggaaaaaaagtatattaatttaagttaaataatttatttgattaattagaaggatgtttgtgatgaaattgatattgtttttttatatgaaaaagttaatttgtgagtatatttgagaagtagtaattttttaattttttattaattaatttttaatttataaataataattttttatatttattgggtataatgtgatgttttgaattatgtatatattatagaaagatttattaaagttaattaatatatttattattttattaatatatttttttgtggtgaggatattggaaatttatttttttagtagttttgaaatatgtgatataattgttattaattgtggtttttatgtagtgttatttattattataatttatttttttagtttaatagaaattttgtattttttgattaatatttttgtttgtttttttttttttttttttttttagtttttattatttttattattttttgtttttatgagatgaatttatttagtttttatatataaatgagattatatttaaaattgggttatagatagtattataagattataaatattattgatgggtaggtagatgggtttaaaataggtttaagtttatttatgtgtaataagtatttgtatatttagtaatattttggtgtttggtttagtggaatatttttaatgttatatgaatatatgttgaaagaaaattaattaagtaagttgaagatattaaaatattattgtgggtgttagtatatgtttaatattattttaaaggattatgtatagagaatgtatgtggtatgaaaatttatttatgaaaattttattaagtgtttttttttttatttgaaaatgtaatatataatagttttttttttttgagtgatttgggtggaagtatggatgttttt

SEQ ID NO: 2468 - DNA, 2485 bp, Artificial Sequence
  chemically treated genomic DNA (Homo sapiens)
atagtttaaagtttaagttataaggagtgtatttgagaatttttagttggttttatagtagtttttgaggtttttttagtatatagttattaatgaagttttttaatggtttatggttatattatgtttttgttatattttgtatttttgggattttattttgaatatgtgttagtagtaaataatttttttgttttatttattattaaagttaggaaataatttttagggatgatttttaagataataattatttgttggaagtggaagttatgagtttgtttagtggtatagaatattttttttttattgagagttttgaaaatttgttgtttttatgtataatagagattataggtataatagagagaagaatggtatgtattttaagttttaattttaagaatttatttggtattagtgagtagtataattttattttttttttaattttgttttttttgaattaattttttttattgtttgataaattatatggtttgattgtgtatgttatatgaaaatatatttgaaagatatttagatttttttttggaattaagtaaaagaagtatttggttataaatatgtggtaattgggtttgaggttatgtatatatatttttttttagttgtagttaaaattaggtttgggggtttttgatgagtttttttgtggttattgttattaaagaaaaatggatttttttgttgtatgtttagaaaattagatattattattatttgattatttatttattggtatagtttgttttatttattaaagaaaagataaggttgaaattggatttatttaatgtatgtttgtggttttatgtgtttgtagataataagtagttttgggtgtttgtttagggttgattttttaggttataattggtattattttgatttttttttggatgagtttatattgttatggagtttgtagttttaaataagaaaatatttataaaaatgagaggggtaaaatgttttttttggaagtagtaggggagggggtaggaaggggaggtttttgtttatttatggaaaatggatgtgtgttttatggtagttgtagtttaagtaaatataaattttgaattagagattatatttgttatttttttagtattagtaatattaaattaaaatatagttttatttggttaattttaaagtaggatgtgggtgttagttttgaaaattatatgattgggtttttagtagatattattagggttatgtttttgttttaagtaagaaagttataaaggtaatattttttgtagtattattattatgtttagtaaatagatgtaattataataatagttaattttagagataatagtttattatagaaaaaggttaagagggttttttattttttatgtgtagaatttgagttattttatattataattttattgagagaagaggtattaaaagagagataatgagaatttagggtataggtttaggtagtggggttgggtggggaaagaatttttttatttttttatgagttttagagttggttaatttggaatttatgtttagaagtattattttgatttttgtggaaagttgttttttttaaatagtaatttagtaatgagtaaagtattaaattgtgattttgatatgtttttattttgtttttttttttataaagaagattttttagggtttagggttattttagttattttaagtttggtaagtatttagttagggtttgttgttttagaggtttttatggtgtggttttatttatttatttattatgaagttgttgttttttttttttttttggagttagggagggaggggtagatgatagagttgggtgttttgagttaatgattagttttatatttataagtttatttatttttgtttttatttggtgttttaatgttgttaatgagtgggaattaattttattgagggttatttagttttttaaaagaaaattgtttatttggttggaaatgttttgatagaaggtagagtagttggttatatttgaatattgtgttttttagatttgggggtagagggggagtggtagatttagagggagaggggattaagtagttattttatatgagttattatggggtggttggaattttagtagagtttattaatagatttttgtgttaaagatatagtttgttgtttttttatttgttattttttattaaatttgtgtatgattttttagtattttttttaataattagttgtttgtaagaaggtaattattttatggtgaattggagaagaagaaaagatattttaggaaaatgttatgataatagaaaattttttagtgttgtaattatttggtgtgttatggtgataaagaagttgataattgagtgtttaataattttttttggtttgagataatgggtatttattttgatttgtgttttttataagagtaatttgttattattttatattatat

SEQ ID NO: 2469 - DNA, 2485 bp, Artificial Sequence
  chemically treated genomic DNA (Homo sapiens)
atgtggtgtgaaatgatggtgaattatttttgtgaagaatataaattagggtgagtgtttattattttaggttaaaagaagttattgggtatttaattattggtttttttgttattgtagtatattagatggttataatattgaagagttttttattattataatatttttttagagtgttttttttttttttttaatttattataagatgattatttttttatgggtagttgattgttgagaagggtgttggggggttatgtatagatttagtggggagtggtagataaagagataataggttgtgtttttagtatgagagtttgttgatggattttgttgggattttggttattttataatagtttatgtgaaatgattgtttggttttttttttttttgaatttgttattttttttttgtttttaaatttagaagatatagtgtttaaatgtgattggttgttttattttttgttaaagtatttttagttaagtgagtagtttttttttaaggaattgagtggtttttaataaaattaatttttatttattggtagtattgaggtgttaggtgaggataaaagtaaatgagtttgtgaatatagggttagttattaatttagggtatttaattttattatttgtttttttttttttggttttagagaagggagaaaaataatagttttatggtaaataaataaatgaaattatattatgaaaatttttgaaatagtaagttttgattggatgtttattgaatttgggatgattggaatgattttgggttttgaagaattttttttataagagaaaagataaaatgaggatatgttaaaattataatttaatgttttgtttattgttggattattgtttggaaaaaatgattttttatagaagttaaggtgatgtttttaaatatggattttagattggttgattttagaatttataagaagatgggaggattttttttttatttagttttattatttgagtttatgttttaggtttttattgttttttttttaatgtttttttttttaatagagttgtaatatgggatagtttagattttatgtatgaagagtaaaagatttttttgatttttttttgtagtgaattgttgtttttgaagttaattgttgttatggttgtatttgtttgttaaatataatgatggtattataaggagtattgtttttgtgatttttttgtttaagataaaagtatagttttggtggtgtttgttggaaatttgattatgtggtttttaaggttggtatttatattttattttggggttagttaaataaaattatattttggtttggtattgttagtgttgaggaaatggtgggtatgatttttggtttagagtttatgtttatttaaattgtggttattatgagatatatgtttattttttatgagtgaataaaagttttttttttttgtttttttttttattgtttttaaagggaatattttgttttttttatttttgtaggtgtttttttatttaaagttatagattttataatgatgtgggtttatttaaagaaaaattaaaatgatgttaattatagtttagaaagttaattttgaataaatatttaaggttgtttattatttatagatatataaagttatgaatatgtattgaatagatttaattttaattttgttttttttttaataagtgaaataagttgtattagtaagtaaataattaagtggtgataatatttggttttttaagtatgtagtagaaagatttatttttttttaataataataattataaaagagtttattagaaatttttaaatttgattttggttgtaattagaaaagaatgtatgtatatgattttagatttagttattatatgtttatagttaaatgttttttttatttaattttaaagaggaatttaaatattttttaaatatatttttatgtgatatatataattaaattatataatttattaaataatgagagaagttagtttaaaaaagataaaattaaagagaagataagattgtattgtttattaatgttagataaatttttgagattgaagtttgagatgtatgttatttttttttttattgtatttataatttttattgtatataaaggtaatagatttttaaaatttttaatgagagaaaaatgttttgtattattggataagtttatgatttttatttttaataagtggttattgttttgaaggttatttttaaaagttattttttaattttagtaatgggtagaataagagaattgtttgttgttgatatatgtttagagtagagttttaggaatataaagtgtgataaagatatgatgtagttataggttattaaagagttttattagtggttatatgttaaaaagattttaaaaattattgtgaagttaattaagaatttttaaatatattttttatggtttaaattttgggttgt

SEQ ID NO: 2470 - DNA, 2485 bp, Artificial Sequence
  chemically treated genomic DNA (Homo sapiens)
tgaagtttttaattttttttaaagtatatttttgtggagaaggatagattataaagaagtgaatatataaataagatataatatagtataaatatttaggaaaataaaaatgtagtaatgtgataaattttagtaggttattatatatattttatgtatatatataatataggtttatatatataatataggtatatatatattttttattattaatttaatttagtgataaattattaagttttatttttttattagatgttttttttgtttaaaggattttatatttagatggttgtatgaagtatttgggttttagttaaatgttagttttttattgaagttttttttgatgagttagtttataatagtttattaagatttattatattattggattttagtttttttgaatatttttgttatattatagtgtttgtttatttatgtgtttatttttttgttatttgtttttttttaaaagaatgtgttagggattttatgttttttatttattgatgtatttttagaatgattagtgtttggtatatggtaattttagttataatttttttaattaatggtttatttttgttttttatggatataatattattttatttgaaaaaaataagtatttttagtttatgattatttttgagtaaatgaggatagtaatagtataagatttttagtggtatttttaatgaaagaattatataataatttttgattattttttgtttttatgtgtttataattttattgttaatattaagagagtgtattttgttgttattaattttggttatatttttataagtatatatagtaggttattattttgttttataaatagaagttgattaagttgtttattttgtaggatttataataaattatagtttaatatagtagtagaatgtaaggatttagaaggtttaaaatttataagtttaggaagatatttaattaatagaaattaaagtttaaatttgatttatttatttattggaaattttgggttgttaaataatatttaagtttattttgtaattagattaaagttttgggttttgtgggggttggagattggaattttattttaaaaagaaatgtgtaaggtattttgttttttattaagaagtgtaatgagtaggttttatttatgatttttagttttaaatgattgaattggtattagtgttaaaaaaattgaaaatgttttaatatgtattaattgtttaatggatgtgttgtttgtttgaaaagggtggggtggtatttaggttgtttaatgattttatatttttttatggtaaaatatttgtgatttgattatgttgtaattaaagagttatataaataatatttttggaaaggaataaatgggtttttttgaaagagggattttggttagttttagttggtattttaggtttttttatgaggagaaaatttttatttttaggtaaatttttttttttgttttttagaagttgtttttagttttatgtttgtttgtgtgtgtgttgtgagtgtagattatgggagatggggagtgggtagagggaggattttttaaaaaataaatgatatttttaatagataattttaaaataggttgaaatataagtaataaagataagtattttaaatttagaaaaggtttgggattttgaagttaaaaagtttagtaatgagaaattttaagggtagagtgggatttgttttgtaaaattagttgattaaatgtttattattgtataaggaagaatttttgaatttatgtggtttgtttttatgtgttttagaaattattttttttaggagtatagattttaagttttttaattataggttttttgtaatttttggtagttaagagaggtttttagtagggaaggtgggtattttattttttaaagaaagtatattagttaggataatttagaaagaaatttagaggtttggttttaggtttatattgaatttttatttttgggtattaggagtgtttttttttttaagtttttattgtaatttttgtttattatatagttataagaaaggtgggaattaatgagaataaatgttaaattatttaattatagttaatttttatagtatatttttttttaattttttagattttaattttttttatgttgtaatttttgttatatttggtaatgagttatttattatgtttattgatttaagttttttattaataatttataatttatttttaaataaaaataaatattaattgtaattttatttttttttagatatttttatttttttagtttttaaatattagaaattaaattttatgagttttttatttattaaatagtttaagttagtaaattgagttgaaattaatttgtttttttattagatatattggtaatttttttaaagttggaatgagagaagaggtttggggtttggggagtttgttttagaggttgtggta

SEQ ID NO: 2471 - DNA, 2485 bp, Artificial Sequence
  chemically treated genomic DNA (Homo sapiens)
tattatagtttttaaggtaaattttttaaattttagatttttttttttattttagttttagaaaaattgttaatatgtttaatggaaaagtaagttgattttagtttagtttgttggtttaagttatttagtaaatgaaaggtttataggatttagtttttaatatttgaaagttgaggaggtgaaaatgtttaaagaaaaataaagttgtagttgatgtttatttttatttaagaataggttgtaaattattggtgggaaatttggattagtgaatatgatgaatgatttattgttaaatgtagtaaagattataatatgaaaaagattgaaatttaggaaattaaaagaaaatgtattgtgaaagttaattatagttaaataatttgatatttatttttattggtttttattttttttgtaattgtataataagtagggattgtagtagggatttgaaaagaaaagtgtttttaatatttaaagataaagatttaatgtaaatttgaggttaaatttttgggtttttttttaaattattttgattggtgtgttttttttggaaggtggaatgtttattttttttgttaaagattttttttgattgttaaaagttgtgagaaatttatggttaagaaatttagaatttgtgtttttggaggaaatagtttttgggatatatgagagtaaattatatgagtttaaaggtttttttttatatagtaataaatatttgattgattggttttataagatagattttattttgtttttggggttttttattattaggttttttggttttaagattttaagttttttttaaatttaaagtgtttgtttttattatttgtattttaatttgttttaaaattgtttattaaagatgttatttattttttaaaaaattttttttttgtttattttttattttttatgatttatatttataatatatatataggtaggtataaaattaagggtaatttttaagaggtagagagaggagtttatttgggggtgagagttttttttttatgaaggggtttgagatattagttggagttgattaaaattttttttttaaggaagtttgtttgtttttttttaaagatattgtttatgtaattttttaattatagtataattaaattataagtattttgttatgggaaaatgtaaagttattaagtaatttaaatattattttgttttttttaggtagataatatatttattaagtgattaatgtatgttaagatatttttaatttttttggtattaatgttagtttaattatttgggattggggattataggtgaaatttatttattatattttttgatgggaagtagagtgttttatatgtttttttttaaaatagaattttaatttttggtttttataaggtttagagttttaatttgattgtaaaataagtttggatattgtttgatagtttagaatttttagtaggtggatgagttagatttgaattttaatttttgttaattgggtgtttttttgagtttgtagattttaggttttttaaatttttatattttgttgttatattgggttgtggtttgttgtgggttttatagaatggataatttaattaatttttgtttgtaaaataaaatagtgatttgttatatgtatttgtgaagatgtggttagagttgataatagtaagatatatttttttagtgttagtagtaaaattatggatatataaagataaagagtaattagggattgttgtataatttttttattgaaaatgttattaaaaattttatattgttattatttttatttgtttaaaaatagttatggattgggggtatttattttttttagataaaatgatgttgtatttatgagaagtaagaatgaattattggttgaagaaattgtaattgaaattattatgtgttaggtattggttattttggggatatattaatgaatgagaagtatgaagtttttagtatatttttttggagaaggatagatgataaagaagtgaatatataaataaatagatattataatatagtaaaaatatttagaaaagttaaaatttagtaatgtgatagattttagtaggttattataaattggtttattagggaaggttttaatgaagaattgatatttaattgagatttagatattttatgtagttatttaagtgtagagttttttaggtagaaaaagtatttaatggaaaggtgaagtttaatggtttgttattaaattaagttaataatagagaatatatatatgtttatattatatatataagtttgtattatatatatatataaagtgtatataatagtttattaagatttattatattattgtatttttgtttttttaaatgtttgtgttatattatattttgtttatgtgtttatttttttgtagtttgtttttttttataagaatgtgttttaggggagattagggatttta

SEQ ID NO: 2472 - DNA, 2432 bp, Artificial Sequence
  chemically treated genomic DNA (Homo sapiens)
ttaaagtggaagagtttttagggagaagtttttggaattgtttttagtgaaattaatataaatatgtatgatgtttgattgtttgagtttttatgtgaatatatttaaatatattataatatatatttaatatataggttatttatatatatataaaatatatattatattttttatattatatatttttgttatttattgttttttttatattaaatatttttggtaagtatgttaatgggtttatttattttgtagatgaatgagggttaagtttgtaatgggttttttgtgtttttagaaaatttgtaatttaattgggggatatatattgtttgatgaattttgaaatttgaggtgttatgttttagtttttttttaagtttttttaaagttgattatttaggtattgatatattttgtttatttataaagttatttttgagtaagggaggaattaaggtggaagaaagtttttaaaatttttttgtttaggggaaaattttgtttaaggtattgattattaatttagattttagtaaaagttttaaggggatagtgatttttttgtttaagtgtaatatgtgttgttagtgtttatttatattttaagtttttatttgttagtgaatagaagtttaatttttaaagtttaggatttgtattttttggtttgagggttttttttagattaagaaggtttttttgtttgtttttgtattaagttagtagttgatattattaataagtaattttttttttgtgattgatagtgaggtatgttttgtatgggttttttagaattttttattgggattgagttttagttgtttatagtggtgattggtttgagtaaatattttttattgattgtatttttttttttggtttatttttttatatttttattaatgttttttgggattattttttagataatttatttgtattgaaatttttatttggggttagtttttatagaatttttattaagatattaggaaagggggaagttttttgtaagtatatgtgataaaagaaagataaagtttagtttgttaaaagggattagagttataaatatgtttataaaaattttgttttgttatttatatttgatttataatgattatttgggaaatttgtttttttgttggggtagggatttgattgattatgtaaaggggaaatagatgtatttagtttgtggttttatatatttgttggatgagtaatgattataatttgttaggaggagataataaaaaaatttatataaaattttttattgtgtaagtgatattggttattgtagttggtaattagaaagttattttgaggatagaatttttttgtttattaatgtagagaaaatggttagtttgttttttatgttttagaatataatattggagatgttaggatttattttagaggagttatgatattagtaaaatataaaaaggatgtagtaaatgtgtgttatagtaaagattataaaataaaatttaagtattttagagtttttggggtaaattgaatttatgggaattgaaaaataaatggtttgaaaaaaagtatgttttttttatagagaataggaaaataatatattttttttttttatgaagagtaagtttttttggttttaaaattgtaattgagatattttttaatatataaaaatattattttataaggatttatttatagttttggtatttgtaattaggttttagtttaaaggttttttttttagtgtggatagatgttaatataggaatataatttgtaaataatgagagtaattagtatttttttttatttgtttttattatttaattttttgtttgatattgatgtttttttttgtagatttagtttttgtgggagtagttagggtgttagtgtttttatttattttatattttttattttaatatagttttagaaggttttgtatttattgtagggtgtgggagagtttgggatgatgaaggggttagttttataatattagtattattaataaattttaaatatttgaggaaaggggtttattttgaggtattttttagtttaatttaagtgttataataaagattagtatttgtatttgtttttatattttaagttttgatatttaataaaattaaaaaaaaaatagtgtttatattataatttaatgtatgttagtggaggggtaaagggatttagtttatgtagttatatagggatttaggttgtttttgtatattggttttataatgttttaggatataggttagtaagtattatgtttaaagagttagagagtaaatatttttagatttgtgaggtatatagtttttgttttaattattgttattatagtgtgaaagtttttataaataatatatgaataaatggttatagttgtatagtaataaaat

SEQ ID NO: 2473 - DNA, 2432 bp, Artificial Sequence
  chemically treated genomic DNA (Homo sapiens)
gttttattgttatgtagttatggttgtttgtttatgtattatttatggaggtttttatattatagtggtagtagttgaaatagagattatatgttttataaatttgaaaatatttattttttggttttttaaatataatgtttgttgatttatgttttaggatattgtagaattaatatataggggtagtttagatttttgtgtgattgtataaattaggtttttttgtttttttattaatatgtattaggttgtgatatgagtattattttttttttaattttgttaaatattaagatttggggtataaaagtagatgtaaatgttagtttttgttatagtgtttgggttgggttaaaagatattttagaatagatttttttttttaaatatttaaggtttattgatgatgttaatgttgtaaaattgatttttttattattttaagtttttttatattttgtggtgaatgtagagttttttagagttgtgttggaatggagggtatggagtaggtgaagatgttggtattttggttgtttttatagaggttgaatttgtaggagggagtgttagtattaaatgggaggttggatgatgggggtaaatagaggaggatattgattatttttattatttataaattgtatttttgtgttggtatttgtttatgttgaaaaggaaatttttagattaaaatttgattataaatattaaaattgtgggtgagtttttataaaataatgtttttatatgttaggaaatattttagttatagttttggggttagaagagtttattttttataaaaaggagaaatatattatttttttgttttttgtaaaaagagtatatttttttttaagttatttattttttaatttttatggatttaatttgttttaagagttttgaaatgtttggattttattttatgatttttattgtaatatatatttgttatattttttttgtattttgttggtattataatttttttggaatgaattttagtatttttagtgttatattttgagatgtgggaagtaggttagttattttttttatattaataggtagaaaagttttgtttttggggtaattttttgattgttgattataataattagtgttatttatataataaaaagttttatgtgaatttttttattgtttttttttggtaaattatagttgttgtttatttagtagatgtgtgaggttgtaggttgagtgtatttgttttttttttatatggttagttaggtttttattttagtaaagaggtaaattttttaagtggttattgtaaattaagtataggtaataggatagagtttttgtaaatatatttgtgattttggttttttttgataaattgaattttgttttttttttgttatgtatgtttgtagaggattttttttttttttggtgttttagtaggggttttatagaggttgattttgagtaagaattttagtgtagatagattatttgagaggtaattttagaaagtattggtaggggtatgggaaagtgagttagagaaaagaatgtagttaatgaagagtatttgtttaagttagttattattgtagataattggggtttaattttgatggggaattttagaagatttgtgtagagtatgttttgttgttagttataggaagagagttgtttgttggtggtgttaattattagtttggtatagaagtaggtaaagaagtttttttagtttagagaaagtttttaggttaagaaatgtagattttgggttttgaaagttgagtttttgtttattgatagataaggatttgggatgtgggtaggtattgatagtatgtgttgtatttgggtagaagaattattgtttttttagggtttttattgaggtttgagttaatagttagtgttttaaataaaatttttttttgggtaaaggggttttgagggtttttttttattttgattttttttttatttaagagtggttttgtaggtggatagggtatgttagtgtttaaataattagttttggggggatttggaaggagattgggatatgatattttaaattttaaagtttattaggtaatgtgtgttttttagttaaattataaattttttgggggtatagaaagtttattataaatttaatttttatttatttatagagtgaatgagtttattgatatgtttattggagatgtttgatatgggaggggtagtggatgataggggtgtgtgatgtgggggatgtggtgtatattttgtgtgtatatgagtggtttgtgtgttaagtgtgtgttgtgatatgtttggatgtgtttatatgaggatttaggtaattaaatattatatatgtttgtgttggttttattgagggtagttttaagagtttttttttaaggatttttttattttga

SEQ ID NO: 2474 - DNA, 2411 bp, Artificial Sequence
  chemically treated genomic DNA (Homo sapiens)
agagtttttttagaggtagtatttgaataattatgttattaaatgttattgtggtagtagagaataagtatgttaattttttttagttttttagaaaaaggatatttttgtttttttttttttaattttttttatttatttgggagagtatgttataaatgtggtttttaaatatatgaattgatgtttttattttaatagttaagaatatggtttttagaattatatagagttgaatttatatttagttttattatttattaggtatgattgttggtaagttaattttttgggatttagtttttttttttgtaatatgagggtaatgtagttataatattttaaggaagttttggggattaaatgagaaaatgtgagtttgaaaaagtggggtatattttttatgttttttgtggttttttttaattttgtaattttgtaataggatttaataaatattttttgtggatttgtaatgtggttttattttgtatgatttttagagtaattttatggagttaaattattttaaattttagtaatttgaaataataaatttttattattttttaaaattttgtagatgagttggttggttttttttatttgagttggtttggttaggtttttttatgtatttgtgatgaaatggaggaatagttgttggttggttgttttaggatggttataattatatatttggtagttggatggttattagtgttgtaggatgattagtaggtgtttttttttttttgtaggttagtttgggttggtggtttattttgtggttataagagagtgagaaaaagtgtgtaatattttttgaagtttaagtttagaattgatatatgtttatttttgttatatttgattagttaaagtaagttttaggttagtttaggtatagtaggtgaggaattagattttattttttgatgagaggagttgtaaagttatgtgtaagtttaggaagattttgtggttattttagtagttgattaggttatttagttagttttttggagttatatatgtgggttggtttttttaagttttttttgtttaaaaagttagatagagtttgtttttttagtagggtgtatattgtaggtttgggtgggttgtttgtttttgtgtttgttttgatttttagttatttttaggatgttttttttatggaggagaatgatttagttttgtttgttatgtgtattaagatgagttataagagagtattgtttttttgtaatgtaagaaatgtaatgtagttagaggttttgaaatttggtggggatagtggtagtagagattgtgatagttttgggatataggaggttattttggtttttagttttaggtgtttggagttattagatagttaaagttgtataaggtataggtatgatttgttaggttgtttagttaggttagggatgatagggtatgtttattttattagttaattagagataatttttgtttgaggaatgagtggaatttttagtttttagatgatgttgggtttgagttttttttgttagtatatttggagattttataagagttataaaagtttgtaaagggttttggagtgttttatttaatgaaattatatttttttttttggattgggttaaggaggggttatatatatttgatagggtgtttttagatgggggtgtgtagaggatgggtttttatttagttttggttattttttattttttttaaaaatttattgtgggttaggataaggagaaataagagattgtgattggtagagatataggaaggaatgttttaaaaagagtaaaaaatttgtttttatgtattttgttgattgagtttttgggaatggagtttttttttgaggaaatattataatatggtttagaggtggaaggttttgagaagggttttggtaagtaggggaaaatgtttttttaatggtttttttgattttaggtagagttttatttagtgatatttttgggtgagtgggtaaaatgagaaattttttttataattttttttgtttatagaaggtattaaatgaggtttggtaagaggttaggattaggtaagtttagaggttagaaattttagttaggtttatttagtatttaggaagagtagaggtttagtagtttttgagggaggtatagtttggtttttggaaaatggttttattgggttttattttttaggtatttggtttttggttttagagataatgttgagtttagtttttatttatgtgaaagtttttaaatttaaaagttagggagatgttttatattatatttagatagagggataaggaataaaatttatttattttttttttatgtgtttttttttgtaggttgtggttttattgtttttaggtggttggatggggttgtttt

SEQ ID NO: 2475 - DNA, 2411 bp, Artificial Sequence
  chemically treated genomic DNA (Homo sapiens)
ggggtggttttatttagttgtttggaagtggtggaattgtagtttgtagggagaaatgtatagaaaggaagtgggtgagttttattttttgtttttttgtttgggtatggtgtgaggtgtttttttggtttttggatttgaaaatttttatatgggtgagaattgaatttagtattgtttttagagttaaaaattaagtatttggagaatgaggtttagtagggttattttttaagagttaagttgtgttttttttaggggttgttgagtttttgttttttttgagtgttgggtaggtttggttgaggtttttggtttttagatttatttgattttggttttttgttggattttatttaatattttttgtgggtagagagaattgtaggaggaattttttattttgtttatttatttaggaatgttattgagtggggttttgtttgaggttagagaggttgttgaagggatatttttttttatttgttaggattttttttggagttttttgtttttgagttatgttgtggtatttttttaggagaaggttttatttttagaggtttagttagtaaagtatatgagagtaagttttttgttttttttgggatatttttttttatatttttgttagttatgattttttgtttttttttgttttggtttatagtgggtttttggaaggggtgagaagtgattggagttggataaggatttattttttatatatttttatttggaggtattttgttgggtgtgtgtgatttttttttaatttagtttagaagggagggtgtgattttattgaatgaggtattttaaggttttttgtaaatttttatggtttttgtgaaatttttaaatgtgttagtagagaaaatttaagtttagtgttatttgagggttgggagttttgtttattttttaggtggggattgtttttgattagttggtgaggtgaatgtgttttgttatttttggtttggttgggtaatttggtaggttatgtttgtgttttgtgtaattttggttgtttggtagttttaggtatttaagattgaagattaaggtggttttttgtgttttgaggttgttatagtttttgttgttgttgtttttattagattttagagtttttgattatattgtattttttgtattataagaaagtaatgtttttttgtagtttattttaatatatatggtagatagaattgagttgtttttttttatgaaagaaatattttggaaatagttaaaagttaaaataaatataaaaataaataatttatttaggtttgtgatatgtgttttgttggaaaaataaattttgtttggttttttgggtggagaagatttgggaaggttagtttatatgtgtggttttagaaaattggttgagtagtttaattgattgttaaaatggttatggagtttttttaggtttgtatatgattttatagttttttttattaaggggtggagtttagttttttgtttgttatatttgggttggtttgggatttgttttgattaattaaatgtggtagaaatgaatatgtgttagttttgaatttaggttttaaggggtgttgtatatttttttttatttttttgtgattataaagtgaattattagtttaggttagtttgtgggaggaggagaatatttgttagttattttgtagtattgatagttatttaattattagatgtgtgattgtggttattttagaatagttagttaatagttgtttttttgttttattatagatgtatgagagagtttggttaagttagtttagatgagaagaattaattaatttatttgtagaattttgaaaaatgatagaagtttgttgttttaagttgttaaggtttgggatggtttaattttatagggttattttgaggattatgtaagataaggttatattataagtttataagaaatgtttgttgaattttattatagagttatagaattggaagagattatagagaatataaaaaatatgttttatttttttaagtttatgtttttttatttagtttttaaaatttttttgaaatattgtgattatgttatttttatgttatggaaaagagggttgaattttaagaagttaatttgttaatggttatgtttagtaagtggtgaagttagatgtgaatttagttttgtgtgattttaaaggttatgtttttaattattaggataaaagtattggtttatatatttaaaaattatatttgtggtatatttttttaaatgggtaaaagaaattggaaaaggaaagataaaagtattttttttttggaggattgggaaaagttagtatgtttattttttgttattatgatgatatttgatgatatgattatttaagtgttatttttggaagaatttt

SEQ ID NO: 2476 - DNA, 2457 bp, Artificial Sequence
  chemically treated genomic DNA (Homo sapiens)
aatgttaaagggattttaatagtgatttatgtttggaaatagtttgtgggaatttgtgttgatttattggaggatttagtggaatatggtagttttaaggtagagttagtttgaaattttgtgaatatgttttaggataattagatggttagagtgagatggggttagggtgggggatattttgagttaaggagttagtgatttttagaagagtgaggagaaaatttaaggttttttttatgaaagggggtagagttgggataatatttaaggaggttagggggatgttgagggggtttggttggagggtttggtaggtgtatggagagtttttttttagataaagatttgggtttagtttttgagaagtattgaggtatttattaggttggaagtagagttttttttgtttttgttttggttatatttatagtttgttggtatttgttggtttttattttaggtttagttgagttaaggaattttaaggaatagttatttttttttatgtttattaaggtgattttttatggtttttgtgggatgtttggttatattgggtttagaaatttgtattttgtaaatttattggtttttttgtgattggggtttttttttgtgttttagtgtttttttgggaaatgtttaatttttttttggtttagttaaggagaaaggaatttttttagatttagttagagatgttggtttagtttgattgggagggaagggtgattttaataaggttgggggtggtagtggggataatgtgtgatttttttgggaagtgggattgtatatggtattggggtgggtagttttggttttttttgatttggttgtttttttttagtgttatgagttttgagtttggttgttttggtgatttgtttttagtttttatttattttttaattattttatgtttttttgagtttttttttatttttagtatagtttatatataatgtaagtgtttaaaagttgaattgtagtattgagttgaggggtggttagttttggtgagttttggtgttttattatggtttttttatggttgtttttattttttttttagaaaagttattgagaaatggaattttttgatattatttttagttaaagttgttgaaaatagtttagaggagtgaattttatagagttttatgttttgtttagatttttggggttttttgttttatggagtttgtagagttgtgtttagattttttattttggattgttatttggtattggttttttttatgtagtttttttgtttttattgtaatttgattttttgttaaattattttttttttggttttaaatttttgttgggaaagagatgaaattagtatttggagagttggaaagggaaaaatagttgttttttataaaatgggttagggagggggaagtggagtagtatagttggattttggtgggaaagttagagtttggtgggaatgtatagtttatagtaggagagataaatatataaatttagaggggtttagtggtagtagtttaggggtttgtttgttaatggtattttgtgttgtattttttagatatagttatattttatatttatattaattattttagggttgtagagattttttttattttagagaggtaggtataaaaaaaaaaaaaagatttttttttttttttagtttttttataagaataattatagtgtgtgtgtttgggataaatagagagtggtggggtttgtggtattaaggttgttaggtaaaattgtttaggttgggtggattttgtggtattttgtaattgtggttgtgtggttatgtgggtttttgataataattatgattttttaagaggagttagggatttggatttttatttaaaaattatttgagatttaaatattggtaattaatttagaagttttatggtattgagtagttagtagtatattgtgggttaagtaaaatatgtttgtgggtagagttggggttgagggttggagtttgagtttttttttatgggtgagaattgatatatgtattttagttaggagtaggtattgttagtattttatttattttttaaattttttttttttttttttgtttttgtgatttttttagttttgaagggtttttattttttgtagtatgtatttgatttattttatggtataatttgttttttattattttattttttatttgttttttttaatgataattttaatataatagtatataatagttgttttttgtttggttggttttttgttttttttgttttttttttgagatagagttttattgttgtttagtttggagtgtagtggtatgattttagtttgttgtaatttttattttttgggtttaagtaatttttttgttttagttttttaagtaattgggattaaggtgtttattattatatttagttaattttttgtatttttagt

SEQ ID NO: 2477 - DNA, 2457 bp, Artificial Sequence
  chemically treated genomic DNA (Homo sapiens)
attaaaaatataaaaaattagttgggtgtagtggtgggtattttagttttagttatttgggaggttgaggtaggagaattgtttgaatttgggaggtggaggttgtagtaagttgagattgtattattgtattttaggttgggtgatagtgagattttgttttaaaaaaaaaataaaaaaaataaaaaattaattaaataaaaaataattattatgtattattatgttagagttattattgaggaaggtaggtgaaaagtggaatggtaagaaataggttatattatgaggtaagttaggtgtatattgtaggaagtgaaagttttttggagttggaggggttatggaaataaaaaagggaggaagggatttgggggatgggtagagtgttgataatgtttgtttttggttggggtatatgtgttagtttttatttataaaggaggatttaaattttagtttttagttttaattttatttatagatatgttttgtttggtttatagtgtattattgattgtttaatattgtaaagtttttgaattagttgttaatgtttaaattttaggtaatttttaaataaaaatttagatttttggttttttttgaaaaattatagttgttattagaggtttatatagttatatggttatagttgtaagatgttatagagtttgtttaatttgagtaattttatttggtggttttgatgttataggttttattattttttatttgttttaagtatatgtattataattatttttataggagaattaaggggaaagagaaattttttttttttttttgtgtttatttttttaaaatggagaaaatttttatagttttaggatggttaatgtggatatgagatgtgattgtatttgaagaatatggtataaggtgttattggtaagtaagtttttgagttgttgttgttgggtttttttaggtttgtgtgtttgttttttttgttgtgagttgtatgtttttattagattttggtttttttattaagatttagttgtgttgttttgtttttttttttttagtttattttgtgaaaagtagttgtttttttttttttagttttttaagtgttgattttattttttttttgataaaagtttgaagttaggagggaaatggtttggtagaaagttagattgtagtgggagtaagaagattatgtggaggaggttgatgttgggtagtggtttaggatgaggggtttggatgtggttttgtagattttatgagataagaagttttaggaatttaggtggggtatagggttttgtggaatttatttttttgagttgtttttagtaattttagttaggggtgatgttaaagagttttattttttaatagtttttttggaagaggggtggagatagttatggggaaattatgatgagatattagggtttattggggttgattattttttaatttagtgttatagtttgatttttgagtatttatattgtgtgtggattgtgttggggatggaaggaggtttgagagaatatgagatggttaggaggtgaataaggattgaaaatgggttattaaggtaattaggtttaaaatttatggtattggggagggatagttaggttaggaggagttagaattgtttattttggtattgtgtgtggttttattttttgggggggttatatattgtttttattattatttttggttttattaaaattattttttttttttaattaagttgagttaatatttttgattgagtttggaaaaatttttttttttttaattaggttaaaaaaaggttgaatattttttaaaggaatattgaggtataaagggaaattttagttatggagaaattggtgagtttatagagtgtagatttttgagtttagtgtgattaaatgttttatggaaattatggaaggttgttttgatgggtatgggaagaggtggttgttttttggaattttttgatttagttgggtttgaggtggaggttagtaaatgttagtaaattgtggatgtggttggggtgggggtgggaagggttttgtttttagtttggtgggtgttttagtgttttttagggattgggtttaggtttttgtttgggaaggggttttttatgtatttgttaggttttttagttaggtttttttaatatttttttggtttttttgaatgttgttttggttttgtttttttttatgaggaaagttttgaattttttttttatttttttggaagttattggttttttggtttagggtgttttttattttgattttattttgttttgattgtttggttgttttaaagtatgtttatagggttttaggttggttttgttttggagttgttatgttttattgggttttttgatgagttagtatagatttttgtgggttgtttttaaatgtgaattattgttggagtttttttggtatt

SEQ ID NO: 2478 - DNA, 2446 bp, Artificial Sequence
  chemically treated genomic DNA (Homo sapiens)
tatatgtgtggagagattgtgaattgtgaattatatttatgtaattttgaatttgagttttgtttataagatttagtttatgttttttgtgttgtgaagttttttaggaatggtttgtggttgttttgtttattgttgtatttgatatagggttttgttaaggtatttattatatttgtttgtatatttatttttttattagattttgggtaagtttttaatttttaaattattattatttttttgagatagtgatttgttttgttgtttaggttggagtgtaatattggtgttaatatggtttattgtagttttgaatttttggattttagtgatttttttattttagttttttatgtagttgggattgtaggtatgtgttattatgtttggttgattttaatagtttttgtagagataggggttttgtaattttgtttaggttggttttgaatttttgattttaagtgatttatttaatttagttttttaaagtgttgagattatatgtatgagttattgtgtttggtttaaattttttattttatgttttttttgtttttggtttaatttagtgtttggtatgtggtagatatataggttagtgttataaatgattatatttttatatttgttgttttaaatgatggttttttattaagaatttgagaatttttgtttgtgggttttgtttgggtgtggattaggttaaagttttatggagttaatattttggggtaatatttaagtaatgaaaattagtagttagtggatgaatagtttagtatgggataattttggggtaggttttgtatagttatttggttagatttagtagtattgagttttggttgtttatagtagtgattgtttataattattttgtttttttttttagttttattttttttttattattttatgttttttgggttaaagaaattattattttggggtttgtttttgttggagtttaaattaagataattggttagttggttgattggttgtgtgaatgggtatgattagtagtaaagaaagaaatggaagtttgtgtgttggttgggttttggtatatgtgttgtttttatagtgtgtttagattatgttggggtatgtgtatagttaatagatttgatataggaaaaagtattttttagttgtttttattattttgttatttgttattttatttatttgttgtttttatgaaatgtttatttatgttagttaaaatggtatattgggtttggaattggttggggaaatgttaggttgatagaataggggggataattgaaatagtaattgtgtggatggtggtggtgatataaatttgtttttttgtgtagaaggtaggatttttagagtttaggaggttttttgtggaggaattggtatgtggtgaaggttgtagggagggggttttgggatttaggggtagttagagtagggttttttgttttgagagttttttattttttttttttagaatagaggagattgtttaaatatagaatttagtttgtttaaagttattgtttatttttaaatgtttagtttgttttttaattaattttttatggtgtagtttaagaaaaatgtgtggatttttatgtttgaggttagttgtaggatgtattttgtagaatagtgtgtgtttttgtaagttggggattgagtgttttgttttgttttgtttttttagggtaaaggggttattttaaaagtaggattgtttggattttagaagattggatatttatttattatttaaattttttttttttttttttttttttttttttgagatgaagttttgttttgttatttaggttggagtgtaatgggatgattttagtttattgtaatttttgtttttttagtttaagtgatttttttgttttagtttttttaattagttgggattataggtgtgtattattatgtttggttaatttttttgtatatttagtatagatggggttttattttgttggttaggttggttttgaatgtttgattttaagtgatttatttattttggttttttaaagtgttaggattataggtatgatttattgtgttgggtttattttttttttaatttattttagagagaaggtttttttatgttgtttaggttgtttttatatttttgggtttaaatgatttgtttatgttggtttttaaaagtgttaagattataggtgtgagttattgtgtttggttatggatatttatatattttttttataaatatttattgagtgtttgtgttgatttaggtattgttttgagttttaggaagaaagtagtgagtaaatttaataaaattttttatttttttgagattatagatttgtgggagggttggatagtaaataaatatatgtataaatgttaggagattttaagtgtgaagaaaagtataggggttaggtgt

SEQ ID NO: 2479 - DNA, 2446 bp, Artificial Sequence
  chemically treated genomic DNA (Homo sapiens)
atatttggtttttgtgtttttttttatatttaaaattttttgatatttgtatatatatttgtttattgtttagtttttttataggtttgtaattttgaagaggtggggaattttgttgaatttgtttattgttttttttttggagtttaagatagtgtttagattaatataggtatttaataaatatttgtagaaagaatgtataagtatttatggttaggtgtggtggtttatatttgtaattttagtatttttggaggttaatgtgggtagattatttgagtttaggagtatgagaatggtttgggtaatatagggagattttttttttaaaataaattaaaaaaaaaataggtttggtatggtgggttatgtttgtaattttagtattttgggaggttgaggtgagtggattatttgaggttaaatgtttgagattagtttggttaataaaatgaaattttatttatattaaatatataaaaaaattagttaggtatggtggtgtatgtttgtaattttggttggttggggaggttgagatgggagaattgtttgaattggggaggtggaggttgtagtgagttgagattattttattgtattttagtttgggtgatagagtgagattttattttaaaaaaaaaaaaaaaaagaaaagaaaaaaatttaaataataaataaatatttaattttttaagatttaaatagttttgtttttagaatgatttttttattttgagaaaataaaatagaataaaatatttaatttttagtttgtaggggtatatgttgttttgtgaggtatattttgtaattgattttaggtatgaaaatttatatattttttttgaattgtattgtggaagattgattggaaaatgaattgaatatttaaaaataaataatgattttaaataaattgagttttatgtttggataattttttttattttgggaggaaggggtgaagagtttttagggtagagggttttgttttagttgtttttgagttttagggttttttttttgtagtttttgttatatattaatttttttgtaagaggttttttgagttttgggagttttgttttttatgtaaaggggtagatttgtgttattattattgtttatatagttgttattttagttgttttttttgttttgttagtttgatatttttttagttgattttaagtttagtgtattattttagttgatgtgggtgagtgttttgtggggatagtagatggatggaatgataaatagtaggatggtggggatagttgagaagtgtttttttttgtgttggatttgttggttgtgtatgtgttttgatgtagtttagatatattgtgggggtagtgtatgtgttagggtttagttggtgtgtgggtttttatttttttttttgttgttaattgtgtttatttatatagttaattagttaattagttagttgttttggtttgagttttagtagaagtagattttaagatagtagtttttttgatttagaaagtgtgagatggtagaggggaagtgagattgaaagagaaggtagagtggttatgagtagttattgttgtggatagttagggtttagtgttgttgggtttggttaggtgattgtgtagaatttgttttagggttgttttgtgttgggttatttatttattaattgttggtttttattgtttaagtgttgttttagggtgttaattttatggaattttggtttgatttgtatttagataaaatttgtaggtagaaatttttaggtttttagtaagaagttattatttggaatagtgagtgtgagggtatggttatttgtaatattgatttgtgtgtttgttatatattaggtattgagttagattaggggtagaggaaatataaaatgggaggtttaggttgggtatggtggtttatgtatgtaattttagtattttggaaggttgagttgggtggattatttgaggttaaaagtttgagattagtttaggtaaaattgtaagatttttgtttttataaaaattgttaaaattagttaggtatagtagtatatgtttatagttttagttatataagaggttgaggtgggaggattattagagtttaggagtttgaggttgtagtgagttatgttggtattagtgttgtattttagtttgggtaatagagtaagttattgttttaaaaaaataataataatttgaaagttggaggtttgtttagagtttagtggggagatggatatataagtagatgtggtgaatattttggtagagttttgtgttaaatgtaatagtagatagaataattatggattatttttgggaagttttgtagtgtagggaatatgagttgggttttgtgagtaagatttgagtttagggttatgtaagtgtagtttatagtttatagtttttttatatatatg

SEQ ID NO: 2480 - DNA, 2476 bp, Artificial Sequence
  chemically treated genomic DNA (Homo sapiens)
agatttttgtttatttattgatatgtattttttagttatagatttatgtttttttatttgttgaaatgtttttaaatattgtttttaatgttttgtttgtgttgttggttttttgttatttagttaataatgaaatagttttagtgaatttgtagtagtagttgttttagttttagtgtttatttatttttgtagttgaattattttgaatattttttgatggtgtaagagatagttttattattttttttattggtttttttttgtgtttgttatggttggtatgagttattttttgtgtatgttatggtgagaagggatgaatgaggaaagatagggtggttttatatttgattttgggatagttattgggtaaggaagggtttggggttgtttttttaggttttttttaatgtgtgaaggtttgagttaggttagttggtagaggtgtgtgtatgtttaatttagaattgaatgttgaaggttttgtgatttaaagggaagaattattgggatttgatgttttagtaggggaaattttaagtttaaaaagttatagttagaatttagaattgtgttgttattttgtttttgagtttttttttatgtttagttttttttttgtggatgattgtgaagttgtttatatgttgtttttttttgtgaattgatttttgtaaatagtgataggattttatttaaatatttttgatttttaagggaaaaatagagtaatttttttttagtgtttttttgttgattttgtttgggggagaggttagtagagttaaggatgattttatttttttttagtaggattttttgggatgtatagaatttttttttttagttgtttttttgtgattagttatatttaatttataaatttttagtgtagatgatggggatatttaatattgggtttgtttatattttagtaggaggtgaaatatataaagtaattattaggttttttgaagttttaaggattttttatgttagtggtagaggtgggaggtgggttggtgaggtggggtagtttaggaattgtgttggtggggataggaaattgggttgaagggagatgtaaggttttggtgggaaataaatggtattgtgttgttgatggaaaaagattttggtaggattgttgttgtgagtgttttgtggtttagaaaggaattttttataggttggattaattattaaaaatgtttttatttttaggagtttttggtgtgtagtggagttttgttgggggaaatgatagtttggattatgggtgtttgtggtttggataagtgaggaagtttttttaaggtaaaaggaagttttgattgggattttaatttgttggtttgttgtttgagtttgggagttgtggtgttttatggagttgttgagggaagtttgttttttgagttagtattggttaagggagtttgtttgagtttagttgttgattgttattagggtttataataggttgtggggtttgtgatttagtgtttttatataggtataggatttgggtatggagaggggttgtgttgtgtaagatggttgaggttgtttttatttgagagttgtttagtttgtttttttttagttgtagggttttatggtggaagttgtattttgttttttagtgaattaatgttgttgtttatgtgttttttttttggtttgtttgtatgaattattgaagggttttaaaataaataaataaataaataaataaataaaaaatagttttttggattgtattttagaatgatgaaatattattttttggtatattttattaaatatttttaaaggttttttatgataatgaggaagtatgattataattgtttaatttttttgtgtttatattgatgttaatgggattaaattattttgttagtttaatgagataagattttaaatgggtgttttatgtattttgtgtgtgtgtatttaatgaagatttggtggttgtttttgatttatatttgggaattaattttttttttgtggttttttgttttgtttttttttatttatttttgaattaaggtatttttagtatagaaaattttgaaaatatagaattatgtttaaaaaggtagaaaaatggaggtaaaatatgtatttgaaatttgttataggtagtgttttaatattaggttttgtttttagaggaggaagatggaggagattttattattgaggataagtgattatgtttaataattaattaatttttatgggttggaagtatttattaatatttatttatatgttttttgtttttaagagattaaaattgatatattgtgttaattgttgattttataaaaaaaaaaaaaaaaaaaaaaaattattagaagaatttgttgataaagtaaagtttatgagatttattgaaataaggaagaatattattaggatatagttttatttatgtttaagttaggggagattaagaggt

SEQ ID NO: 2481 - DNA, 2476 bp, Artificial Sequence
  chemically treated genomic DNA (Homo sapiens)
gttttttaattttttttggtttagatatgaataagattgtgttttggtgatgtttttttttattttagtaaattttatgaattttgttttattagtaggtttttttgatggttttttttttttttttttttttttgtagagttaatagttgatataatatattagttttggttttttggaaataggaaatatgtaaataagtgttaatagatatttttaatttataaaggttggttaattgttaaatatagttatttgtttttggtaataaaattttttttgttttttttttttgaggataagatttggtgttggaatattgtttatgatagattttaagtgtatattttatttttatttttttatttttttaaatataattttgtatttttaaaattttttatattgaggatgttttaatttgagggtgaatgaaaggaaataaagtaaaaagttataagaggggaattgatttttaagtgtaaattagaagtgattattaagtttttattaaatatatatatatagagtatataaaatatttatttaaaattttattttattaagttagtaaggtaatttagttttattaatattaatatgaatatagaagagttagatagttataattatgtttttttattattataagaagtttttggggatgtttgataaaatatattagaaaataatattttattattttaaggtgtggtttaggaagttgttttttgtttgtttgtttgtttgtttgtttgttttggagttttttagtgatttatataaataagttaaggagagaatatatggatgatagtattgatttattggaaagtaaagtatagtttttattataaaattttgtagttgaaaaaggataaattgagtagtttttaaataaagatagttttagttgttttgtatagtatggtttttttttgtgtttgagttttgtgtttgtatgaaagtattaaattatagattttgtaatttgttataagttttggtaataattagtagttgggtttgggtaagtttttttagttggtgttggtttagagagtagattttttttagtagttttatggagtattgtagtttttaggtttaggtagtaagttgatgagttgagattttaattaaggtttttttttattttaaagaaatttttttgtttgtttagattgtgggtgtttatggtttaagttgttattttttttagtgaggttttattgtatgttggggatttttgaaggtagagatatttttaatggttagtttagtttgtaggaaatttttttttaagttatagaatatttataataatagttttgttaagatttttttttgttaataatatagtgttatttattttttattaaggttttatatttttttttagtttaattttttgtttttattagtgtagtttttagattgttttattttgttagtttattttttatttttgttattgatgtagaaggtttttgggattttaggaagtttaatgattattttgtgtgttttattttttgttgaaatgtgaatagatttaatattagatgtttttattatttgtattggaagtttatagattgaatgtggttgattatagagggatagttgaagaaggaggttttgtatattttaggaaattttgttggaagggggtgaggttatttttagttttgttggttttttttttaggtaaggttaatagaagggtattgggaagaaattgttttattttttttttagaaattagaaatatttggataaaattttgttattgtttatagggattagtttatggaagaggataatatgtaaatagttttatgattatttataaaaggggagttgaatgtagaggaaaatttagaggtagggtaataatatagttttgaattttaattgtagttttttgggtttggaattttttttgttagggtattagattttaataatttttttttttgggttataaagtttttaatatttagttttaagttaaatatatatatatttttgttagttgatttggtttaggtttttatgtattgaggggggtttgggggagtaattttaaatttttttttatttagtgattgttttaggattaagtataaaattattttgtttttttttatttatttttttttgttataatatgtataggaggtagtttatgttaattgtgatggatatagaggaaggttagtgaagggaatagtgagattgttttttgtattattaaggaatatttaaagtggtttagttgtaggggtgggtaggtattgaagttaaggtagttgttgttgtaggtttattgaggttgttttattattagttgagtggtagagagttagtgatataaataggatattgagggtgatatttagggatgttttaataagtggaaaagtatgaatttatagttgagaagtgtatattagtgagtgagtaaggattt

SEQ ID NO: 2482 - DNA, 2463 bp, Artificial Sequence
  chemically treated genomic DNA (Homo sapiens)
gtgatttgtttgtagaaataattttgaaagttttttgaggaaaataaaaattaagaagaatattttttttttttttttatataaattaaaatttaatagtattaaattattgggattagaaattaagtaatgtataatgtggtttttgttgagttaaataagatgttatataatggagaagaatttgaaaatgtataaaaaaattaatttatattattagaatttgtagtgaaattaaatttatgttaaataaaattagtttgtaggtgtataaattatgagggttttgtatttatgtaatataggtagttataaaaatatgttattgtattgtgtaaagatgtatagttattttatttggttggttttgtattttgtattttttttagttttggtttttgttgaattagaatttttagtatatattgtgttgtatttttgtaaatgattttttaaatggaattttgtatataatatattgtaatattgtatgataattatgtgtgaaaataatttttgaaatattttttggttgtttttttttttttttagagtaagaatatatttatgtattatgtagtgttatggatagatgaaatttgaattagggtttgtggttagataatgtattgtgggggtgagtagaaaagtttatattttttagaagttttttttgatatggggtaaaagttaaggagtagaaggaaaagattatttttttatttgaaagtgtttttattgttatttagtgttgtatttggtttagtgggatttagagtaaattataggtaatttgaatttggagttagttggggttttgtagatagttttattttgtttttatgtaatttttgtaatgttttgggtgatagtttagtgttgttgtaaaattgatagtgtagaggtttggattttttgttgttatattttttatgtttggaagggtgtttggtatatattaatagtaagtgtttaataaatttttgttggttgaaggaaggaaaatatgagtttagaagggtttttaatttattagtgggagagatttgtaaagattagaatgagaattgaatgggttgtttgtttttgatatttataatggattaaaagatgatagtttaatttatatggttgtttttttaattttttaaattaagattattatgttttgttgatttaaagtaggttatagtttttggatgtgaggtagttttgtagtttttggtgggatgagagtgggtttagaagaggaaaaggtagtgtgggtagaaagtaatattataagatggtttttggttttgttattgggtaatgtttttttgttaaaattataatataatatgtgtttttatttttttttttatgtaggtattttttattttttaaattgttaggaaatagatttgggtgaaggttggagggaataagaggagagtaaaaatatatatgttgggtggaggaagaggagaatgtatttttaaatttaaaaatatattatagttgaggtgggaggattgtttgattttaggagtttgagggtgtggggagttatgattttgttattgtgttgtagtttggatgatagagtaattttgttttttttttataaaaaagtaaaaataaaaatatgttataaaagttgaatgttggttaaaggaagggatttttttttttttttatgttgtatgtgttgttaaatatttttattttagtattatttttatatttttgggatatagaatagaaatagaaattgttgaagtagtttatattatgtggaggttataattttagatttataagaaaatataaaggataggaaatttagttatgaatgtttttatttataaatgtggttttgtttttattgggtagttgttatttttattttttttaagagatttgaaatgaggtagtgttttaatttttaatgtttgtttatgttgttatgtttggttatatttagttatttttggttttttattagtagttttagagaaatagaaatagtataagaaggattttgaagggtatagtgtgtgtggaatataggtattttaattatttggtagtatttgatagtaaaattttaagtgtttttatttttttggtttatttttatgatggtgaattagagattaaaagtattttttgttatttggttaattttaatttagttggaaatatgggaaagaaattgtttaatattgtaaaattttaaatatgtgataaggaaaggaaggaaagaaggtagagaggggttaggtgtggtggtttatgtttgtaattttagtattttgggaggttaaggtgggtgaattatttgaggttaggagtttaagattagtttggttaatatgtgaaattttatttttattaaaaatataaaaattagttgggtatggtggtaggtatttgtaattttagttatttgggaagttgaggtaggagaattttttgaag

SEQ ID NO: 2483 - DNA, 2463 bp, Artificial Sequence
  chemically treated genomic DNA (Homo sapiens)
ttttaagggatttttttgttttagttttttgagtagttgggattataggtgtttgttattatgtttggttaatttttgtatttttagtagagatggggttttatatgttggttaggttagttttgaatttttgattttaagtgatttatttattttggttttttaaagtattgggattataggtatgagttattgtgtttggtttttttttgtttttttttttttttttttttattatgtatttaggattttgtaatgttaggtgattttttttttatatttttaattgaattagagttaattaaatgataaaaagtatttttggtttttaatttattattatgaaaatgggttgaaaaaatgaggatatttagaattttattattagatattgttagatgattaaaatgtttgtgttttatatatattgtgttttttggagttttttttgtgttgtttttgtttttttgagattgttggtaggagattaggagtgattaggtgtgattaggtatgatggtatgagtaggtgttaaagattggagtgttgttttattttaagttttttaaagaagatgaaggtaatagttgtttaatgaggatggaattgtatttgtgaatggaagtatttatagttgggttttttgttttttgtatttttttatagatttgaagttgtaatttttatataatatgaattattttaatagtttttatttttattttgtgttttgggggtgtgggggtggtattagagtgaaagtatttggtagtgtatgtaatataaaaaaaaaaaaaaatttttttttttggttggtgtttaatttttataatatgtttttatttttatttttttgtagggggaagatagggttgttttgttgtttaggttgtaatgtagtggtgggattatagttttttgtatttttaaatttttgggattaagtgatttttttattttagttataatgtatttttaaatttggaaatgtgtttttttttttttttatttagtatgtatatttttattttttttttattttttttaatttttatttaagtttgttttttggtaatttgagaagtgagaaatgtttgtgtgggggaaaaagtggaggtatatgttgtgttgtaattttaatggggaaatattgtttaatgataaaattagggattgttttgtgatgttgttttttgtttatgttattttttttttttttgagtttgtttttgttttattgaaggttgtaaggttgttttgtatttagaggttgtgatttgttttaaattaataaagtatgatgattttagtttgaagagttgggaggataattatatggattgagttgttattttttggtttgttgtaaatattaaaagtaggtagtttatttaatttttattttgatttttatggattttttttattgatgagttagaaatttttttaaatttatgtttttttttttttagttagtaaggatttattgagtatttattattaatatatgttaggtatttttttaagtatggggagtatggtagtgaggagtttaagtttttgtgttattaattttgtaatagtattgaattgttatttagggtattgtagaggttatgtgaggatagggtggggttgtttgtaggattttagttaattttgggtttaaattatttgtgatttgttttaagttttattgagttaagtatagtattagataataatgaaaatatttttaggtgggaggatgattttttttttttgttttttaatttttgttttatattaggaggagtttttgagaaatgtgagtttttttgtttatttttatgatatattgtttaattataaattttggtttggattttatttgtttatgatattgtgtggtgtatgaatatatttttattttaaagaaaaaaaaaaatagttaaaggatattttaaaaattatttttatatatgattattatatagtattataatgtattatgtgtaaaattttatttaaaaaattatttataaaagtataatatagtatgtgttgagggttttagtttaataaaagttaaggttaaaaaaggtataaggtataaagttaattaaatgagatgattatgtatttttatatagtataataatatgtttttgtaattatttgtgttatgtggatataagatttttatagtttgtgtatttgtaaattggttttatttaatataagtttaattttattgtaggttttgataatgtagattgatttttttgtgtatttttaaatttttttttattatatagtattttatttaatttaataaaagttatattatatattatttggtttttggttttaataatttgatgttgttaagttttaatttgtatggaaaagggagaaaagtgttttttttgatttttattttttttaaggggtttttaaaattgtttttataagtaaattat

SEQ ID NO: 2484 - DNA, 2483 bp, Artificial Sequence
  chemically treated genomic DNA (Homo sapiens)
gaaggaatggtatggggtggaaaagtttttttttttttttagggttgggttttttttttgttgttttttgtttttttttgtaggtttgtttttttttttttatattgttgttgtttatatattatttggttagagttatttggtttttttttttttttttagataggttattgttttttgatataggtgttttaattatttgtgtgttttgttatggatttgagtttgttatttttatggtaaaagttgatgtgtagatttaagggattatgtagaatttttgtattattagtgttagaaaatagtttagatttatagaaatggattggtaagttaaatatttttttgtagaagttattgatagttttgttttttttattttgtatatatatagttatttattggtatatgttggggattggttagggtatatatatatatttaaatttgtatattttgagttttatagttagttttgttgtgttatatgaaaaatttgtgttatatgaaaatttgattttttatatataagtgggttttatattttttgaatgttgtatttttaatttttgtttggttgaaaaaaaatttgtatgtaagtgtaattgtgtagtttaaagttgtgttatttaagggttaatggatatatatatattttttttttaattgaagaaaagtttatttttagtggttagtttttattttgtgatgtgatattattttagtattgtttgttatttttttgaatattattaaattgatttaaaatatttttttaatttgtttaattaagaagttggaatttaaaaaattttattaggagtgttttgtgtgttttttgtaatatttagtttgttatgaagttaattagttgtgttatagttgaatgttagtaaaagaatgttaagttgtaaaaggagattagaagtatattttgtgatttattttttggtaggtggtattgtttgtttgaaattatatattagtgttattatatatagttaagagggtttttagaatggattattttattgttttttttttatttaagaattttattttttgatatagatggatgtagggatgggagttggggtagtttgggagatggaatttggtggtttaggtgttgaagggttgagatagatttaggatggttaatgataggaaatttatttggttgtttaaatatggtgttaggtaattagtagttatttaggtaattgatggggttggggaagtttagtaagaggtgatagtgggttttgatgataggattgatttgtttttggaggtaggttatggaagtaggtattatttagagatgtaggtaggtggttggttttggggatgtttgttagttgtagggatgggatgttaggttttgggaagagtaagagtaagatagtattttaggattagggtaattggagtttgtggatgttgttaagaaggaggtgggtattggggaaagagatgtaggagtgagtaggtggtttaggatgttaggtttggtaggattttaagagtaagtagattttggggtagttgaagggttaagaattgtggtgttgtgaagtggtttttaggattttttaggttttttttttaggaaggtttattaaagggttttaggtgtgaaaatagtggattatggaagtgggaataggatgggatatttttaagttgggagtttttggttagaagttattggattggaaattatggagggttttttttggaagggattgttattttatagtttgtgtgtgtgtttggggtgtgtgtgtaagtgagagtgtgtgtataggtatgtgagtatatataggttaatgtgtagggttgtgagtgtgtagagttgtaagtgtgtttatatgtgagtgtgtatggagttgtgagtatgtgttggtgtgtgagtgtgtgtaggtatgtgattgtatatatatatgtgaaatattggttgggaagttttttttaagtggttagaagatggaatgttgttattttagtaataattttgtgtgtgaggtttaagtgtgggttgtgtttataaggtagggattggagtattatttttatttttttagaaggtgtttgtttatgtttaatttttatttattagatgggtagattgataagtgagttttgatataataattttttttgttttgaatagagagtgttagaaaaggaagttagaagaggttttaggttgtttttattttgttggggtttttgtttgggtttttgtaatattaggagagtgagggtttttattttttagaaaatgtggtttggattggggagagaaatagggttatgattgttggagagatagggttgaagtaaagttagaattttgagtgattttagatttaagattgttttttttgtggttttgtaagtagtgaaggttgtagagaagattatagttatttattttttttttgtttggattttttttgttggggtttatgtagtag

SEQ ID NO: 2485 - DNA, 2483 bp, Artificial Sequence
  chemically treated genomic DNA (Homo sapiens)
ttgttgtatgggttttagtaggagaaatttgaatagaaggagagtgagtggttgtggttttttttgtggtttttattgtttgtaaggttatagaagggataattttgagtttgaggttatttaaagttttgattttgttttagttttgtttttttgatggttatgattttatttttttttttagtttaggttatattttttgaagaatggagatttttatttttttagtgttatagaagtttaggtagaggttttagtagggtaaaagtaatttgaagttttttttggtttttttttttggtgttttttgtttagggtgaggggagttattgtgttaaagtttatttattagtttgtttatttgataggtggaaattaaatataggtgggtattttttgagaaaatgaaagtggtattttaatttttgttttataaatatagtttatgtttagattttgtatataaggttattgttagggtagtagtattttattttttggttatttaagagggattttttagttagtattttatatgtatatgtataattatatatttgtatatatttatatattagtatatgtttataattttgtatatatttatatatggatatatttataattttatatatttataattttgtatattggtttgtgtatatttatatgtttgtatatatatttttatttgtatatatattttgggtatatatatagattgtggaataataattttttttaagaaaaattttttatagtttttaatttaataatttttaattagggatttttaatttgaaaatattttgttttgtttttatttttatggtttgttgtttttatatttaggattttttggtaggtttttttgagagagaaatttaagaagttttgagaattattttatagtattatagtttttgattttttagttgttttggggtttgtttgtttttggaattttgttggatttggtattttggattatttatttgtttttgtatttttttttttagtgtttattttttttttgataatatttatgggttttagttgttttggttttggaatgttgttttgtttttgttttttttaaggtttggtgttttatttttgtagttgatagatgtttttaaggttagttatttgtttgtgtttttgaatagtgtttgtttttatggtttgtttttgagggtaagttagttttgttattaggatttgttgttattttttgttggatttttttagttttattggttgtttgggtgattgttagttgtttagtattgtatttaaatagttagatgggttttttgttattggttattttgggtttattttgattttttaatatttggattgttaggttttattttttaggttattttggtttttatttttgtatttatttgtgttaggagataaaatttttagataaaaaaaaaatagtaagataatttattttaagaatttttttggttatgtgtaataatattgatgtataattttaaataagtaatgttatttattaagaaatgggttataaaatgtgtttttgatttttttttatagtttggtatttttttgttggtatttgattataatatagttaattggttttatgataaattagatgttataaaaggtatatgaggtatttttaataaaattttttaaattttaattttttagttaagtaaattaagaaaatattttaaattaatttaatgatgtttaaagaagtagtaagtaatattaaaatgatattatattataaaatagaaattagttattaaaaataaatttttttttaattaggagaaaagtatatatatatttattgatttttgaataatatagttttgaattatatagttatatttatatgtagatttttttttaattaaataaggattgaaaatatagtatttgagggatatgaaatttatttatatatggagggttaagtttttatataatatagattttttgtataatatagtagggttgattgtgggatttaaggtgtgtagatttgggtatatgtgtgtgttttggttaatttttaatatatattaatgggtgattatatatgtataaaatagaaaaaataaagttattaatagtttttataagaagatgtttggtttattgatttatttttgtaaatttgagttattttttgatgttgatggtgtaaaggttttatataattttttagatttatatattaatttttattatgaaaatggtaagtttgggtttatggtaaggtatataggtgattgggatatttgtattaaaagatagtggtttatttggaaagaaggaagaaagttaggtgattttggttaggtgatatatagatagtagtagtgtggaggagagaggataaatttgtaggggagagtaggggatagtagggagagggtttagttttgaaggaggaggagggtttttttattttatgttattttttt

SEQ ID NO: 2486 - DNA, 2493 bp, Artificial Sequence
  chemically treated genomic DNA (Homo sapiens)
gtggttttatttttttagttttggttttgtggttattgtgtagttttagtggagggggtagtttttttgtgttgtgtgtgttttgtttgttttttttgttggattgatgtgagttaaaatattggttatatgtttagtggtaataaattgggtatgagtgtaaatatatttgggttttgatggtttttttagttgttatatggtaggttttgtggggagggggtttttattttgttttggttttttgtttttaaatgtgtgggtagatttttttttttttgtgtttttttgagtaggagatttgggattttaggttttttttgatttttgttttttttttgtttttagtagtgttttggattttgtagtttttggtgagtttggattgttggttaataaggttgttatttataaattgtttggttgttaagatgttataaaattaaagggttagatgtggtatgttatttatgtgtgaaattgtgtttatattagatatgtggatttaaggttgatagtatgattttgtgggaggttatagattttttgttttggttttaggttttttttttagtatgattttttttttaggttgaggggtgttggttttgttgggaaagggatttatttttgtagtttaggaggaaagtgattttagtgtgtttgtgttaaaatgttatttgtttaggattaaaggtagtttttggggtttatttttgtagttttttttttttttttgtttttggtttttttttattatgggtttttgggaggttgttttattttttaggtagttgatatgttttatgggatttagatttgatatagtaagggtagtgtgttagagatgtttaattttgtgggtgggtgggatttgagggtggggttttttgagttttgagggaaggattttgggaagtggagtagtttatttggttgagggagtatttgaaattatttttgttttgggtggtggttgattttagtgttgtatgttatttgttttatttaatttgaggggtagttggagtattgggagaggtagttttggttttggaatatggaatttggtggttttgggtgttgtaggaaagggaagtaaatattttgttttaatagaaaataattgttttgttttttttttttagaaggtggttttaggattgtatgtttttaaattggttattttgtattttatttatatgaatttattaatagttattgtttttttattgttattattttattattttttgaagtgaattaaattttttttgtggttaataagtattgagttaggttttttatttttttttttatttttaaaatatttggggttttttgaatggtattttttgtttggttaaggaaaataagagatgaaaaatgttgttttattgtagggaaaaatataagtattttattttattattattagttattttaggtttgtgtttattagataattgtttttaggtggttgttaagggtggaaaaatgatgttgttgaaagagggtgggagagaaggggagaattaatatgagttgggggtggggaggagagatttatttgataggggtaaaaagagttataaaatgaatttttgaatttgaagtgttgagtaggaatagtgattttttgggtttgtttttttgggttttagatgagtttttagaaagttttagttaattgtagaaaaatttgggattagttttagggttataggagtggttgattttgggaaattatattgttttttattttttttttttggatttttatatttttatttatggttaaaaattaaattatagggtttatttttgggtttatattatttttaagtggaagtgttgagattatagattaattgtttttttgggtgaaaatattgttttatgattaaaattagataaggggatttgaaggtaggtttttatatttgtagtttttgtgggaatgggtgtttttgttttataagtgttttgtgaagaagtttatgttttttttttgtatgtattatagatatgtgttaggtagaggattgagatgtagataaggagtttagaaagttagtgtttggtgtttttagggtggaaaattgagagatatgaagtaaagagtatattaaggtaggttttatattattttttagttaggaaaatttattttaaattagtaaatgtagtagggtatttattagttaattgataataaaaatttatgataaagaagatgtagtggggagtaagtataaatgaaatatgattgtttagatataatttttgttttttttttttggttttatttagtaatttggtgttaaattttatatattatattttttaattttaatagattgtatgttgtttttagttttattattttttatgttatttttattttagaaatatttttgttttatttatggatttaaaatttattgattttttatattggaaaaatttttttttatgaagttttttgtagat

SEQ ID NO: 2487 - DNA, 2493 bp, Artificial Sequence
  chemically treated genomic DNA (Homo sapiens)
gtttgtggggagttttgtggaggaaggtttttttagtgtgaaaagttagtgaattttgagtttatgagtaggataggaatgtttttgaagtaagaatagtataaaagatggtggaattaagaatagtatgtaatttgttgaggttggaggatgtagtgtatgaagtttagtattggattgttgaataaggttaaagagaagaaataggagttgtatttaagtagttgtattttatttatgtttgttttttattgtattttttttgttatggatttttattattagttaattagtagatgttttgttatatttgttggtttaaaatgggtttttttaattagggaatgatgtaaagtttgttttgatatattttttgttttgtgttttttagttttttattttgggagtattagatattgattttttaagttttttgtttgtgttttaattttttgtttagtatatatttgtggtatatgtaggaagaaagtatgagtttttttatagggtatttgtgagataaagatatttatttttatgaagattataaatgtgaaggtttgtttttaaatttttttgtttaattttggttatgaagtaatatttttatttaaagaagtaattgatttgtaattttagtgtttttatttggaggtaatgtaaatttaaaaatagattttatagtttggtttttaattataaataaagatgtaaaaatttaagaaaaaagagtgaaaaatagtgtaattttttaagattaattatttttgtagttttgaagttagttttaggtttttttgtagttaattaaagttttttaggagtttatttaaagtttaagagagtaaatttagagagttattgtttttgtttagtattttaggtttagaggtttattttatagttttttttgtttttattaaatgggttttttttttttatttttagtttatgttggtttttttttttttttttatttttttttaatagtattatttttttatttttaatagttatttaaggatagttatttagtgaatatagatttggggtaattggtaatagtaaagtgaaatgtttatgtttttttttgtagtagggtaatattttttattttttattttttttggttagatggaagatgttatttagggaattttaggtgttttgaagatgaaaaggaaggtagggggtttggtttagtgtttattaattatagagagaatttggtttattttaagaaatagtaaaataatggtaatggagagataatgattgttaatgaatttatgtgagtaaagtgtgaggtgattagtttggggatatgtagttttaaggttgttttttgaagaaggaaagtaaaatgattgttttttattagaatagagtatttattttttttttttgtagtatttagggttattggattttatattttgaggttagggttgttttttttagtgttttggttgttttttaagttaaataaggtaggtgatatgtgatattggagttgattattgtttgaggtaagaataattttaggtgtttttttagttaggtgaattgttttgttttttaaaattttttttttagggtttaggagattttatttttaaattttgtttatttatagagttgggtatttttagtatattatttttgttgtgttagatttaggttttatgaaatgtattaattgtttggaaaataaaatagttttttaggggtttgtaataaaaggaagttaagagtaggggaaagaggaaagttatggaaataaattttagagattgtttttaattttggataggtggtattttggtataagtgtattgaaattattttttttttgggttgtaggggtgaattttttttttggtaagattgatattttttaatttggagaggagattgtgttgggggaggagtttggagttggggtgagaggtttgtgattttttgtgaagttgtgttattggttttggatttgtgtatttagtgtaaatgtggttttatatataaataatgtgttatatttggttttttggttttatggtgttttagtgattgagtaatttatagatggtgattttgttaattagtagtttgggtttgttaggagttgtggagtttaaggtattgttggggatggaggaggggtgagggttaggagaaatttggggttttagattttttgtttagaggggtgtaggagggagggaatttatttgtgtgtttgggggtagggggttgaggtggggtggaagttttttttttgtaaagtttattatgtggtagttgaaagagttattgaagtttaagtgtgtttgtgtttatatttaatttattattgttgaatatatggttaatattttgatttatgttagtttggtaaggaaaataaatagagtgtgtgtggtgtgggggagttgttttttttgttggggttgtgtggtggttgtggggttggagttaggagggtggggttgt

SEQ ID NO: 2488 - DNA, 2443 bp, Artificial Sequence
  chemically treated genomic DNA (Homo sapiens)
gaaataaaaataaaaaattaaaaaaaaaaaaaaagaaaagaaaagaaatgaaagatggaatttttaagagttttgggttattaaaatgaaataaatatatgtttatgttattattatgtaaaggtatttaagtttttgaaatatattttatttatttattttttaagagtttgagttgaatttatttagaaaattttatgttttgttaatagattaggtttatgatgatgatttttaaatttagtaatttatatattttttattgttattgttttatgtatgggtggttattgtattatttttattttgtagatgagggagtggaggtgttaggttgttaatgagttggttagggattgttggaagtaagtgttaggagtgagattggaatattgtatatttttatttggttgttttttttttgtagaatgtgtagattgaaataaaatgagtttgataggggttttatttagttttggattattgtttttttttgtagagttagttttgatgagggttatttttataggaaagaaattagtagaggaattagttttggatttttaagaagttaaggtgtattataataattttgtttttaaaatttttgggataggttaagtagtttatttattaaatgtatatagaatgattgttatttgtttagtagatgagatgtttgggaggttaagagaggaaattgaagtttatgtggaggtttgtggtttatagtagttttagttattaggttttttttttttttttgaaagttgtagagatgtgtatgtttgtagtttgttgagaaatttggttttgggttagttaatttgaattttatttatatatatttttttaaggtgtgagttgagaaggggtttttagatgtagatgtttaggaataaattttaggtagttggtgggatttgttttttggttattgtttatgttttttttgttttttttatttttgtatttattttgttttagatatttggttttgtgtagttttttttatgttagataggaggtaatatttattggaagttgttggtgttgtagtgtgttggtttgggttgagatggtgtgaaaattttgtttgttttgttgttttttaatttttttaggtagtgatagttttttggtttgttttattggtaatgtttgttgtggggttttattaatttattatatttttaatgtgtagttgttgtaggtagtgtgattttttggtgttttgttgggttgttatatttggaattgatttgggatttaaaaaggttgtggattgaggaaattttaaagtgttgtttttttttatttttggttatttatttttgagttgaggtagtgggatttggttaagttgagttaaagtgaaattgttgaaattaagaaagatagtagttaatgtgatggtagtgggtggtgagaattttttttttttttttagttttgtggattgttagtttggatgtttgagtggggttttgttaattttgtttgttgtttttgttgttaggtttggtatttgttttttatttttatatgattgtttgttttgagtttagtgagtgttgtttgtatttttggttgttgtagatagtagtttgattttttaagttggatattgttttgatttttttttggtttatagattatattataattttttttttttttataagtgtaagtatttttttgtagtatttaaaggtttttgatgtagtggaggtttttaagatttttttttttttaagttggtgtattgttttttttttattttgtttttatgttttaaatttaattgtatggatattattaattgtatgttaaatggtgatgttagaaatgattttttgtaatgatttagaaaaagttttattttttataaaggtttttttttttttttttatgatttagttttatatatgattattgtttgtaataaagattaagttttgtaatttattatgtttttttttgatttttttgtttttatggtattgttttttgttttatgtttgagtattttttttttttttttagtttttattttttggtgggttgtgttaatagtgtagtaagaggaatttttggaaggaggttaaatttggttttggattatttttttttaatatatattggtttttgaaaattagattttgtttgttatttggtttgtttttttagtgttgtgttattttgatggtaatgttgatggattttaagtttgttttgtagagtaatgtataaggtttttataagtatattaattttaaaagaaaaattgttagatgtaaataatatttatatgattgatgttgtaaagatataaattaatttttaatatttatttttaaggaatattattttataggggtttgatgttgtttttaatttttttttaatataggtatttgtgttgtaggattttgtggtatgt

SEQ ID NO: 2489 - DNA, 2443 bp, Artificial Sequence
  chemically treated genomic DNA (Homo sapiens)
atgtgttataaaattttgtaatataagtatttatgttggaagagagttaaaggtaatattaggtttttgtaagataatattttttgggaatggatgttaagagttagtttgtgtttttataatattagttatatgggtattgtttgtatttgatagttttttttttaagattaatgtgtttatgaaaattttgtgtgttattttatgaggtaagtttgaaatttattagtattattattggaatgatataatgttgggagagtaaattaaatgataaatagaatttggtttttagaggttagtgtgtgttgaagagaaatgatttgaagttaaatttggtttttttttagaaattttttttgttatattgttggtatagtttattaaagggtgggggttgagggaggagggagggtatttggatatggagtgggagatagtattatggggataggggagttggaagggagtatgatggattgtaaaatttgatttttattgtaaataatagttatatgtaaaattaagttatggagaaagaaaaaaaaatttttgtgaaaaatgggattttttttggattattatggaaagttgtttttaatattattatttgatatgtagttggtgatgtttatgtaattggatttgaggtgtaagagtggaatggggaggggatggtgtattagtttaaggggaggaaaattttgaggatttttattgtgttaggaatttttagatattgtaaagggatgtttgtgtttatgagaagagggagaattgtggtgtggtttgtaggttaaggggaaattaaagtaatgtttagtttgagaaattaggttgttgtttgtggtagttagagatgtagatagtatttattgggtttagggtaaataattatatagagatggaaaatggatgttaggtttggtagtaagagtagtaggtagggttagtgaggttttatttaggtgtttggattgatagtttatgaaattgagagggaggaggggatttttattatttattgttgttatgttggttattattttttttgattttagtagttttattttggtttaatttggttagattttattattttagtttagaaataggtggttagaaatagaagggaataatgttttagagtttttttgatttatagtttttttgagttttaaattaattttaaatgtggtagtttagtgaagtgttaagagattgtattgtttgtagtaattgtatattggagatatgatgaattggtggaattttatggtaggtgttgttagtggagtaggttaagaggttgttattgtttgggagagttaggaaatagtgggatgggtagggtttttatattattttagtttaggttagtatgttgtggtattaatagtttttaatgggtgttgttttttgtttggtatgggagaagttgtataaaattaagtgtttgaaatagagtagatgtaagagtggggaagatggaagaggtatgagtagtaattagagagtaaattttattagttgtttgggatttgtttttagatatttatatttgggggtttttttttagtttatattttagaaaagtgtgtgtgagtggagtttagattggttggtttgagattagattttttaataggttgtaggtatgtatatttttgtagtttttaaggaagggagggaggtttggtggttgaggttattgtgagttataagtttttatatgggttttagtttttttttttgattttttaggtgttttatttgttggatagatgatggttattttgtgtgtatttggtgggtgggttatttagtttgttttaggggttttgaaagtagaattattataatatattttggttttttgagaatttagagttgatttttttgttgattttttttttatggaggtggtttttattaaagttagttttgtagggagaagtaatggtttggaattgggtgaaatttttgttaggtttattttattttaatttatatgttttgtgggagagaggtagttaggtgggggtatatagtgttttagttttatttttgatatttatttttagtagtttttgattagtttattaataatttggtatttttatttttttatttgtaaaatgggagtaatatagtgattatttatgtataaggtagtggtagtgaggaatgtataggttattgggtttaaaaattattattataaatttagtttattgatagaatatggggttttttaagtgaatttagtttaaatttttgaaaagtaaataaatggagtatattttaaaggtttgagtgtttttgtatgatggtgatatggatatatatttattttattttggtgatttaaagtttttaagaattttattttttatttttttttttttttttttttttttttttggttttttgtttttgtttt

SEQ ID NO: 2490 - DNA, 2469 bp, Artificial Sequence
  chemically treated genomic DNA (Homo sapiens)
taaattttgtttgttatttgttttgtaaataaagttttattggaatatatgtatgtttatttgtttatgtattgtttttatgttgtagtggtagagttgagtagttttaatatagattgtatggtttttaaagtttaaaatatttattattttgttttttataaaaaagtttgttgatttttgttttaagaagtttttaaatagatttatatttaaaatgtagtaatggttaaatttatagtaatgattttttttgttaggaagatggaaggtttttttattgtaaaatatttgtagattttaatatttttttttgttatgttttgtttaatagatagataggtatggagaaggtattatgtggtagtaagggaggtgggtgttaagggtgtattataatattgggaagtatattttttaatattaggagtttatgtgatttagttgaagagagaatatttgtattagttaaaagggaatatttagtagtatttaaataaaagttattttatatgttattaagtatattataagaatttttagaaagaagtattattttttgtttaatagtttagaggatttttattagtaaatgaaaaatgatagttttattttattttttaaatatgttaaaattattttgagttgttgggtattagaattgataggtgttatgtatttaagtttatttgaaaaatatattttaataatggagtgagattttgttttaaaaaaattttaaatgtttttttttaattgaaaaaatttattatttttagatagataagtaaataatttttgtaaatttgagttatatttttttttttttttttaaaatttagtttaatataattgaaaattgaagtttgattttttaagtttataagggataaaagagagataggatagatagaaataattggtaatgaggagttattgggttttggttttatgggagataatagtggttttatagaaggtaatggtggatttttagttaattgaagtttgggtggaatttagttgtataattaagaagttgaatttgttttattttatttttttataatataaagagtgtgaaaaggttattttaatgtttagagagtggttttttttggaaaatatttttgaatatattatggagtagtgttaattgtagtataaaatgttttagaaattttgtaatttatgagtttaatggtatatttgaggattatgaggttttttttgtttatttataatagtttggtgattgatttagtagagaggaagtaaaatgaataattttgattattttttaatattttttttgttttgttgattttagagttttaggggtatagtatttgtaggaattgtatgtttttttggtaatattttaaaattaaatttaaaagatgaagaagaaaaatggttattagatagttataaatatgttattatttgtaaatggtattgttttgtggatatgaagttttttattgtttatttgtttttaagtttaatgatttatatataaaggtgtaaggatttattgatattgtgttttttttttgttgatattattagtttgagaattaaggataatggatagttgtatataagtttaagttttgtatttattttttagtttttttttttattttttagttgtgtttgttttttttttgaaatttgtaaagtaggaataataataaagttattattttttgtagggttttgaaggatttttttgagataatgtaaagtattaggtatataattagtttaaatgtaatttaattgtgtttttttattttaatatatatgttattatttatttttagtgtagagaattaatagaatataaataattttgaagatttatataatatttatatgttgtaaaattttgtttgtggagtttttattgtagtttgtatgatttaaatgatgttatgtagttttttaaatatttttagatattaaggaattttatattgttgtgttattttttaaatgtttgtatttttttgttttttttttttttaatttttttgaatttgtttatttagtgaataaaattaggaagaagtggatgttgtaagaatatttatgtgtttaaaggttgtggttgttttattatagttatttattagtagttttagtatgtagttagagattgtagaaaaaagaattatttttttttttgatttgaggatgtatttttagagtgtttttggggtaatggatttaaaattaaaattttaaatgttagtttttaagtgtgaatttttttttagtatttttgttttttttttataattttttattttattgagttttagagagtagatagtttaggttttttgatttggtagattaatgaggaaggataattaaagaaagtttaaaggtattttttatattaaaatattttattttttttttattgtaggtgtagttaaaagtattaatgttatattt

SEQ ID NO: 2491 - DNA, 2469 bp, Artificial Sequence
  chemically treated genomic DNA (Homo sapiens)
gggtatggtattagtgtttttaattatatttgtaatgaaagagaagtgaggtattttggtataaaagatatttttaaattttttttagttatttttttttattgatttgttaaattaagaaatttaagttgtttgttttttggaatttaatgaaataaaaggttataaggagagaataaaagtgttgaagaaaaatttatatttaaaaattagtatttaaaattttgattttagatttattattttagaaatattttggagatgtatttttaaattagagaaaagaatgatttttttttttatagtttttgattgtgtgttgaagttgttggtaagtaattataatggggtaattataatttttaaatatataaatatttttatagtatttatttttttttaattttatttattggataaataaatttagagagattgagagagagagagatagaaaaatgtagatatttaaaaagtgatataatagtgtaaaattttttaatatttggaaatgtttaaaggattatgtggtattgtttgaattatataggttataatgagggttttataaataagattttgtaatgtgtgaatattatatgaatttttaaaattatttgtattttgttgattttttgtattagagatgggtagtgatatgtatattaaaataaaaaaatatggttgagttatatttaggttaattatatgtttggtattttatattattttaagaaaattttttaaaattttataaagaatagtaattttattattatttttattttatagattttaaaaaaaaaataaatataattgaaggatggaaagggaaattaagaagtagatgtagaatttgaatttatatatagttatttattgtttttagtttttgggttaatggtgttaatagagaggaagtataatgttaataagtttttatatttttatatgtggattgttgaatttaaaaatagatgagtaatgaagagttttatatttataaagtaatattatttgtaaataatgatatatttataattatttaataattattttttttttttattttttgagtttgattttaaagtattgttaaaaagatatataatttttgtaaatgttgtatttttaaagttttgaagttagtaagataggaaaaatgttaaaaggtgattaagattgtttattttgttttttttttgttaaattagttattgggttattatgagtggatggaaaaaattttgtaatttttaggtgtgttattaaatttataaattgtaagatttttaggatattttatattatagttgatattgttttatggtatgtttggggatattttttaagagaagttattttttgaatattaaaatgatttttttatattttttatgttatagaaaaataaaataaaatagatttagttttttaattatgtagttaagttttatttaagttttagttgattaagagtttattattgttttttatgaaattattattgttttttatggagttaaagtttagtaattttttgttgttagttatttttatttattttgttttttttttattttttataggtttggagagttagattttagtttttaattatattaagttgaattttaaaagaaaggggaaaagtgtggtttgagtttgtaaaggttatttatttatttatttagaaataataggtttttttaattgagaaaagatatttgaaatttttttgagatagagttttattttattattgaaatgtattttttaaatgggtttaaatatatgatatttattagttttggtatttaataatttaagataattttgatatatttggaggataaaatgaggttgttattttttatttattaatagaaattttttgaattattagataaaggatgatatttttttttggaaatttttatagtatatttagtgatatgtgaaatagtttttgtttaaatgttgttaaatatttttttttaattaatataggtgttttttttttagttaaattatataaatttttaatgttaaggaatatgttttttagtgttgtgatatatttttagtatttattttttttattgttatatggtgttttttttatgtttatttgtttgttaaataaggtatggtagagagaagtattaaaatttgtaaatgttttatagtaagaaaattttttatttttttggtaaaagaaattattattataaatttggttattgttgtattttagatataaatttatttgaaagttttttagagtaggagttagtaaatttttttgtaaagagtaaaatagtaaatattttaggttttggaagttatatagtttatgttagaattatttaattttgttattgtaatatgaaaatagtatataaataaatgagtatgtatatattttaataaaattttatttataaaataagtggtaggtaagatttg

SEQ ID NO: 2492 - DNA, 2442 bp, Artificial Sequence
  chemically treated genomic DNA (Homo sapiens)
agtttaataattatattttggttataggttaaaatagtgtttataaatagttttataaaataagaagaatttttttgtattttttaaagtattaaatttgtgattttttttttttttttttttttttgagatagggtgttattttattatttagtatggagtttagtggtgtaattatggtttattgtagttttgattttttaggtttaggagatttttttattttagtttttgggtagttgggattataggtgagtattaatgtgtttagtaattttttttttgtatttttgtagagataagtttttgttatgttgtttaggtttgttttaaatttgtgggttaaggtgatttttttgttttggatttttaaagtattgagattatagaggatagttattgagtttggttttatatttgttttaattttattttagaaattttattgtttaaagtagatgttaaaattttttagtagaagtaatggttgtgataaagttttagagtagagagttattaagtttgaaaaataatagtaggttatatgaatttttgaagaaattagttgtttattttttttaaggagagaagtagttaagaagttgaaaaaatatgaaagttatattgtttattttattgtaatttttaaatttttttttgggtataagtttttttagaggataattggaaaggttatatatttagtgtatgtaaagaattttggtttgttttttattgtattaggaatgaaagaaagatattattggttagtgtgtagggttttttggggagaagttgagttgaagtgatttagtatgttttatgttgtttgattaatgttaagtgagggggttattgagtgaaagtttatagtaatgttattttttgtaattgaaaatgttatgtaaaaaataaaatatgttaatagtttttgttgtttgttttatattttggagagttgtgtatattttaagttatttttgtaatttaaaagaattgtaattatagagattgtgaggggagtagttggtttgtaaagttgtttggggtaaatttgttagagtttatgagtaaatataatttgaaaatagaggttgtttgtggggaaattagttgtttttttaataaaataaaaggaagagttttgtttagggtaatgtgatgatgatgtgtaattgttttgtattaattataatttttttttttgtttttttattgtttagtttttttttattttatagtaagaaattgaggttgtatattgtatattgggaatatttaaattggaaataattaaaatatatattttatttatagtgggttttatgtgaggagaagtaaagattgttatagttttttgagtatatgagttaatgatgtgttttgtatttttttgattttttatattttaattgtttttgttttttatttgggggtagggaattttgagaggtatggaatatagatttgtatgagtagaaatgtatagtttttgagtatgtgaggggatggtgtggagaaggttgggtttattatgtggttttttggtattatttttttttagtttttttttttagtgttaaagtaagtatgttattaagaatgttttaaattagaaattggtttaagattattgtagtattttattaggttgtgtttttagaatatgatgaataaatggatttttaaaatgaagttttaaaaatgatagttaaaaaaggaatatagatttattgaaggaaaaaatttataaaagattttgtgtgtgtgtgtgtgtgtgtgtgtgtatgtgtgtgtgtgtatgtatgtgtgggtgtgtgtgtgtgttgtaagtatatttaatatatatttatattgaatgaagttattggtaaagtaaagtaaaatttttgttttttagatttaattaggatattattttgatggaggttaagttagtaaaaatatagttagaaattgggtataaagggtaaattgattgtaaattttggagattgtttgtatgattgggttgtatgattgaagtttaaaaagtaaaaagtgttttatatagaattgtgagtgtgtttttggttatggttagttataaagggaagaaatatgaaagttatttttaaaatgtttggagatagaaattttgtgggggtaaatttaaggggttagaatgtatttttatttattgtgtgagtttttaaattgtgaagaaatattatttttagaatgagtttaaagttgatttaaagtgataattaaaggtaatgaattgagaaataaaagtgtgaaagatatgaaatattttatttgtttaatttttataaaaatttaatgaaaaaatgaaaaagtgttttttttaatagtaatttatagtttttggtttagagttgggatatgtggaaggaatatagatatgtttttttaaattgtttggtatttttggattag

SEQ ID NO: 2493 - DNA, 2442 bp, Artificial Sequence
  chemically treated genomic DNA (Homo sapiens)
ttagtttaaggatgttaagtaatttgggagagtatgtttgtattttttttatatgttttagttttgagttagaggttgtgaattgttattgaggaagatatttttttatttttttattgagtttttatggggattaaatggataaaatgttttatgttttttatatttttattttttaatttattgtttttagttattattttgagttaattttgaatttattttagaaataatatttttttataatttgaaaatttatataataaataagaatgtattttgattttttggatttatttttatagagtttttatttttaaatattttgagaatgatttttatattttttttttttatagttagttatgattaaaagtatatttgtaattttatgtaagatattttttattttttaagttttagttatgtaatttagttatataaataatttttaagatttataattaatttgttttttgtatttagtttttagttgtgtttttgttaatttagtttttattaaaatgatgttttaattaagtttgaagaatgggaattttgttttattttattaatgattttatttagtatggatatatattgaatgtatttataatatatatatatatttatatatgtatatatatatatatatatatatatatatatatatatatatatagagttttttgtaggtttttttttttaatgagtttgtattttttttttaattgttatttttggaattttattttgaagatttatttgtttattatattttaaaaatataatttaataggatattgtaatggttttaaattaatttttggtttgaaatatttttgataatatgtttgttttgatattgaagggagaaattggagaaaaatagtgttaagaaattatatgatgaatttaattttttttatgttatttttttatatgtttaaaagttgtatgtttttgtttatgtaagtttgtattttatgttttttaaagttttttatttttaaatgaggaatagaggtagttaaaatgtggaaaattaagaaaatgtagaatatattattaatttatatatttaggaagttgtggtaatttttatttttttttatataagatttattataaatgaaatatatattttaattatttttagtttagatatttttagtgtgtaatatataattttaattttttgttgtagaataaaggggaattgggtaatgagaaagtaaaaaaaaaagttgtagttaatgtagaatagttgtatgttattgttatattgttttgagtaaaatttttttttttattttgttgaaaaagtaattgatttttttatgagtagtttttgtttttagattgtgtttatttatgagttttgataggtttattttaagtaattttgtaaattagttgttttttttataatttttgtggttataatttttttaagttgtagggataatttaaaatgtatatagttttttaggatatgaggtaggtagtaggaattgttgatatattttattttttgtatagtatttttaattatagaaaatggtattgttatgaatttttatttagtggtttttttgtttgatattaattaggtaatataaagtatgttaagttattttagtttagtttttttttagaaaattttgtatattggttgataatgttttttttttatttttgatgtaatgaaaaataagttagagttttttatatgtattgagtatatggtttttttagttattttttgagagggtttatatttagaagggaatttggaaattgtaatggagtgggtaatatagtttttatatttttttagttttttggttatttttttttttgaaaaaaataaatggttaatttttttaaaagtttatataatttgttattgttttttaagtttagtgattttttattttaaaattttattataattattgtttttgttgaagagttttgatatttgttttaggtagtagagtttttgaaatgagattaagataggtgtagggttaggtttagtggttgttttttgtaattttaatgttttgggagtttgaagtaggaggattattttagtttataagtttgagataagtttgggtaatatgatgagaatttgtttttataaaaatataaaaaaaaaattgttggatatgttgatgtttgtttataattttaattatttgggggttgaggtgggaggattttttgagtttgggaggttaaggttatagtgagttatgattgtgttattggattttatattggatgatagagtgatattttgttttaaaaaaagaaaaaagaaaaaaaagttataggtttagtattttgaagaatataggaaggttttttttattttataaaattgtttataagtattgttttggtttgtagttaaaatatgattgttaaatt

SEQ ID NO: 2494 - DNA, 2396 bp, Artificial Sequence
  chemically treated genomic DNA (Homo sapiens)
agtggtttatgtttgtaattttagtattttgggaggttgaggtgggtagattatgaggttaggaaattgagattattttggttaatatggtgaaattttgtttttattaaaaatataaaaaattagttgggtatggtggtgggtgtttgtagttttagatatttgggaggttgaggtaggagagtggtgtgaatttgggaggtggagtttgtagtgaattgagattgtgttattgtattttagtttgggtgatagagggagattttattttaaaataaataaataaataaatttttaaaggagatttttttttttttaataaaaattatgtattggattagttatttttttaaatttttagtttaaaataatgtgggtagttttataaggaaatatatatattggattatatgaaatgaattgttaatatttgttataaatttatgaaaatattaagtttaaatggttttgtttaatatttatgtaatataattagtaaattttaggtattgtgtgatttaggtagagtatatgtgtgtatatgtgtgtgtgtgtgtgtgtatgtatgtatatgtatgtgtgtatatattttgtagagtttagggttttttgttaaatttttgggtttaagtgatttttttgttttagttttttaaagtgttaagattatagttgtgagttattgtatttgatatatgtagaaaatattttattgtagtataaaatatatatttgagaggaaaagaataagagagagaggtttttaatttaaatatagttaattaaggaaaaaataaaattaatatttgaatgaatattgaaatttttttaaaaaaagataaatgagggggaaattatataagtaagtaaggttttatatatatggtgttttagaaattaattagtggatagatttagaatttatatttttttttttaaaatgttttttggtagaagttattttgtaggataaattggaattaaaagagttatgaaaattgtataatgggatgaaggggttttttttgttggggaatagatagttgatatgttggatggggttagggtttaaataaaggtttttgttgagtgggagtaggtataagatagatggtttgttaaatattgttagtatgtttgtgtagtgttgtgtggtggttagagtttggataatggttattagggtattgtgtagtagtgtattggttaattttagtttagttaaagttattgtttatttttgttggttttgtaaagattaaggtagtttttttgttttgaatgtattatagttgtttagtaaagtatttttgaagttttgtttgaatttttattgttaagaggggttaagtaaaaggtggtttgtgtaaggatttgttttaagtttatatgtgaagttgtttttttttaattaatttggattatttttgatttttatttttgggtaaaattttttagagttataggggtttttttttttagtgagtttttttttgtgtggtttgaaatgtatttgttggggatttatattttttagatttatattttttattgggattgatttatttgttatttttgtggaaaaaggtaaatattattgtaaattttatttggtgaattatggggaggtggtggttttaattaaatgtgtttgtttttggaagggggtttttggttttttatttttatgtatagaagaaaatagagtttaattgggtttttgtagttaatggaaatgtatttggtttagttagttgttaggttgagtttttgttgttttgggttttaatttgttttttttggttgtttgtagataaagggagagtagttgtgggttatgtagaggggatagtttttttggttttgtttatagttttaaagtaaagtagggggtgtagttattatttgggtatgttaggaaagggtgatggttgattggtttagtatttttaatagtttaaatgtttttatttttttttaaaggtagtgtatatttatttttatttaattgaattagtgttgtatttattttaggtagttttttttgtttaaattagattatttttagttataaaattaagaaagtgtgtttagtagattaagttttaaaagtggatttgttaattatatttatagaagtaaagagagtaagagaatttttatatatttttttttttttttttttttttttttttttttttttttttttttttttttttttttttttttttttttgtttttttttttttttttttttttttttgttttttttttttttttttttttttttttttttttttttttttttttttttttttgttttttttttttttttttttttttttttttgttttttttttttttttttttttatgtatgtattatatatttttatt

SEQ ID NO: 2495 - DNA, 2396 bp, Artificial Sequence
  chemically treated genomic DNA (Homo sapiens)
ggtaggggtgtgtggtgtatgtatgagagagagagagagagagaaataagagggagagagggagagagagagagaaataagagggagagaaggagagagagagggaaagagagagggagagagggagagaggtagagagagagggagagagggagagaggtagagagagagggagagagggagagagggagagagagagagaaaagagagagagagggagagagggagagtatataaaaatttttttgttttttttgtttttgtagatgtagttaataagtttatttttagggtttaatttgttgggtatatttttttgattttatagttagaaatgatttaatttaggtagagggggttgtttgaagtaaatatagtattggtttaattaggtggggatagatatgtattatttttaaaagaagataaagatatttgaattgttggaaatattaaattgattagttattatttttttttaatatatttagatagtagttgtattttttgttttgttttgggattataggtagagttaaggggattgttttttttgtatgatttgtagttattttttttttgtttgtaaataattgagaggagtgagttggagtttagagtagtagagatttagtttagtagttgattgggttaggtgtgtttttattggttgtagaggtttggttgagttttatttttttttgtatataaagataagaagttaagggtttttttttgaaagtaaatatgtttaattggaattattgtttttttatgatttattggatggaatttataatggtgtttatttttttttataaaagtagtaaatgaattaattttaataggaaatataaatttaggaaatataaatttttagtagatgtattttgaattatataggaaaggatttattgagaaagaaggtttttgtaattttagagggttttgtttagaagtaagagttaagagtggtttagattagttgaggagaagtaattttatatatgagtttaaaataagtttttgtatgagttattttttgtttggttttttttagtagtgggaatttagataaaattttaggaatgttttgttgggtagttgtggtgtatttaaagtagagaaattgttttaatttttgtaaaattaataaagataagtaatagttttagttgggttgaaattagttaatgtgttgttatataatgttttggtgattattatttaggttttgattgttgtatggtattgtgtaagtatgttggtaatgtttaataaattatttgttttgtatttgtttttatttaataggggtttttgtttgaattttggttttatttagtatgttagttatttattttttaataggggaagtttttttattttattgtataatttttataatttttttgattttagtttgttttatagaatgatttttgttagagaatattttggaaagggagatatggattttgaatttgtttattgattagtttttagagtattatgtgtgtgaaattttatttgtttatgtgattttttttttatttgtttttttttaagagaattttaatatttatttaaatgttgattttattttttttttggttagttgtgtttaagttagaaattttttttttttgtttttttttttttagatatatgttttatattgtagtaagatattttttgtatatgttgggtgtagtggtttataattgtaattttagtattttgggaggttgaggtagaaggattgtttgagtttagaagtttgataggagattttggattttataaaatatatatatatgtgtatgtatatatatatatatatatatatatatatatatatatatatattttgtttaaattgtatagtatttggaatttattgattatattatataggtgttagatgaaattatttgaatttaatgtttttatagatttataataaatattgatggtttattttatatggtttaatatatgtatttttttgtaaaattgtttatattattttagattagagatttgagaagataattgatttaatatatggtttttattaaaaaaaagaaagttttttttgagaatttatttatttatttattttgagatggagtttttttttgttgtttaggttggagtgtagtggtgtgattttggtttattgtaagttttgttttttaggtttatgttatttttttgttttggttttttgagtatttgggattataggtgtttgttattatgtttggttaattttttgtatttttagtagagatggggttttattgtgttagttaggatggttttgattttttgattttgtgatttgtttgttttggttttttaaagtgttgggattataggtgtgagttatt

SEQ ID NO: 2496 - DNA, 2417 bp, Artificial Sequence
  chemically treated genomic DNA (Homo sapiens)
tgtttttgggaagtggagttagtatggtagatagaataaagttgtagttgttttagtatttaatagagatgagatttggatatgaataattgtaatataagatgggatgtgatttagtaatgtgagatagagtgttgtgggagtttagggattgtttttgaaagtgaggttgtagtttgtaaaggtttttttttttttttttaaagtaaaatttgtaaaagtagtattgttttttggaaataagtaaaatgttattaattgtatgaaataaaatatgaaagttttttttttttttttatttttatgttttagtgtaatttatggtttgtaataggatttttttagaatgttttttttgagtatatatatagagtattttttttaaaagaaataagatagtagtagtattatgtatttttaaaaattttaatttgttttttaaaaggttatatatttatatagttttgaattgaaaagatataaatgtagagttttttttttgttttttttttttaattgtttagtttttttttttagagatagtgttgttagttttttaagtttttttgtagagattgtttttttttatatatatttttatttatttttttttttttatttttttatataaatagtattatattttatattttgtattttggtttttttatatatgttgtgtattttaaagatgtagtttaggtgttattttaggtatgttttggttttttttttgataagtatgaagttttttatgataatttagtgatatggaggtagatttgtatgatgttttgggtttgtgatttgaggttttaaggattagagggtaaggtagtagtatttggtttttatttttttttggtttaattgagttttgggggtttgtgtattgttttgagtgtttggttgaatttgtatattttgttggattaattttgatattgttttttttttattttttttgatgaaggttgttttattgaattttgtttgttggggaagttttttattgttgagagtagtagttaaaaaagttgttagttatgtggttgggtttttatttttgtagaggtaggttgagttatagtttggtggtgtggatttaggtaggaattggttaatattttgaattttgagttgttatttgttttgtagtttgttgggatgtttagtttagataatatataaagttttttggatatgggataaatttaggtttatggaaagagtaggaaggttaaagtgtgtggtattttgggtaatgatgaaggtgtaattagggagttgatatgtttgttttaaagttaagaattttaggataatttgttatttagttgaagttagtgtagttgttataaaaaagtttggggataaaagtatgttttttatttgtttttttgtttttttgtatatttattttattttttaaagttgtagtaaaggttgttgatattggaaatgtttgatgatttttgttattttttttgtaaatgaataagagtttgggtttaggttaaattatggttttatgtgttgaaagtattagttttttgaaatagttttataaatgttgatattttatttagattaggagggttaggggaaaggtttaagtaagtattaggttttattatgaaagaatgattttaatagattaaatttggtttgatggtattaaatgttttttttttatttttttttttttttttttttaaagtattattggttagagaggaaatagaaatttgggttgttagatttgaagagatttatatagtatgggattggtgttttagaatattgtaggtgtgtgaatgtatgaagagttgtatttaagtgttattgtttagtttgtttgggtattgatggttttaggtttttttttaggagtaagggtgggagatatttttagtgggttaagatattagttagtggttataatttgtaatgtgaaaagtagtttggggtagttttatttaagtttgtttagtggtgaagagagaggagaaggttgtagttttgtattgatgtatttttattattatatttagggatattttgtgatatagatgagtggggttttttttttttttttgtaaaattttggttttatatatagtagagtttttttttttttttttttttatatatatatatatgtgtgtgtgtgtgtgtgtgtgtatgtatatatatatatgtatatgtatatatatagtattttttttttttttttttttttttgagatggagtttttttttgttgtttaggttggagtgtagtggtatgattttagtttattgtaatttttgttttttgggtttaaataatttttttgttttagttttttgagtagttgagattataggtatgtattattatgtttggttaatttttgtgtttttagtgtagatga

SEQ ID NO: 2497 - DNA, 2417 bp, Artificial Sequence
  chemically treated genomic DNA (Homo sapiens)
ttatttgtattaaaaatataaaaattagttaggtgtggtggtgtgtgtttgtaattttagttatttaggaggttgaggtaggagaattgtttgaatttggaaggtggaggttgtagtgagttgagattatgttattgtattttagtttgggtaatagagggaaattttgttttaaaaaagaaagaaaaagaaaagaatattatatatatatatatatatatatatatatatatatatatatatatatatatatatatatatatatatatagagagagagagagagaaaagttttattatgtataaaattaaagttttataaaagaaaaaaaaaaattttatttatttgtgttatagagtgtttttgagtatggtgatagaggtgtgttagtgtaaggttatagtttttttttttttttttattattaagtaagtttaaataaggttgttttagattgttttttatattataagttatgattattgattagtattttgatttattggaaatgttttttatttttgtttttgaaagaagatttgagattattagtgtttaaataagttgggtaatagtatttggatgtaattttttatgtatttatatatttgtaatgttttgggatattagttttatgttatgtgggtttttttagatttgatagtttaagtttttattttttttttgattaataatgttttaaaaaaaaaaaaaaaaaaaggtgggggaagggtatttgatgttattagattaggtttagtttgttgaaattatttttttatgataaaatttagtatttgtttaggttttttttttgatttttttggtttgagtgaaatgttagtatttgtgaagttgttttaggaagttgatatttttagtatatagagttatggtttggtttgagtttagatttttatttatttatgaggagaatagtaaaaattattaaatatttttaatgttagtaatttttattatagttttagaaaatagagtaggtgtgtaagaagatagggaaataagtaaaaagtatgtttttgtttttaggtttttttgtagtaattatattggttttagttggataataaattgttttggaatttttggttttggagtaaatatgttagttttttggttatgtttttgttattgtttaaagtattatatattttaatttttttgttttttttataggtttgggtttgttttgtatttaggaaattttatatgttgtttaaattgagtattttagtaggttatgaggtagatggtagtttaggatttagaatgttgattaatttttatttggatttatattattaagttgtaatttagtttgtttttgtagaaataggagtttagttatgtggttaatagtttttttaattgttgtttttagtaatgaggaatttttttagtagataagatttagtaagatggtttttattgagagaaatgaaaaggaagtaatattaagattgatttaataggatatataggtttaattaaatatttaagataatatgtaagtttttaaagtttaattaagttaggaggagatgaggattaggtgttgttattttgttttttagtttttgggattttaggttataaatttaggatattatgtaggtttgtttttatgttattagattgttataagaggttttatatttgttaggaaggaagttaggatatgtttgaggtggtatttgaattatatttttaaaatgtataatatgtatgaaaaaattaaggtatagagtgtaaagtatgatgttatttgtgtaaaaaaataagagaaggagggtaggtaggagtatgtataggaagaaatagtttttgtaagggaatttaagaaattggtagtattatttttggggaggggagttgagtagttgggaagaaaaggtaggaggaagattttatgtttgtatttttttaatttagaattatgtgaatgtataattttttaaagaataaattaaaatttttaaaaatgtataatgttattattattttattttttttaaaaaaaatgttttatgtgtgtgtttagagaaaatattttggaagaattttattgtgaattatgggttatattgggatgtgggagtaggggaaggaaggagatttttgtgttttattttatatagttagtagtattttatttgtttttaaaaggtagtattatttttgtaaattttattttaaaaaaaaaaaaaaaaatttttataaattgtaattttatttttaaaaataatttttaaatttttatagtattttgttttatattattgaattatattttattttgtgttatgattatttgtgtttaggttttatttttgttaaatgttggagtaattgtaattttgttttgtttattatgttggttttattttttagggata

SEQ ID NO: 2498 - DNA, 2449 bp, Artificial Sequence
  chemically treated genomic DNA (Homo sapiens)
aaaaataatttttatttttatgtttgtaaatatgtttatttatatttttttagttattttttttgtaaatattttgaataaaaaggattttgttttatggttgatttttatttaatttatttattgagataggggtttattttgttatttaggttatagtgtagtgatataattatggtttattgtagttttaattttttggtgttaagtaatttttttattttagttttttgagtagtttgggattataggtgtgtattgttatgtttggtgaatttttaaatttttttgtagagatggggttttattatgttgtgtaggttggttgtgaatttttgggtttaagtgattttttagttttggttttttaatatgttaggattataggtatggttgatttttatagtttttttttatttaaaatgtaatatgtagtgattttatagtttttttttaattttatttttgtgttttgaaagtgattagtttagtttttgttatagtagagtttttagtaattaattttagtaataaaattttataattgtgggatggaatagtgtgttaattgtgtttttggagaaatttatgtttaatttgtatatagaatgtttatagatttttgtttattagtttggttggaaggatagggtttgttgtaaggatagtaattttatttagggtttttttagaggtttgagaggttttgttaaggttttgggtttaggggtttaaggtgggagagggtgagagaaaataatgtgttaatgtagttttgagtggtttttaaataggagtagagggaaggttgtgaggggagttggttgttttttttggagttagaaaggttgttgtttaattttttggattttttattatagttgggtagggagagggttagattgggtatgatttttttgaataggtttttttaaagttttttggttgaattgattttttttttagagttaaggaagtagtgtttgggtgaagttaatttttttatttttaatatatttttttagagttaggtgagtttggaagtttaggtttttggaaggtagagttatatagggtaagaggtttaaggagttgtgaattttggttggagaaattttttttttggttttgttaaatttaataggtataattgtattttgttgattttaatttttttggtgggtttaattggttttggtattgttttattttttgttttgtttttgtagaggtaaagagggtgtttgtatagttggtgtagggtggggaagtttttttttgagggtgggtaggggttttggtagtttttaggtgggtggaggaagtttttttgtgttttatttttgtgtttttaagggagtgttgagaagtttggggatttttagggagtagttggttggagtaggtagttttgtagatttggaattaggttagatttttattttagtgggaggtattgtaggggagttggtgggaatagatgaattttttatttggggtgtttatgatattattaggtttttatagtgttgtaggtattgtgttattgggtattttttatatgtgtgttggttaaatgtttgtagttatgttgtgagagggaggtaatggggtagagtagttatgagtagagttttgggttagatgggtttaattttaattttatgattttgttttgtgatttagtttttttgttatatttgtgaaatggggattaaagagttgatatttatatagtatttgttatgtttatatttattgttgtaatgttttatttattttttgggaggtagatgttttttttatggatgaggaaataggtgaagatattgttttaagtttatagttattggttgtagtgttttattgatagattttttaattattgtatggtagggagttgtaagatttgaaggaaggatatttatgaagttgtttattttagggtttggtttattttagaaagagtttaataagagtaattatttgggaataataattataataaaagtagtattaatgtttttgaagttgttttaggttggattttggttttattgggaggtggttttggatttgaatgtgggtagtttgaagttatttattagttgagtgattgtggggataagttatttttttttgtgagtattagtttttatatttttaaaatggtgtaatattggtttttatagttttttttgaggatttagggagttggatttttggtatagtttggtttggttgttggtgggtatttaataaatgattggtattgataattataataataataaggagatgttagtaaggtttagtatagggaggtaataaattttagtttggagttttttggttaattagttatttatttattagatattgatgggtaagtttattttgtgttggggatgtgtttagtttttggtttttagggggtttttagatagtg

SEQ ID NO: 2499 - DNA, 2449 bp, Artificial Sequence
  chemically treated genomic DNA (Homo sapiens)
tattgtttgggagttttttgaaggttaggggttaaatatatttttagtatagagtggatttgtttattagtgtttgatgagtaaataattgattaattagaaggttttagattggagtttgttatttttttatgttggattttgttggtatttttttgttattattgtggttattaatattagttatttattgagtgtttattaatggttaggttagattatgttaaagatttagttttttggatttttagaagggattgtaggggttaatgttatattattttaaaggtgtggaaattgatgtttatagagggaagtggtttgtttttatagttatttagttagtgaatggttttaaattatttatatttaaatttagagttattttttaatgagattaaaatttagtttgggataattttaggggtattagtgttatttttgttataattattatttttaaataattatttttattgaattttttttaaaatggattaggttttggggtaagtagttttatgagtattttttttttgagttttataattttttattatgtagtgattaggagatttgttaatgaagtgttgtgattagtaattgtgagtttggaataatgtttttatttgtttttttatttgtaaggagagtatttgttttttaggaggtagataaagtattataatagtgagtgtgagtatagtgagtgttgtataaatgttagttttttaatttttattttatagatgtgataggaaaattgagttatagggtaaagttatagagttgggattggatttatttaatttaaggttttgtttataattgttttgttttattgttttttttttatagtatggttgtgagtatttagttagtatatatgtaaagagtgtttaatggtatagtatttatagtattgtgggggtttgataatgttgtggatattttaggtagagggtttatttgtttttgttagtttttttgtagtgttttttattgggatgagagtttggtttggttttgaatttatgggattgtttgttttagttagttgttttttgggagtttttaagttttttagtatttttttggaggtataggggtggggtatggggaaattttttttatttatttaggggttgttagagtttttgtttatttttaagaaggggtttttttgttttgtattagttgtgtagatattttttttgtttttataggggtaggataggaagtggggtaatgttaagattaattaaatttgttaggggaattaaggttagtaggatgtaattatgtttgttggatttaataaggttagagggaaggtttttttagttagagtttatggttttttaggttttttgttttgtgtagttttgttttttaggagtttaggtttttaggtttatttagttttggaagaatgtgttgggggtgaaggggttaattttatttaggtattgtttttttggttttggagaggaaattagtttagttaagaggttttaaaaggatttgtttggagaagttatgtttagtttgattttttttttgtttagttgtgatggaaaatttaaagagttgagtaataatttttttgattttaaagagagtagttaattttttttatagttttttttttgtttttgtttgagagttatttaaggttgtattagtatgttgtttttttttgtttttttttattttggatttttgagtttagggttttggtaggattttttaggtttttggaaaagttttaggtaaggttgttgtttttatagtagattttgtttttttagttaagttagtaagtagaggtttgtgggtgttttgtgtgtaaattggatataggtttttttgaaaatgtaattgatatattgttttattttatagttatagaattttattgttaagattaattattgggggttttattgtgataaggattaaattggttatttttaggatatagagatgaaattgggggagagttatagaattattgtatattatattttaggtgaaaaaagattataaaaattaattatgtttgtaattttagtatgttaagaggttgaggttggaggattatttgagtttaggagtttatgattagtttgtgtaatatggtgagattttatttttgtaaaaaaatttaaaaatttgttaggtgtggtagtgtatatttgtggttttaagttatttaggaggttgaggtagaaggattgtttgatattaggaggttgaggttgtagtgagttatgattgtgttattgtattatggtttgggtgatagggtgggtttttgttttaataaataaattaaataaaaattagttatagagtgggattttttttgtttaaaatatttataaagaagatggttggagggatataaatggatatatttataggtgtagaaatagagattattttt

SEQ ID NO: 2500 - DNA, 2340 bp, Artificial Sequence
  chemically treated genomic DNA (Homo sapiens)
ttttttttttttttagtttagtttatgtaggttttgttttagtattgtgagtagttgttttttttagttatatttgagaaattgaagaagtttttaggtttaaagttattgttataatttgtgtttttttttttttttttttggagatggaattttgttttgtagtttaggagggagtgtaatggtattattttggtttattgtaatttttggtttttgggtttaagtgatttttttgttatagttttttgagtagttgggattatagatatatattattatgtttggttaatttttgtagttttaatagagatagggtttttttatgttggttaggttggttttgaatttttggttttaagtgattttattgttttggtttttaaaagtgttgggatgataggtatgagttattatatttagtttataatttttatttttgttaggttttttaaaagtttttattgttagtgtaggtagttgtttggaagttattttaggttattttttttattttttaggtaggtgaattaagattatttaggtgtgaggttggtttgagttagagatggtttgggagagtttttggggggtagggagggtttagtttttttaggtttggttgtgttttttgttttttatttataattaggtttagggttggggggtgtatattaaggaggggtaggaagtgtttaagaagtagaattggttttgtgtttttagtggtggtgggtgtttggggtaggaggaggttatttgattttttttttattgttttggttatgatttttttttttttttttttgttttttttttttttttttttttttttttttttttttttttttttttatggttggggtagttagtattttgggttgtagttgagaatttagtgttttttaattttgttagtattttagtgagaggaggggtggggggagattgtatttagagttttagggataggggtatttttggggttgttttattttgggagggttaaggttaggttgtttttaattttattgttttttgtttttgttttttttattttttagtagtagagttgtttaaatttggttttaggagggaatgggggaggtagtggtaggtgggtgttgttagaggttagggtgttgtttttgtttagttggttggtatttttgttgtttggaggagggtaggggggtttggtagtttttttttggaaagggagatgtttgtattttttgatatatattgagtaatgtgtaaatgatatgtaaattgagttttaaattagtattttagttagggaatagtttgagagttgtttttgggatgagagtagaaggattagagtttagtgtttaggggttttagtgggggtggggtggggtggggggtggtatagagtgtttagggttgggtgttgggagatttagttttttgttagttgtagggttttgttttagtggttggattttttgggttttagtttaagggtagggttatggttttttttgtttgttttagtaaagtattgggtatattttgttatgtggttaagtatgtgagttttgtagttattttgtttaggtttgaattttggttttttatgggttagttgagtgaattttttaattgagtatttaggtaagtagttagtggaattgggtgtttgttttagaatagttattttttttttttggaagttgggtatgggggtatgatgtgagagaatttgggttttggaattagaattggattttaggttttatttagttagtgaggttttttgagttttattttttttatttgggaaatgggtttaggattttaaggttagttgtgatgtttatgtgatgattttgtatatggtgggtatatataggtttttttatggtgtagttttattgttgtttgtatttatgtgatttttagttttattttgttttattgttttttttttttttgtttttttgttttggtttttttgtttttagatgtaaattttttgtggttttttttttttttgtttttttttttaattggtgattttggaaaagttattgttttttagagttttagtttgtatattttttaaatgggagtaaatgagaggtggataatgagttttgtttggggtttgaggtttatttttataagattgtttatttattattttaaagggttattaggggtaggttgtgtttttaattttattgggtatggtgtgttgggggttttattttttagtaattttgtttaattttagataattgtttttttgttttttggttggggttgatatgagttgaatttagttttttgttatttaaaagttattttttg

SEQ ID NO: 2501 - DNA, 2340 bp, Artificial Sequence
  chemically treated genomic DNA (Homo sapiens)
taggaagtggtttttgggtggtaggaagttggatttagtttatattagttttggttgaggggtaggagagtagttatttggggttaaatagagttattgagaagtggagtttttaatatattatgtttgatagagttgagggtatagtttatttttggtggttttttggaatgatgggtgggtggttttgtaaagatgagttttaggttttagatagagtttattgtttattttttatttatttttatttagaagatatgtagattgagattttgagaggtaatgatttttttaagattattagttaagaagagagatagaagggaaaaagattgtaagaaatttatatttagagatgaaaaagttaggatagaagaataaagagaagaggagtgatgggataggatggagttaggagttatatgaatgtagatagtagtgaggttgtattatgggaaggtttgtgtgtgtttattatgtgtaaggttattatgtggatgttatagttgattttgagattttgaatttattttttaaatgaggggagtgagatttagagagttttattggttgagtgaggtttggaatttagttttgattttaaagtttaggtttttttatgttatgtttttgtgtttaatttttagggaagggaagtggttgttttaaaatagatatttagttttattagttgtttgtttgggtgtttgattgaggaatttatttagttggtttatggagagttagggtttaaatttaggtaggatggttgtagaatttatgtgtttaattatgtgatagggtgtgtttagtgttttgttggagtaggtagagaaagttatggttttgtttttgggttgggatttagagggtttagttattggaataaagttttgtagttggtaagaaattgagttttttaatgtttagttttagatattttgtgttgttttttattttattttatttttattggagtttttgggtattgggttttggtttttttgtttttattttaaaagtagtttttaagttgttttttggttgagatgttgatttgaagtttggtttgtatgttgtttgtatattatttagtgtatgttagaaggtatgaatatttttttttttgggagagggttgttgggtttttttgtttttttttagatagtaaaaatgttagttggttagatgggagtgatgttttggtttttgatggtatttgtttgttgttgttttttttatttttttttggagttaaatttaggtagttttgttattgagagatggggagagtggaggtaggaaatggtgaggttggaggtagtttggttttggtttttttagagtggagtagttttaggggtgtttttgtttttaaagttttgggtgtagtttttttttatttttttttttattggaatgttggtggggttggggaatgttgggtttttagttgtagtttagggtgttggttattttagttatgaaggaggagggagggagggagggagggagggagggagggagggagtgagggagggagggaggaggttatggttggggtagtggggaagggattagatagtttttttttgttttagatatttgttgttattggggatatagagttggttttgttttttggatattttttgtttttttttggtgtgtattttttaattttgggtttgattgtgggtggggggtaggggatatagttaggtttgaggggattgaattttttttgttttttaaaggtttttttaggttatttttgatttaggttagttttgtatttgaatggttttggtttatttatttgggaaatggaaggggtggtttagaatgatttttaagtagttgtttgtattgatagtaggagtttttgggaggtttgatagaaatgagggttgtgggttgggtgtggtggtttatgtttgttattttagtatttttggaggttgaggtagtgggattatttgaggttaggagtttgagattagtttggttaatatagggaaattttgtttttattaaaattgtaaaaattagttaggtatggtggtgtgtgtttgtaattttagttatttgggaggttgtagtaggagaattgtttgaatttaggagttggaggttgtagtgagttgagatggtgttattgtatttttttttgggttatagagtaagattttgtttttaaaaaaaaaaaaaaagaaatgtgggttgtggtagtggttttaggtttagaaatttttttgattttttaggtatggttaggagaggtagttatttatgatgttgggatagaatttgtgtgggttgaattgaggaaaggaagaa

SEQ ID NO: 2502 - DNA, 2438 bp, Artificial Sequence
  chemically treated genomic DNA (Homo sapiens)
tgtttagaattttatagtattttatatagttttatatatgtatatgggaatttttttttttggtttttatatttgtttagtattgattttttagatgtatttattgatttaataaattttttttgagggttttttttgtggaggttttgggttaatttataattagaatgattggaataggaataaataattagttgttttgtgttgttgtttttgtttttttatttgtgagatggggattttagttttgttatatgggattgttaatgttaggagtgaatgtgtggaaagtttttggtttgtgtttggtttatagtgttatttaagtaaggttattttggttagttaaaagtattttatgtttagttttatgtagaatatttggtatatattatttttttgagtttttgtttaagtttttagtagttggggttattgtttttattttttagatgaggaaattgaggtttagagaagaggtttatagtttgtaggttgttttattgattttatgttatgttatagtgttgttttagtttgttttgttattttttatatatatatatatatatatatatatatatatatatatattattttttttggttagaaggttttttttatttgtatatagtatgtttagtttttttgagttgtttatttatatttttgtgaaatggggatattagtttgtgttagtttttgtttattttttttagggtattggattttaagggttaagagtgaagattattttgttttgttttttggtatatagtaggtatttgataattattttaaaattaaaggaataagtaagtggttttatggttattgaggatagagtttggaattgaatgtagggtattttgaagttggagtttatttttatattattgttttttttatgttattagtaggtattgaatgtgttagtgagtgaatgaatgaaattaagattttaggattttagttaagtgttttttgagttttattttttggtagtgtggatatgagttaagttttagttattttggatggtggtgggggtggtggggttgatgggttgtttgaagttggttgttaggagtttgtttggttatagttgttagtaggagagattagttggtggtgtagggtttattggtttgggtttggaatttgagttgtttttagaggtttagtttttttttgggtttttataaattggtttttgtttttgggttggttaagatttagtagtttgggttttttgtttgtttgtggtatttgtgttgagttggtggggtaaatgggttagttttttttttgtttatgtttaggatgttgttttaggattaaatggagatgtaattttttatataaatttatgataatttagatggagtgattgtaattggttttttaatgggggttttgtttagagttggtggttagaattgggtggtttgtttgaggtaggttttatttaaatgataataaagtaataatattgaggatttgtatagtgtttagtattttttttagtttaagtagagttttatgtttatggatttggtttttttttgaggttgtttggataggtgggtggtggggggtgttaagtttaggagataggtggttatatttttgggttttaggatatagagttttagaatggttggggtaaggttttgtatttattggtttatttgtgtttttatttttgaaattgttattaattagtgtttttttgggttagttgttagtttaggttttgggggtattaagataatgagagttgtttaggtaggttagagggagaaggttataatggttagtatagtatgatatttgagagtatgattaagagatgattaatagttagatagtttgagtttaaattttattttatttttttttaaaaaaattttttttgagatagggttttgttgtgttatttagattggagtatagtggtaggattatggtttattgtagttttgatttttaaggtttaagtaatttttttattttagttttttaagtaattggattataggtatgtgttattatatttggttaatttttttatttttttgtagagatagagttttattgtgttgtttatgttggttttgaattattgggtttaagagatttttttgttttagtttttgaaagtgttgggattataggtgtgagttattgtgtttagtttttattttatttttgatttgttttttgaattttattaagttatttaatttttttatgttttagtttttttagttataatatgaagttgtagtgaaagtttttgtgaagatgaaatattttaatagtgtttggtatgtggaaggtgttatatataagttattgttgtgatttattttaagttttagttttggtgttagggtgattttgggtatgtgatttaatttttttaaatttttatt

SEQ ID NO: 2503 - DNA, 2438 bp, Artificial Sequence
  chemically treated genomic DNA (Homo sapiens)
agtggaggtttaaagaggttaagttatgtgtttaaggttattttgatattagagttagagtttggaatgaattatggtaatgatttatatatagtattttttatatgttaggtattattaaggtgttttatttttataaaaatttttattgtagttttatgttatggttggggaaattgaggtatggagaggttaagtaatttggtaaggtttaagagatgagttagaagtagagtaggggttgagtatagtggtttatatttgtaattttagtatttttagaggttgaggtgggaggattttttgagtttagtagtttgagattagtgtgggtaatataatgagattttgtttttgtaaaaaaataaaaagattagttaggtgtagtgatatatgtttatggtttagttatttgggaggttgaggtgggaggattgtttaagttttggaggttgaggttgtagtgagttgtgattttgttattatattttagtttgggtgatatagtgagattttgttttaaaaaaaatttttttaaaaagaagtggagtaggatttgagtttaggttgtttggttgttggttattttttggttatgtttttaaatgttatgttgtattggttattgtagttttttttttttgatttgtttgagtagtttttattgttttggtgtttttgaaatttggattagtagttagtttgaggaggtattagttagtgatagttttaggaataaggatataggtaagttagtggatgtgggattttgttttagttattttgaagttttgtgttttgaagtttaaagatatggttatttgttttttgggtttagtgttttttattatttgtttgtttagatagttttagggaaggattagatttataaatatgaggttttatttgggttgggaggagtgttgggtattgtataagtttttaatattattgttttattgttatttaaatggagtttgttttaaataggttatttagttttagttattagttttggataaaatttttattgaaaagttaattataattattttatttaaattgttatggatttgtatagaaaattatatttttatttagttttaaagtgatgttttgggtatggatagaggggaggttggtttatttattttgttagtttagtgtgggtgttgtgggtagatagaaagtttaagttgttgggttttggttggtttaggaataaaggttagtttgtgggggtttagagagaagttgggtttttgagggtagtttagattttaggtttgggttgatggattttgtattgttagttggttttttttgttggtggttgtggttagatgagtttttgatagttggttttaggtggtttattagttttgttatttttattattatttaaggtggttggagtttggtttatgtttatattattaggaaatgaaatttagggagtatttgattgggattttgagattttggttttatttatttatttattgatatatttagtgtttgttagtagtatgagaaaggtaataatgtagaagtgagttttagttttagagtgttttgtatttagttttagattttgtttttagtagttatgaggttatttgtttatttttttagttttgaaatagttgttgagtgtttattgtgtgttagagaataggataaaatggtttttatttttggtttttaaagtttagtgttttggggaaaataaataggggttgatatgggttagtatttttattttatagaagtgtaagtaggtagtttagaggagttgggtatgttatatgtaagtgagaagggttttttagttagagggaatagtgtgtgtgtgtgtgtgtgtgtgtgtgtgtgtgtgtgtgtagggggtggtgaggtaggttggagtagtattgtggtatgatatgagattggtggggtaatttatagattgtgggttttttttttgagttttggtttttttatttgaggaatgggggtgatgattttagttgttggggatttggataagggtttagggagataatgtgtgttaggtgttttgtgtggagttgggtatgggatgtttttggttaattaggatagttttatttagatgatattgtgggttaaatatggattgagggttttttatatatttatttttaatattgatagttttatgtggtagggttaggatttttattttatagatggggaaatggaggtaatagtatagggtagttaattatttgtttttgttttagttattttgattatgggttagtttagggtttttatagagaagatttttaaaaaggatttgttgaattagtgaatgtatttggaaggttggtgttgggtaggtgtgggggttggggaggaagatttttgtgtatatgtgtgaagttgtgtggagtgttgtgggattttgagta

SEQ ID NO: 2504 - DNA, 2364 bp, Artificial Sequence
  chemically treated genomic DNA (Homo sapiens)
ttaatagatatagaaaaaaagtttgataaaatttaatatttttttataataaaaatgtaaaattaggaatggaagagaatttttttaatttgataaagggtatttatgaaaaatattgttaatattaaatttaataaataatgaaagttttttttttagaattagaaataaagtaagtgaaaattataattttggttagttgtggtggtttatatttgtaattttagtattttgggatgttgaggtaggagaattatttgaatttaggaggtagaataaaattataattttagaaaaagtatgtgttttgtatttgttattgtgagtttgatagtttgttaatatttgaagatttttgtgattggatatggtagtttatatttgtaattttaatattttggaaggttaaggtaggaggattgtttgagtttaggagtttgagattagtttggttaatatagtaagattttatttttatttttttttttttttttttttttgagatagagtttttgttatttaggttggagtgtagtggtgtaatttgagatttgttttgagattaaaaagtttgagaattattgttatagaaaagtattaggatatgtattaaaatggttttggaagtattgtttttaattataatttattgggaatattttatatatttattagtagtataatatgttatatatatatatatatatatatatatatatatgtatgtatatatttagtgttttagataagggaggttatgtttaaggtagtttatttttaaatttttatttaaagaaattttgaatgttttttgggtttttgttggattttagaatttttgtttttatttttagttattgtaaatgaattttggttttatgtttatagtaattagttttagttttggtattattttaaaggaaaaatgttaaattatatttgtttgaggtttttggaatggtttaaaagtttagggaaaagggtgtatagggtaggaaagtggggtgagtgaggtattatttttttagttagaaagtgtagttttgttaggagttttttggttagtgttatttttttttgtatattgtgttgttttaggttgtgtagaagttgtagtttttgtttagttaaaaggttttgggagggtaaaaagatagtatgagtggaaggttttagttaggtgtttttgagtttttttttgaggttgtattaggttgtgtattaggagttttttttggtattgatttagggtattgggttgggttattgttttgtgtttggtattgtggtaaaattgtttgtagtgagtagggatgtgtatagtagataggaattaaaggaaaggagaaggatagtgattttggggttatttgttttgagttgattttttatttttagttttttttatagtttttttagttttgggttttgaagaggtatttttttttttgtaaagttggtttatttttatttggattatttttaaaaattattaaggttagttttgtttttgagttttagagtttgttaatatttaattatttattattttggttattttaggtgtggtttatggattaatagtattggtattatttgtaggttatttaaaattgtaggattttagttttattttaggttttgttgaattagaagttgtgtttatgtttttggggatttttaagtatattgaagttttagatgtttttattagtttggttaatgtatagtttgaatattatatgtttaagttaaatgtatattttttaatgattttttttgtaaaataaaataaaataaaataaaaattttattttattttagaatttttgagttattttttattgtttttttttttttattttatattaatttattagtaaattttttatgttttatttttaaaaaatatttagaatttggttaggtgtggtggtttaggtttgtaatttttgtattttgggaggttgaggtggtgaattatttgaggttaggagtttgagattagtttggttaaaatggtgaaataattgtgtttattgatgttgaaaggttgagtatggtgagaatagaaaagtgattatttatagttttttattttattgttttttttgattagggtttttggttgagtttttgttttttttttgtttttaaatgttggaatgttttaggtttttagattttttttttttgtgttttgttaatgttgttatttagttttatttatataatgatagtttttaaattgatatttttagtttagaattttttttagaatttaatttatatagttaattgtttattatatatgtttatttataatttaataagaattttatagttaatatgtttaaaattgag

SEQ ID NO: 2505 - DNA, 2364 bp, Artificial Sequence
  chemically treated genomic DNA (Homo sapiens)
tttagttttggatatgttaattgtgaaatttttattgaattgtaagtggatatgtgtggtaggtagttagttatatgagttgagttttggggagaattttaggttggaaatgttaatttgggaattattattatgtagatggagttggataatagtattaatagagtatagaaaagagaaatttgagaatttggagtgttttagtatttagaggtagggaggaagtagggatttagttaaggattttgattaggagaggtagtgaggtaggaggttgtaggtggttatttttttgtttttattatgtttaattttttagtgttagtagatatagttgttttattattttggttaggttggttttgaatttttgattttaagtgatttattgttttggttttttaaagtgtggggattataggtttgagttattatatttggttagattttggatattttttgaaggtagagtataaagaatttgttgatgaattgatgtggaataagagagaaagagtagtgagagatgatttgaaagttttgaggtgaaatagggtttttgttttgttttgttttgttttgtgggggggattattggaaagtatgtatttggtttgggtatgtaatgtttaagttatatgttagttaagttggtggagatgtttgaggttttaatgtgtttaggaatttttgagggtataaatgtagtttttgatttagtagggtttggggtggggttgaggttttatagttttaaatagtttgtaggtgatattagtgttgttggtttatgggttatatttggggtagttagggtagtaggtggttaagtattagtgagttttggagtttaagagtaaggttggttttaatgatttttgggagtggtttaaatagagataggttagttttgtaggagaaagggtgtttttttagagtttaagattgagagggttatgagggaggttgggggtgggaggttagtttagagtaagtggttttaaggttattgtttttttttttttttttgatttttgtttgttgtgtatatttttgtttattgtagatagttttgttatggtgttgagtgtaggatgatgatttggtttaatgttttggattgatgttgagggaaatttttggtgtatagtttggtatggttttgggaagggatttaggggtgtttagttggggttttttgtttatgttgtttttttgtttttttagaattttttggttaagtaaggattgtgatttttatgtggtttgagatggtgtaatgtgtaaaagaaggtggtattggttaagaagtttttggtaaaattgtgttttttggttgaggaggtaatgttttatttattttatttttttattttgtatatttttttttttaagtttttgaattattttagaggttttgggtaggtgtgatttaatattttttttttggaatgatgttagggttgggattaattgttgtgggtataggattaagatttatttgtagtagttaagggtgaggataagagttttagaatttagtagagatttagggaatatttaggatttttttggatgaagatttgagagtaggttgttttgagtatgattttttttgtttgaagtattaaatatatatatatatatatatatatatatatatatatatatatataatatattgtgttgttgatgggtatgtgagatgtttttaatgggttgtgattagaaataatgtttttgagattattttggtatatgttttggtgtttttttatggtagtggtttttaaattttttggttttgggataggttttagattatattattgtattttagtttgggtgatagagattttattttaaaaaaaaaaaaaaaaaaaaaaatggagatggggttttgttgtgttgattaggttggttttaaatttttgagtttaagtagtttttttgttttggttttttaaagtgttgggattataggtgtgagttgttatgtttagttataaaaatttttgagtgttggtaagttgttaagtttataatggtagatataagatatatattttttttgaaattgtaattttattttgttttttgggtttaagtgatttttttgttttagtattttaaagtgttgggattataggtgtgagttattataattagttaaagttgtaatttttatttgttttgtttttgattttagggggaaagtttttattatttattaagtttgatgttagtagtgttttttataaatgttttttattaggttgaggaagtttttttttatttttagttttgtgtttttattgtgaaagggtgttagattttattgaattttttttttgtgtttattaa

SEQ ID NO: 2506 - DNA, 2386 bp, Artificial Sequence
  chemically treated genomic DNA (Homo sapiens)
ggtaggagaattgtttgaatttgggaggtggaggttgtagtgagttgatattgaattattgtattttagtttgggtgatagggtaagattttattttaaaaaaaaaaaaaaaaaaattaggttttgatgtttaataggttggttttattatttataatttataatgtgtaggatttggagtaaattattttatttataggatttttagtttttttttttgtaaagtggagataatatttattttttagggatagtgtaggaggatgaaagagtgttgagttagtggttaatataggttgagtatttagtggatggtagtaattgttattattattattattatattattatattattataatataaaatattgagtaaatttgggatattttggtatttaatatttgttttttttttttttttttttattttttttttttttttttttttttttttttttttttttgtttttttatttttttttattttttttttttttattttttttttatttttttttggtatatttggttgtagttgtaaggagtggtaggagtttatataggaaaaggaggtgtggttagattttggggggatttgaatgttagagggagtttgatttttagtttaggggtaatagtgagttattaaagtttgtggtggagtagaaataagttgtggtgaaagtggggaagtgagtttggtagtagagattgggaaggggttgtgagggtagaagttggagttagagaggtgagttatttagggagtttaaaggttaagtgagagagatggggaagtagaggttgtatttttgtttagagtttgtttgggagaagtagttttattttttatgtttattttgtttataaaatttagttggagtatttatttttgtgtgattttagataagtgtttaatttttttgagtagtagtaaggttattttagtttttggtgatattttttggttttttagtaaagatatttttggattttataggtttttattattttttaggttgttttttgtttagagattaatttgtttatttttttgtttggagatgaattgagggaattaattgtttattagtgtaggtttttttaattttgtattgttttgttttaaatgtttattttttggtaaaatatgtttttgttgttgataaggttgtttggaaaatgttaattttatttttgaattaaaatttgtttttttatttttgttttaataaaaatgaagtatttggaaatattgttatggtgtagaagagaaagatttgatataatttttaaaatgtttttaattatgttgatttttgaatggtttgttttttaattttgattttttttttattttttaattttttgaggtagtatttatattttttaataattttttattaatatttatgagaaggggtgggtaataatggttgagtatattgtattaatttaatttttatttgttttagtgtgtttatttaattattaagggatttgggttatttagtataattatttatttggaattagatttggaggtatttggattggaaatagggaattaagagtaaaatgaaaattgaattttttttgttttttttttttagttgtttttttttgattgtgtgttaatgttttaggtagttagtagggtttagaggataaggttttgtgtttgttgggtagtttttgaaggaattggtttgtgaggggttgaatgtgttttagatgttttggttttggtaggaattttttattaatagtagttttggagttattgtaaggtttagtagtgggttagttgtattgttttagttaagagtatggttagttagagttagggtgtttaggagatgttggggtattggtttaatttggatatgtagtgtggatagatttttgattataggttttgtggaggtgagagtttgtgatatggggtttaaataatatttgtttatttttgaatttttgtttaattgttattttttttaagaagttttttttggtttttagataaggttagttttttttattatatatattttttgttataattaggatgggtttggttatagtattttgtttattgtgggtgtttatataatggtttttaattagttgtttagggtttgttttttttaatagttagttttgtgggagtaggttttatggttgttttggttatgtgtttttagtatttagtaatgtttagtatagagatgtttaatagtatttgttaattttttgattgattgattttattattgatttttgatttttaagtttttgtttttttatttgtaaaatgaagttaagaatatttattttgtaggattgttgtggggatttagtgttttttatgtaaagaggatgta

SEQ ID NO: 2507 - DNA, 2386 bp, Artificial Sequence
  chemically treated genomic DNA (Homo sapiens)
tgtattttttttatatggaaaatattgagtttttatggtaattttataagatgaatgtttttagttttattttgtagataaggaaatagaggtttgagaattaggagttaatagtagaattaattagttaagaagttaataaatattgttgagtatttttgtgttgggtattgttagatgttaggaatatgtgattaggatagttatgggatttatttttatggaattgattattgggagaaatagattttgaataattaattagaaattattgtgtgaatatttatagtgggtaaggtgttatgattaagtttattttggttgtaatagaaggtgtgtgtaataggagaagttaattttgtttggggattaggaaaggttttttggaggaggtgatagttaagtgggggtttgaggatgagtaggtgttatttagattttatgttataaatttttatttttatagggtttgtgattaaaagtttgtttatattgtatgtttaggttgggttaatattttagtattttttgaatattttaattttggttggttatgtttttggttgggatggtgtaattggtttattgttgggttttgtgataattttaaggttattgttgatgagagatttttgttggggttagagtatttggaatatatttagttttttatgagttagtttttttaggagttgtttggtgggtatggagttttgttttttaagttttgttggttgtttggagtgttggtatatggttaggaagaggtggttgggaggggaggatgaagagaatttgatttttattttgtttttggttttttgtttttagtttagatgtttttagatttaattttgaataaataattgtattgagtaatttgggttttttggtgattaagtaaatatgttgaggtgggtggaaattgaattagtgtggtgtgtttagttgttattatttgtttttttttatgaatattaatgaggggttattaagaaatgtaaatgttgttttagggggttgggagatggggagggggttagggttagaggatagattgtttagaagttagtgtgattgaaggtattttaaaaattatgttagattttttttttttgtattgtggtaatgtttttggatgttttatttttattaaaatgagggtaagggaataaattttaatttgaggataaaattagtattttttaagtagttttgttagtggtaaggatatattttgttagaaaatggatatttggggtggggtggtgtgaggttgggggagtttgtgttgatggatgattagtttttttggtttatttttaggtaagggagtaaataaattaatttttgagtagagagtagtttggaagatgatggaagtttgtaggatttagaagtgtttttgttaggaagttagggggtgttattaagagttaagatggttttattgttgtttagagaggttaagtatttgtttgaggttatatagaggtgggtgttttggttgggttttgtgggtaaggtgaatgtagagaatgaggttattttttttaggtgagttttagatagagatgtagtttttgtttttttattttttttatttgatttttaggttttttggatagtttatttttttggttttagtttttgtttttatagtttttttttaatttttgttgttaggtttatttttttatttttattatagtttgtttttgttttattgtaggttttagtgatttattattgtttttaggttgaagattagattttttttgatatttaagtttttttaggatttgattatattttttttttttgtgtaagtttttgttattttttgtagttgtaattagatgtattaaggaaggatgagaagaaagtgagaagaaggggaataaaagaaggtgagaagatagggaaaaaggaggaaggaagaaaaggagggagaaaggtagggagaaaggaagaggaaataaatgttaagtattaaaatattttagatttgtttaatattttatattgtaatgatgtggtgatgtgataatgatgataatgataattgttgttatttattgagtgtttagtttgtgttagttattggtttagtgtttttttatttttttgtattgtttttagaaagtagatgttatttttattttatagaggaggaaattgagagttttgtaggtaaaatgatttgttttaggttttatatattataaattataaatgatagaattagtttgttggatattaaaatttgatttttttttttttttttttgagatggagttttgttttgttatttaggttggagtgtagtggtttaatgttagtttattgtaatttttattttttaggtttaagtaatttttttgtt

SEQ ID NO: 2508 - DNA, 2734 bp, Artificial Sequence
  chemically treated genomic DNA (Homo sapiens)
ttttttgttgtttttggtttttagtttttggtttaagtatggtttttagtttagataaggtttttttaggaggtttaggagttttgtgggaggtagagtgtagataaaggtttggagtttgtttatgtggaaaatttgggtttgtggtgattgtgaattatatgggtagaggggttagatttggggtttttatgatgggaatatgatgtgattgtggaggttagttaaggtttttgttagtggtgagtggaatagataaagaaattagttattagaggagagaagtattttagattggagtgggaggttatatattggttttttgtgttgttttttagaggggaattggggtagaggggtttttttattttatgaggttggttgggtttaatttaaggaatttttgtttttttatttttgttggaatttttattgtagtttattggatttttgtatgagatatatttggggtgtttagtgagtaggtagatttttagatatttattttgaaaagttagtttgaaagagaatatttaggggtggggtttggttatagttagtttttttagagagttttaagtttagtaatatttaataattttgtgtttaggttaatggtgtttaattttagttgtggattgtgattatttggggaattttttttaaattttgatatttagattttatttaagattaattatgttagaatttttggggtgtgttttgggtatttatatatttttaaagttttttagttgttttagtgtgggtttaaggattgttttagttttagattaattttaagagttttaagatgaatatttggggaaaaggagaagttatgagttttagataagagaaataatttgtttaaggttatataaggtggtgatggtaaagtttgttttgaaatttaggttttttttttgattgtgggttaatttttttttgatgttgtatttttttttaaaaattagagtttaggtaggtaatgtttatagtattttattttaataatattggaaattggtatagttagggttattatagtggtggggtgggagttttgatggtgattaggggagttgtaagttttttgttttatttaaattttgggtagtaatttagaaaatttaattaaagggggagaaatggggatattttgtgttttttgttttttgttataatgagtgaaatatattaggttgtaaaaggaaatgttgtttgagatgtagttttgatgttttattgttaagttttatttattgatgtaaatgtaattgttggaaattggagtttttattaatatatatatttttatatatttggggttttttttgtttttttttttttttttgggtttgtttatttattttttagggttagttttgttgttttttgggtatgtttatgttaagtttggagttttgtattggttttatatttttttatggtagataagattttaatagaattttattgttttttagagtttagtaatgtattttggaaattaggtggttatatattaaagttattgtttttttttataaatgggtttttttaaagttagtgattatgggggttttgataagtttttatgaagttttattttatatgttattggtgtgttaaaaggtgtaattttaggtttatattgtttattgttaggggttgatatatttaagtagtttttttatgaattaggtagtttaggtattttttttatttttggtattgatagatgagtaaaaggaagttatttagatggtgttatatagggttttagtttatgtggtgaatgatttttaatgtttggtttaatttatttttaaatgaaatttgttattgattttggattaaaaggataaattttatagttgttattattgatagagttatagtgtttaagtgatattttttaaggaggggagggagggtggtttgtttgagttaaggggagggtatggagattttttagggagtttggtttagtagtaaggggtagtgtaagattttatgtttagagggaagtttaaaaatattattttttttaattgaaatatttgatgtgatgtttatttttgagttttatttatataatggaaatagtagtgatatttgttttatggtatttatatgattattagaggtatgttagttgtttttagggatgggaggttttttattttttgtagtatttttagaatgaaatgagtgataggtgttatttattttagtgaatttttagagattgttttttgggttagtttttgtttattttttgtttttattaggtttttggtttttatggtgtttagagattatatttgtattgggaagtagataagaggtataattatataggggaggaggatgggttgggatgtgtttgtttatatttagtttttgttttattttattgtgtaattttgtgtaggttatattatttttttgagttttgtttttttatttgtaaaagaaggaagggtataatagtagttttaggggttgttgtatgaattataggagattatgggtgtgaatgtgatttgtaaattgtaaagtgtagtttaggtgttgtaggaaatataagtgggatagtatagtatagtgggaggtttttgagttgggagataaaggatttggatttagttttgttatgagtggttgtgtggttttgagaaagtgaattattttttttgggttttagttttttaaggtgttaagaggg

SEQ ID NO: 2509 - DNA, 2734 bp, Artificial Sequence
  chemically treated genomic DNA (Homo sapiens)
tttttttggtattttaagaaattaagatttagagaaagtaatttatttttttagagttatatagttatttatgatagaattggatttaggttttttgttttttaatttagagattttttattatattgtattgttttatttgtattttttgtagtatttaaattatattttatagtttataaattatatttatatttatgattttttataatttatataataatttttgaggttgttattatattttttttttttttatagatggagaaataaagtttagaaagatgatgtaatttgtataaagttgtatagtgaggtagggtagaggttgaatgtgaatggatatattttagtttattttttttttttgtgtaattgtgttttttgtttgttttttaatgtaagtgtaatttttgggtattgtggaagttgagagtttagtggaggtagaaggtaagtaaagattagtttaggaaatagtttttaggaatttattagagtgggtgatgtttgttatttattttattttgggaatgttgtaggagatggaaagttttttatttttggaggtaattaatatgtttttagtggttgtgtggatgttatgaggtaaatattattgttatttttattatataaatgaggtttagaggtgagtattatgttaagtattttaattgggaaagatgatatttttaaatttttttttaagtatgggattttgtattgttttttattgttgagttaagttttttggagagtttttatattttttttttgatttagataggttatttttttttttttttttgagaggtgttatttgagtattgtggttttgttagtggtaatagttgtaagatttgtttttttaatttagaattaataataaattttatttaaaaataaattaaattaggtattggaaattatttattatgtgggttggagttttatatagtattatttaaatggtttttttttgtttatttattaatgttaagagtgggggaaatatttaggttgtttgatttatggagaaattatttaaatgtattagtttttaataatgagtaatgtaagtttggagttgtattttttagtatattaataatatgtggagtgaggttttatgagagtttattagagtttttatggttattggttttgagagagtttatttataagggggaataatggttttagtatgtagttgtttaatttttagaatgtattattgagttttgaggagtaatggaattttattaaagttttatttgttatgggagggtatgaaattggtgtggaattttaggtttggtatagatatgtttagaaagtagtagggttgattttaggaggtgggtgaataagtttagagggagaggggggagtaggaggggttttggatgtgtgaaaatatgtgtgttaataagagttttggtttttagtgattatgtttatattagtgaataaaatttggtaataaaatattggagttgtgttttagatagtatttttttttatagtttggtgtattttatttattataataggaggtagggagtgtgaggtgtttttatttttttttttttaattaaattttttaaattattgtttaagatttggataaagtgaaagatttatagtttttttaattgttattgaggtttttgttttattattgtggtggttttgattgtattggtttttaatattattaaagtgaaatattgtgggtattgtttgtttgggttttggtttttaaaaagagatgtagtattaggaagaaattggtttatggttaggaaagaggtttgggttttaggatgggttttgttattattattttgtgtgattttgggtaagttattttttttatttgagatttatgatttttttttttttttagatgtttattttgaggtttttagaattgatttggagttggggtagtttttggatttatattgggatgattggggagttttaagaatatatgggtgtttagggtatattttagagattttgatataattggttttaggtgagatttgggtattagggtttaaaaaaaattttttaggtgattatagtttatagttaggattgaatattattggtttaaatatagagttattagatattattggatttgagattttttggagaggttggttgtggttaggttttatttttgggtgtttttttttagattggttttttggggtgggtatttgggaatttgtttgtttattaagtattttaggtgtgttttgtgtagggatttagtgggttgtagtgaggattttaatagaggtgggaggataagggttttttgaattgagtttagttagttttgtggaatgaggaggtttttttgttttagtttttttttggagggtagtatagggagttgatatgtgattttttattttggtttggggtattttttttttttgatgattgatttttttatttgttttatttattgttggtaggagttttgattggtttttatagttatattatgtttttattataggaattttaggtttggtttttttgtttatgtggtttatgattgttgtagatttaggttttttatatggatggattttgagtttttatttgtattttgttttttgtagggtttttaggttttttaggaaggttttgtttaggttgagagttatgtttgggttaagggttaggagttagggatagtaggggg

SEQ ID NO: 2510 - DNA, 2441 bp, Artificial Sequence
  chemically treated genomic DNA (Homo sapiens)
ggatattttttaggatttttggtaaaggtaggagttagaatgaatgaattttttgtgtttaggtttttttgttgtttttggtttttagtttttggtttaagtatggtttttagtttagataaggtttttttaggaggtttaggagttttgtgggaggtagagtgtagataaaggtttggagtttgtttatgtggaaaatttgggtttgtggtgattgtgaattatatgggtagaggggttagatttggggtttttatgatgggaatatgatgtgattgtggaggttagttaaggtttttgttagtggtgagtggaatagataaagaaattagttattagaggagagaagtattttagattggagtgggaggttatatattggttttttgtgttgttttttagaggggaattggggtagaggggtttttttattttatgaggttggttgggtttaatttaaggaatttttgtttttttatttttgttggaatttttattgtagtttattggatttttgtatgagatatatttggggtgtttagtgagtaggtagatttttagatatttattttgaaaagttagtttgaaagagaatatttaggggtggggtttggttatagttagtttttttagagagttttaagtttagtaatatttaataattttgtgtttaggttaatggtgtttaattttagttgtggattgtgattatttggggaattttttttaaattttgatatttagattttatttaagattaattatgttagaatttttggggtgtgttttgggtatttatatatttttaaagttttttagttgttttagtgtgggtttaaggattgttttagttttagattaattttaagagttttaagatgaatatttggggaaaaggagaagttatgagttttagataagagaaataatttgtttaaggttatataaggtggtgatggtaaagtttgttttgaaatttaggttttttttttgattgtgggttaatttttttttgatgttgtatttttttttaaaaattagagtttaggtaggtaatgtttatagtattttattttaataatattggaaattggtatagttagggttattatagtggtggggtgggagttttgatggtgattaggggagttgtaagttttttgttttatttaaattttgggtagtaatttagaaaatttaattaaagggggagaaatggggatattttgtgttttttgttttttgttataatgagtgaaatatattaggttgtaaaaggaaatgttgtttgagatgtagttttgatgttttattgttaagttttatttattgatgtaaatgtaattgttggaaattggagtttttattaatatatatatttttatatatttggggttttttttgtttttttttttttttttgggtttgtttatttattttttagggttagttttgttgttttttgggtatgtttatgttaagtttggagttttgtattggttttatatttttttatggtagataagattttaatagaattttattgttttttagagtttagtaatgtattttggaaattaggtggttatatattaaagttattgtttttttttataaatgggtttttttaaagttagtgattatgggggttttgataagtttttatgaagttttattttatatgttattggtgtgttaaaaggtgtaattttaggtttatattgtttattgttaggggttgatatatttaagtagtttttttatgaattaggtagtttaggtattttttttatttttggtattgatagatgagtaaaaggaagttatttagatggtgttatatagggttttagtttatgtggtgaatgatttttaatgtttggtttaatttatttttaaatgaaatttgttattgattttggattaaaaggataaattttatagttgttattattgatagagttatagtgtttaagtgatattttttaaggaggggagggagggtggtttgtttgagttaaggggagggtatggagattttttagggagtttggtttagtagtaaggggtagtgtaagattttatgtttagagggaagtttaaaaatattattttttttaattgaaatatttgatgtgatgtttatttttgagttttatttatataatggaaatagtagtgatatttgttttatggtatttatatgattattagaggtatgttagttgtttttagggatgggaggttttttattttttgtagtatttttagaatgaaatgagtgataggtgttatttattttagtgaatttttagagattgttttttgggttagtttttgtttattttttgtttttattaggtttttggtttttatggtgtttagagattatatttgtattgggaagtagataagaggtataattatataggggaggagga

SEQ ID NO: 2511 - DNA, 2441 bp, Artificial Sequence
  chemically treated genomic DNA (Homo sapiens)
ttttttttttttgtgtaattgtgttttttgtttgttttttaatgtaagtgtaatttttgggtattgtggaagttgagagtttagtggaggtagaaggtaagtaaagattagtttaggaaatagtttttaggaatttattagagtgggtgatgtttgttatttattttattttgggaatgttgtaggagatggaaagttttttatttttggaggtaattaatatgtttttagtggttgtgtggatgttatgaggtaaatattattgttatttttattatataaatgaggtttagaggtgagtattatgttaagtattttaattgggaaagatgatatttttaaatttttttttaagtatgggattttgtattgttttttattgttgagttaagttttttggagagtttttatattttttttttgatttagataggttatttttttttttttttttgagaggtgttatttgagtattgtggttttgttagtggtaatagttgtaagatttgtttttttaatttagaattaataataaattttatttaaaaataaattaaattaggtattggaaattatttattatgtgggttggagttttatatagtattatttaaatggtttttttttgtttatttattaatgttaagagtgggggaaatatttaggttgtttgatttatggagaaattatttaaatgtattagtttttaataatgagtaatgtaagtttggagttgtattttttagtatattaataatatgtggagtgaggttttatgagagtttattagagtttttatggttattggttttgagagagtttatttataagggggaataatggttttagtatgtagttgtttaatttttagaatgtattattgagttttgaggagtaatggaattttattaaagttttatttgttatgggagggtatgaaattggtgtggaattttaggtttggtatagatatgtttagaaagtagtagggttgattttaggaggtgggtgaataagtttagagggagaggggggagtaggaggggttttggatgtgtgaaaatatgtgtgttaataagagttttggtttttagtgattatgtttatattagtgaataaaatttggtaataaaatattggagttgtgttttagatagtatttttttttatagtttggtgtattttatttattataataggaggtagggagtgtgaggtgtttttatttttttttttttaattaaattttttaaattattgtttaagatttggataaagtgaaagatttatagtttttttaattgttattgaggtttttgttttattattgtggtggttttgattgtattggtttttaatattattaaagtgaaatattgtgggtattgtttgtttgggttttggtttttaaaaagagatgtagtattaggaagaaattggtttatggttaggaaagaggtttgggttttaggatgggttttgttattattattttgtgtgattttgggtaagttattttttttatttgagatttatgatttttttttttttttagatgtttattttgaggtttttagaattgatttggagttggggtagtttttggatttatattgggatgattggggagttttaagaatatatgggtgtttagggtatattttagagattttgatataattggttttaggtgagatttgggtattagggtttaaaaaaaattttttaggtgattatagtttatagttaggattgaatattattggtttaaatatagagttattagatattattggatttgagattttttggagaggttggttgtggttaggttttatttttgggtgtttttttttagattggttttttggggtgggtatttgggaatttgtttgtttattaagtattttaggtgtgttttgtgtagggatttagtgggttgtagtgaggattttaatagaggtgggaggataagggttttttgaattgagtttagttagttttgtggaatgaggaggtttttttgttttagtttttttttggagggtagtatagggagttgatatgtgattttttattttggtttggggtattttttttttttgatgattgatttttttatttgttttatttattgttggtaggagttttgattggtttttatagttatattatgtttttattataggaattttaggtttggtttttttgtttatgtggtttatgattgttgtagatttaggttttttatatggatggattttgagtttttatttgtattttgttttttgtagggtttttaggttttttaggaaggttttgtttaggttgagagttatgtttgggttaagggttaggagttagggatagtaggggggtttgggtataggaaatttatttattttggtttttgtttttgttagaagttttagggagtgttt

SEQ ID NO: 2512 - DNA, 2473 bp, Artificial Sequence
  chemically treated genomic DNA (Homo sapiens)
agtaattatgttataagggtggtgggtgggttaaatgagttgagttttggtatataagtaatttagtatggagtataataaatgtttattttgtgtttgttgttattgtttttaagttttttttttggtttttattggtgtggagtattttattgttttttttttttatagatttttattttgttatttaggttggagtgtagtggtttaattatagtttattgtagttttgaatttttgggtttaagagattttttttttttagtttgttaagtatttaagattataggtatgtattattatgtttagttaagtttaaataaattttaatttatttttatgttattttatttattgtgtagatagggttttgttttgttattttgggttggagtgtagtggtaggattttggtttattatagttttaattttttaggtttaaatgatttttttgttttagttttttagtagttgagattataggtatgtattattatgttttgttaatttttgtattttttgtagggatggggttttgttatgttgtttaggttggttttatttgttttaatttaagtattttttttgttttagttttttaaaatgttgggattattgttgtgagttattatgtttggttatatatttttttttatttaaggttagaagaatttttaattttaattaattttttttggttaaatagttttttttttaattattggttaagttgaaagtagagattaaaaaatattatattattatttggttagtaaagaaatttttttttttttattattattattttttttttttttttttttgttttttttttttttttttttttttttttttttttttttattttttttttttttttttttttttttgtttgttttggtttaatgaaaggttttataggatgttgtttgtggtgttgatttgtttttttgttttgtttaaattttgtatgtaaatgaaaagataatatagttattgaatgttgaagttggggatattttttaagttaatttttgtgtttgtggtgtggttatggttttggttattatttttggttatagtgttttggagatgttgatgttgatttggattagaggtgttagtttgggtattgttagtttttatagttattgattagagttttagggtataggtagttagtaatttatttgggtgttttagggattgttattggtaaagtgatggttttatagggattaaatgtgaagttaaagtaggatatgtaggttggagataaggttaagaatagattttttttagtgtttaagtgttgtttgttagaaattgatagttttatggttttggttggtgataggtatagggtgataataatattatatgattagtattattggaggataggttgttattggtttttagagataaggaaataatgggtgatttttttgtttagggaaaggtttgtatggagtttttagggtaaagtagtaagatttaaagtgtgtttttgatttttggtattttattagtattttttttttttagtaggtttttagagtttttttttgttatttagggatttgtggtttttattgtgtatttattattttgatttttgttttttggagttaattatgttatttttagagtataggtgttagtggatgataatagataagtagttttttttttagttttttgtattatagatgttgttaagggaatggagtgggagaatagagtttttttgaggtggtttatgtaggttatggatttagtattaatagtttttttttagtattggatttttgagaaataaaaaggttgggtgtggaggggtttttatattttttagtgtttttttattttattttattggagtaaagttgttgattttatatttggggatatattttgggatgggttttattgttttggtttggttatatttttttttttattgttgtgtaatttttttttattatagttttaatagttatgaaatggggatttagtatatttaggttttagttttttttttgattttagtttgatgaatgatttagggattatagttaagttattttattttttggttttagtttttttaattgtaagttggggttatttatttgtaattattagatttgttaggtggtatgaagttttagtgagataaatatatgtgagggttgggtggtgggagatttgagatttattttttattaattaggtttattgagtatagtgtggagtattgttgggttttagtttggaggtttgttttgtttgattttttaggtggtaagattatttttttgtttttttttttttttatgtttaggttgtgattttttatgggtttattttttatatttttttgtttttttttttttatgtttgttttttaattggtttttgtttttgtttttttttttgattttttatgtatatttgtaaattttattt

SEQ ID NO: 2513 - DNA, 2473 bp, Artificial Sequence
  chemically treated genomic DNA (Homo sapiens)
gagtgaggtttgtagatatatgtaaaagattagaaaaaaaggtaagaataagaattagttgagagatagatatgagagaaagaaaataggagggtatgagaggtgagtttatgagaaattatagtttaagtatagaagaggaggggaatggggggatgattttgttatttggggagttaggtagagtagatttttaagttgagatttagtagtgttttatattgtatttagtgggtttggttagtggggggtaaattttagattttttattgtttagtttttatatatatttattttattggaattttatattatttggtagatttgatagttatagatgagtagttttaatttatagttgaagaaattgaggttagggagtgaagtgatttgattatgatttttaaattatttattaagttggggttagggaaagaattaggatttaggtgtgttgagtttttattttatggttattggggttatggtagggaaaggttgtgtagtagtgggggaagggatatagttaagttagggtagtggaatttattttaaaatatgtttttaagtgtagggttaatagttttgttttagtggggtggaatgggaagatattagaaaatgtgggagtttttttatatttaatttttttattttttaagaatttagtgttggagagaggttgttagtgttgaatttatggtttgtataaattattttgagaaagttttgtttttttattttatttttttagtagtgtttgtggtgtagggagttggggagggaattgtttgtttgttattatttattaatatttgtgttttagagataatatgattaattttagagaataggggttagaatagtgggtgtataatggaggttatgggtttttgggtgataggaaggagttttgggggtttgttgggaggagggggtgttggtgaggtgttaggggttagagatatattttagattttgttgttttgttttgggggttttatgtaggtttttttttaggtagaggggttgtttattgtttttttatttttgggagttagtgatagtttgttttttaatgatgttgattatatggtattgttattattttgtgtttgttattggttagggttgtggggttgttaatttttgataaatagtatttgagtgttaaagggaatttgtttttggttttatttttgatttgtgtattttgttttagttttatatttggtttttgtggggttattattttgttaatagtagtttttggggtatttagataagttgttagttgtttgtgttttggggttttagttaatggttgtggggattggtagtgtttaggttggtatttttggtttaggttagtattagtatttttggggtattgtggttagagataatggttagagttgtggttatattataggtatagagattagtttggggaatgtttttagttttaatatttaatagttgtgttgtttttttatttgtatatagagtttgaataagatagaaaaataagttagtattatggatagtgttttgtgaggttttttattaagttaaagtaagtagggaagaaaggaggaaaggagaaggtaagggagggaggagaaagggagggaaagggggaagaggtaaaaggaaaaggagaggaaatggtgatggtaggggagggagagtttttttgttggttaaataatggtgtggtattttttagtttttatttttagtttggttagtggttgaagaaaagattatttgattaaggaaggttaattgaaattaaaggtttttttgattttagataaagaaggatatgtggttaggtatgatggtttataatggtaattttagtattttgagaggttgaggtagaaggagtgtttgagttaaggtagatgagattagtttgggtaatatgataaaattttatttttataaaaagtataaaaattagtggggtatggtagtgtatgtttgtagttttagttattggggagttgaggtaggaggattatttgagtttgggagattgaggttgtagtgagttaagattttgttattgtattttagtttagggtgatagggtaagattttgtttatataataaataaaatagtataaaaataaattaaaatttgtttaaatttagttgggtatagtggtgtatatttgtggttttagatatttggtagattgaggaaggaggattttttgagtttagaaatttaaggttgtagtgagttatgattgagttattgtattttagtttaagtgatagaatgaaaatttgtgaaaaaaaaaagtaatgagatattttatattaatagagattaaagaaggaatttggaagtaatgatgataaatataaagtaagtatttgttgtgttttatgttaagttatttatatgttagaatttaatttatttagtttatttattatttttatgatatagttgtt

SEQ ID NO: 2514 - DNA, 2500 bp, Artificial Sequence
  chemically treated genomic DNA (Homo sapiens)
atgatagattggattaagaaaatgtggtatatatatattatggaatattatgtagttataaaaaatgatgagtttatgttttttgtagggatatggatgaaattggaaattattatttttagtaaattattgtaagaataaaaaattaaatattgtatatttttatttataggtgggaattgaataatgagaatatatggatataggaaggggaatattatattttggggattgttgtggggtgtggggaggggggagggatagtattaggagatatatttaatgttaaatgataagttaatgggtatagtatattagtatggtatatgtatatatatgtaattaatttgtatattatgtatatgtattttaaaatttaaagtataataataaaaaaaaaaatagatatgatataattataaaaaaagaaagaatagtatattagagggaaggagtagtttttattttttattttttattttttttgagatagttttgttttgttatttaggttggagtgtagtggtataattttggtttattgtaatttttgttttttaggtttaagtaattttttttttttagttttttgagtagttgggattataggtatgtattattatatttggttaatttttgtatttttagtagagatggggttttgttatattggttaggttgattttaaatttttgattttaggtgatttgtttgttttagttttttaaagtgttaggattataggtgtgagttattatatttggttagtagttttatatatttaggaaaaaagtattagatgtgatttttaagttaataataatttagaatagaaaatttaaatattgttttagtgtttggtttagttttagtttaatgttgtattttgtatttgtttattgtaagatgtgaatgttttatttaatttttttggtagatgtatttttttttatatttttttaaaaattgaaagatgatttttttattttttatttagttttgaaagggaggtatagttaatgattttgtatgtattttagaaattgatttttttagattttaatagaagttatttaagtgtatagatgtttgttggttttatatggaggttttgttggttatgaaaaaatatttttttttaattttttgtttaatttgttttaagttggtaatgaaatttgtgaatttgtgttttttttttataggaaaaatagaattttgattttttttaaaaattagaatgtaataggataatggagaaattagttttaatagtatattttttgtttgttttagagtggtgatgtaaatatgatgatgttatgtttttggggtttttgaggtttttgttaaaagtatagtagtttaggtggatttgtgtttattgtatgtttttttggtggatttttgttgataaattgtatgtttgtttttttgaaatagtattatgaagttgttaatgtttttgtataaagattattttattttgtttgttttggggataaagattttgtattaattattttgtttttttttggagtgaagagttgaagaggtaataggaaatgtttatttattgagtttttattgggtattaattgtggatatttatagaaggggtttgagtaagtatttttttattgtttaggggttagagtagagaatagaaaggaaatagtttggtttttggttttataaaataaataagaataaaatagaatattgaatatttgtgttttttttattattttaatgtatgtattttgtagattttgtatttaaatatgtagaataggttaatgaaagaaaatgttaaggttgggtatagtggtttatatttgtaattttagtattttgagagtttgaggtgggtggattataaggttaggagtttgagattagtttggttaatgtagtgaaattttgtttttattaaaaatataaaaattagttgggtatggtggtgggtgtttgtaattttagttatttgggaggttgaggtaggagaattatttgaatttgggaggtagaggttgtagtgagttgagattgtattattgtattttagtttgggtggtagagagattttattttaaaaaaaaaaaaaaagaaagaaagaaagaaagaaaatgtttttaaattttattatttagagataaaattatttatttttggagagtatttttttaaattttgtttttttttaatggtttttagttgaggataattttggttgtttgtgtatatttggtaatgtatggaaatatatttggttgttatatattaggaaggggtgtttttggtatttagtgggtagaggttgaggatgttattaagtattttatattgtaaaggatagtttttttttttattataaagaattatttagtttaaatgttagtggtgttgaggttaagaaattttgttatagatatatggatgtgtagttttgtgataattatataattaagtttatattatgttagttgtttattatttt

SEQ ID NO: 2515 - DNA, 2500 bp, Artificial Sequence
  chemically treated genomic DNA (Homo sapiens)
aggatgatgagtagttggtatagtatgaatttgattatgtaattattatagagttatatatttatatgtttatagtagggttttttggttttagtattattggtatttgagttggataattttttgtggtggagagaggggttgttttttgtagtgtgggatgtttagtggtatttttagtttttatttattaaatgttaggaatatttttttttagtgtgtgataattaaatatgtttttatatattgttaaatgtatgtaggtggttaaaattgtttttagttgagaattattggaagagagtgagatttggaagaatgttttttaaaagtgaatgattttgtttttgggtggtgagatttgagggtattttttttttttttttttttttttttttttttttttgagatggagtttttttgttatttaggttggagtgtaatggtgtaattttggtttattgtaatttttgttttttggatttaagtgatttttttgttttagttttttgagtaattgggattataggtgtttgttattatatttggttgatttttgtatttttagtagagatggggttttattatattggttaggttggttttgaatttttgattttgtgatttatttattttggatttttaaagtgttgggattataggtgtgagttattgtgtttggttttggtatttttttttattagtttgttttatatgtttgaatgtagaatttataaagtgtatatattaagatggtgaaagaaatataaatgtttaatgttttattttatttttatttattttgtggaattagaggttaagttgttttttttttgttttttattttggtttttggataatgaggagatatttatttaaattttttttgtgggtgtttatagttggtatttagtaagaatttagtaaataagtattttttgttgtttttttagttttttgttttaggagagagtaaggtgattagtgtaaagtttttgtttttagggtaaatagaatggggtggtttttatgtaaagatattaataattttatgatgttattttagaagagtagatatataatttgttgatagaaatttattaaagaagtatgtggtaggtatgaatttatttaagttgttatgtttttggtagaaattttaaagattttaaaagtatagtattattgtgtttatattattgttttgaaatgaataagaaatgtgttattgagattgatttttttattattttgttgtgttttgatttttaaaagagattaaaattttattttttttgtagaaagggaatatagatttatagattttattattaatttaaaataaattgagtaaaaaattagaggggaatgtttttttatagttagtaaggtttttatgtaaaattagtaaatatttgtgtatttgagtagtttttgttaaggtttaaggaagttagtttttggaatatgtgtgagattattgattgtgttttttttttaaaattgaataagaaatgaagaaattattttttagtttttaaaaaagtgtaaaaaaggatatatttgttaagaaagttggatggggtatttatattttataataaatagatgtagaatgtagtattgagttggaattgggttagatattggggtagtgtttggattttttgttttaagttgttattaatttaaaaattatatttagtattttttttttaagtatataaaattattggttgggtgtggtggtttatgtttataattttagtattttgggaggttgaggtgggtagattatttgaggttaggagtttgagattagtttggttaatatggtaaaattttatttttattaaaaatataaaaattagttgggtgtggtggtgtatgtttgtaattttagttatttgggaggttgaggaaggaggattgtttgaatttgggagatagaggttgtagtgagttaagattgtgttattgtattttagtttgggtgatagagtgagattgttttaaaaaaaataaaaaataaaaaataaaaattattttttttttttggtgtgttgttttttttttttttgtgattatgttatatttgtttttttttttattattatattttaagttttagggtatatgtgtataatgtgtaggttagttatatatgtatatatgtgttatgttggtgtgttgtatttattaatttgttatttagtattaggtatattttttaatgttattttttttttttttttatattttataatagtttttagagtgtgatgtttttttttttgtgtttatgtgtttttattgtttaatttttatttatgagtgagaatatgtagtgtttggttttttgtttttgtgatagtttattgagaataatgatttttaattttatttatgtttttataaaggatataaatttattattttttatggttgtatagtattttatgatgtatatgtgttatatttttttaatttagtttattat

SEQ ID NO: 2516 - DNA, 2333 bp, Artificial Sequence
  chemically treated genomic DNA (Homo sapiens)
tttgtaattttagtatagtgggaggttgaggtgggaggattatttgaggttaggagtttgagattattttggttaaaatggtgaaattttatttttattaaaaatataaaaattagttgggtatggtggtgggtatttgtagttttagttatttaggaggttgaggtatgagaattatttgaatttaggaggtagaggttgtagtgatttaagatggtgttattgtattttagtttgggtaatagagtgagattgtgttttaaaaataaaaattaaaattagaatgtaggatatttaatatttattgttttagttttgttggggaggggtataataagaaaaattttatttggtattttgaaataaattagtattggggtgagtttagtggggtagttgatggttgagttaggttggtgtgatggaaggagttgtgagggttttgtagtttggagtatttttggtttttttagtagttattataagatggagtaggtagggttgtagttggatagtttagttaggaaatgttagttatgaatgagtgttttatggttgttttgggaatgtgtgttaggattggaattttgtagttgaggatttgaaatgttttgattaggtggttaaagagtatgattttaggttgggtgtggtggtttatatttgtaattttagtattttgggaggttgaagtgggtggattatttgaggttaagagtttgagattagtttggttaatatggtgaaattttgtttttattaaaaatataaaaattagttaggtatggtggtgtatgtttgtagttttagttatatgggaggttgatgtaggagaatggtttgaatttaggagatggaggttgtagtgagttaagattgtgttattgtattttagtttggatgataagagtaaaatttttttttaaaaaaaaaaaataaaataaaattgtgattttataataaggttatgttgttagggattatgtattgatgtttttagggagaaatgagaaggaatatagtaattgaataagatgatgtttgtttatgatatttatgatgttttttaaggtttgagatatattgttttttgtttaattagttattgtgattatatttttatggagattattatgtttgtatttataatagatatgtgtgtatttattaaaggaatatagttgttaaatgtatgttttgggtttagggtggagtggttttttatagtatagttattggagttgttgtaaaaagtgttagaaaataagtaaggagttgtttttatttatgaagagaggttttttttggtattaggttttgggtttaggggagtgtgaaatttaggaaggtggggtgtatatgtttatgataaaagttttaaaggtgtagatttattttttttttttttttttttaaatgtgtgttaaagatttttaagtttattaattaatgaagggattagtaagatgttaaaaattggtttaggagagaatgtagagaatagatattaatataggtaattaggaatgttttggttaagagatataaaattggttttttttaagagtagtaaggagaatggggagaagatttagttttttattaaaaaaatttgagagttaataagtgtttagtagagtgagtggtgtttggatggaggggtggataggttggatgggatttaagtgagattgtgttatttagatttgggtagtgttttagggatgtttagtagaggggtaggaggttgtgggggatgttgttgtttgggttttgttttttttgtgttaagtatttttagttttttgtataggttttaaatgtggtaaatgtatggtagattttggggtatgaggggatgagaggggattttttagaagagtagagtgggaatagattatgaaagtttgggattgtagattttagttttgttatgggataagaaattagttttttttagatattatttggtatttgtttttgttttagaattgagagtagtaaagggtttttgtgtttgttttgtttttggttttttttttttttttttagagatagggttatgttttgttttttaggttggattgtagtggtataattgtagttgattgtaattttaaatttatttttgggtttaagtaatttttttattttggttatttgttaatttttatttttgttttttggtagagatagggttttgttatgttgtttaggttggttttaaatttttgtttttagtgatttttttgagttggttttttaagatgttggattataggtgtgagttattgtatttggttttttttttgttgttttgtttaatgggattt

SEQ ID NO: 2517 - DNA, 2333 bp, Artificial Sequence
  chemically treated genomic DNA (Homo sapiens)
aaattttattggataaggtagtaaggagaaggttaggtgtagtggtttatgtttgtaatttaatattttggggggttaatttaggaggattattagagataggagtttaagattagtttgggtaatatagtaagattttgtttttattaaaaaataaaaataaaaattagtaggtgattggagtgggaagattatttgagtttagaagtgagtttgagattatagttagttataattgtgttattgtaatttagtttgggagatagagtgtgattttgtttttagaaaaagaaaaaagaagttaggagtaggataaatatagaagttttttgttgtttttagttttgaggtagaaatgagtgttgaatggtatttgagagggattggttttttgttttatggtagagttagggtttgtaattttaagtttttatggtttgtttttattttatttttttggaaggtttttttttatttttttatgttttaaggtttgttatgtatttattatatttggggtttgtgtagggagttggggatgtttagtataaaaaggataaggtttagatagtggtattttttatagttttttgtttttttgttaagtatttttggagtattgtttaggtttgggtagtatagttttgtttgagttttatttggtttgtttatttttttgtttaagtattatttattttattgagtatttgttggtttttaaatttttttaatgaaagattaaattttttttttattttttttattgtttttggaagaaattaattttgtgttttttgattaaaatatttttaattatttatattaatgtttgttttttgtatttttttttgagttagtttttaatattttattggtttttttattaattaatgagtttaaaaatttttggtatatatttgaaaaaaaaaaaaaagagagtgaatttatgtttttggaatttttgttatgagtgtgtgtattttgtttttttgggttttatatttttttagatttagggtttgatattagagagagtttttttttatgaataaggatagttttttgtttgttttttgatattttttgtagtagttttgatgattgtgttgtaaaaagttattttattttgggtttagagtgtatgtttggtaattgtgtttttttaatggatgtatatgtgtttattgtgagtataaatataatggtttttatggagatatggttataatgattaattagataaaagatagtgtattttaagttttgaaagatattatggatgttataaatgaatattgttttatttggttgttgtatttttttttatttttttttagaaatgttaatatgtggtttttagtaatatgattttattatgaagttatagttttgttttgttttttttttttgagaaggagttttgtttttgttatttaggttggagtgtaatggtataattttggtttattgtaatttttgttttttgggtttaagttatttttttgtattagttttttatgtagttgggattataggtgtgtattattgtgtttggttaatttttgtatttttagtagagatggggttttattatgttggttaggttggttttaaatttttgattttaggtgatttatttgttttagttttttaaagtgttggaattatagatgtgagttattatgtttggtttgaagttatattttttagttatttggttagaatattttagatttttaattgtaggattttaattttggtatatatttttaaggtagttatggggtatttatttatggttggtattttttgattgggttgtttaattatagttttgtttgttttgttttatgatggttgttaaggggattagggatgttttaagttatggggtttttatagttttttttattgtattagtttgatttagttattagttgttttattgggtttattttaatattgatttgttttaggatgttagatgggattttttttattgtgtttttttttaataaggttggggtaatgagtattaaatattttgtgttttggttttggtttttgtttttgagatgtagttttattttgttgtttaggttagagtgtagtggtattattttgaattattgtaatttttgttttttgggtttaagtgatttttatgttttagttttttgagtagttgggattataggtgtttattattatgtttagttaatttttgtatttttaatagagatggggttttattgttttggttaggatggttttaaatttttgattttaagtgatttttttgttttagttttttattgtgttgggattatagg

SEQ ID NO: 2518 - DNA, 2492 bp, Artificial Sequence
  chemically treated genomic DNA (Homo sapiens)
agaggtattttggttgtgggagaaaagtaggttaattttggtatgattgtttttttttgggatagtgagataagttttttaggattagttggggagttttagagaagtttggtattggtaatgttttgagagtttatttttggagttaagggatttaggttttttattgtgtatgtttattttttgggtaaggtattggatggtaggattttaagtagaggtaggaaagggtaatttttagttttttgtagaaggtttgattgtgggggtagttagttgggattgtttagttttgaagtagagattgagaattttgtttgtttgtgtgattattatttatgtttattttttttttgagttttagtttttttattggtaaaatgggaagagaatggattagagagtattttttttttatttttaaattatagagtttttttttttttttttaagataggttttgttgtattatttaggttggagtgtagtggtgtgattatagtttattgtagttttgattttttggatttaggtgatttttttgttttagtttttttagtaattgggattataggtataggttattatgtttggttaattttgtatttttattttttggtagtaatagagtttttttgtgttgtgtaggttggttttaaatttttggttttaagtgatttttttgtttgtttttaagtgatttttttgttttgggattataggtgtgagttgttatgtttagtttatagataatatgtattgagtgtttattatatgttaagtattgggttaagtttgttgtatgtagtattttgtttatattttataataattaagggggtaggtatttgtttgttttatagatgaggaaattaaggtttttagtagtaaagtaaattttttaagtttatttagtatgggaatgatagatataggtttgtaatttaggttttgttgatattgaaatttgggatgttagtaattttattttgttgtttgttagttttgttaggttttttaggatggtttttattttgagttatatttttaggaatattttgttattttttattttttttttgggtttatattatgaaagttttatgtagagtttgttattttagagggatatatattatttaaatttgataagataatttaattttattttgtgtttgttattggtgataaaattaggagatttttatgatttagtatttttagtaagattgttaggaatttattatataaggtttaattggatttttttttgtagatggttgggagttatgggttggaatgtaatttggtaatatatttggggaaataaatgtaaaatgtttgttttagagatttagataaggtagtaggtttttaagttttttaagaattggatttgttttttttgggttttgaagggtgatttggggaggatttatgttgttggaggaggagggaatggtgggttttttttttttttattttttgattttttttgttttagggaaggaatgtgagtgtatttgagatttggagtttagtaattgtaattttttgagaggtagtaatttagagtagatttgggggtgggaggataggatggtgggtagtggtgagattaaggttatgaggattgtgtgtattgaaagaggggtgtaggatgattaaaatgatggggaattgggtttttattagttgtttgggatttgttatagagttattttttattgttttgagaggtttgtgttttttttaaatatatttttaggattggtgtggtttttataaattgggtttttaaatagattttattttttggatgtgagtttatatttagatttagatgatttttgtatataagtttatagatattttaagattttgaggtttattgtgagggtgttttaaatttatggtttattttaaattttgattttttgtaggtgtgggtttatagatgggtttgtggtttattttagtttttatagtatttatgtgatttttgttattggaaggaatggtaataattatatttatttttgtatttatttaatagatttgttgaattttgaggttggagttttataagagttagttttaaatttagggtttattttttagtgtagatattttttaaatttttgtttatatatagatttggtataattttagatttagttagttgtttaagttagattttagttttttagttattagtagtatttgagagttatttttttaataagtttatattaagttttgaggatttggtatttttagttttaggttttggtttttgtgtagggaagttgttgtaatattattgatttgggaagtttgaggtttgtttttgtgtatttgttttgtgattttaagttttttttatggggttaggaaggtggtggagatatttttatttgtttttgggttttttgatgttttaatggattttagtattagaagttttttttttttttgagttggagttttgt

SEQ ID NO: 2519 - DNA, 2492 bp, Artificial Sequence
  chemically treated genomic DNA (Homo sapiens)
gtgagattttgatttaaaaaaaaaaagggtttttggtattggagtttattgaagtattggggagtttagggatagataaaaatgtttttgttgtttttttggttttgtagaaagagtttagagttatagggtaggtgtgtaagggtagattttaaattttttagattagtggtgttgtagtagtttttttgtataaggattggagtttgggattggaggtgttagatttttaaggtttggtatgagtttgttgagggggtaatttttagatgttgttggtagttagagggttggagtttagtttgggtagttaattgaatttggggttatgttagatttgtgtgtgagtagaggtttgggggatgtttgtattagagaatgaattttgaatttggggttggtttttgtaaagttttaattttaagatttggtagatttattaggtgggtgtaaaagtgaatgtggttgttgttattttttttaatggtaaaaattgtatggatgttgtgaaagttgagatggattgtaagtttgtttatgagtttatgtttgtgagagattagaatttgaggtaagttatgaatttggagtgtttttatagtgaattttaaaattttggagtatttgtgagtttatgtatgggggttatttgaatttggatgtgaatttatatttaaggaatggggtttgtttgggaatttagtttatgggggttatattagttttagaggtgtgtttgggaaggatgtgggttttttagggtagtaaggagtgattttatggtagattttgagtagttagtgaagatttagttttttattgttttgattattttgtattttttttttaatgtatatagtttttataattttggttttattattgtttattattttgtttttttatttttaggtttattttgaattgttattttttagggaattatagttgttgaattttaagttttaggtgtgtttatattttttttttggggtaagaagagttaagggatgaggggagaaagagtttgttattttttttttttttgatagtgtaaattttttttaaattgttttttagggtttaggaaaagtagatttgatttttggggagtttggaggtttgttgttttatttaagtttttggaataagtattttgtatttatttttttaaatgtgttgttgaattgtgttttagtttatggtttttagttatttgtagagagaaatttagttagattttgtataataagtttttgataattttgttgaggatgttgggttataaaagttttttggttttattgttggtaatagatatggagtgaaattgagttgttttattaaatttagataatatatatttttttagagtagtaggttttgtatggggtttttatggtatgagtttaggagggggatagggagtggtagagtgtttttggggatgtggtttagggtgggggttgttttggaaagtttggtaggattgataggtagtagggtagggttattagtattttaggttttgatgttaataagatttggattataaatttgtgtttattatttttatgttgagtgaatttggaaaatttattttattgttgagggttttggtttttttatttgtaaagtaggtagatgtttgtttttttgattattgtgaaatgtaaataagatgttatatgtaataggtttagtttagtgtttggtatgtagtgagtatttaatatatgttgtttgtggattggatatggtagtttatatttgtaattttaaggtaggaggattgtttgagggtaggtaggaggattgtttgaggttaggagtttgagattagtttgtataatatagggagattttgttattattaaaaaataaaaatataaaattagttaggtatggtggtttgtgtttatagttttagttattagggaggttaaggtaggaggattatttgagtttaggaggttaaggttgtagtgagttatgattatattattgtattttagtttgggtgatatagtaagatttgttttaaaaaaaaaaaaaaaaattttgtaatttgggaatgggagaaaaatattttttggtttattttttttttattttattggtggagaaattgaagtttagagagggagtggatatggatggtggttatataggtaggtggggtttttagtttttgttttagggttgagtaattttaattgattgtttttgtaattaggttttttgtaagaggttggaagttgtttttttttgtttttgtttaaagttttgttatttagtgttttgtttaggaaatggatatatatggtaggaagtttgggttttttggttttaggaatggatttttaggatattgttagtgttgggtttttttagggttttttagttggttttgggaagtttgttttattgttttaggaggggatgattgtattagaattgatttattttttttttatagttaagatgttttt

SEQ ID NO: 2520 - DNA, 2301 bp, Artificial Sequence
  chemically treated genomic DNA (Homo sapiens)
gatagtttttagtagattttgatgttggtttgagagtttttggagtaggtggtttataagttgtggaatagagattaagtatggtatattaattgtgtgtttagttttgagttaattgttatatgtttttatagtgatttaataaggtatgtgtgaagggtttatttttatatataattagtgtgagtttttattgtttttattttaggtaattgttatattatttttttgagatgggttttagtttttttagttattaatgaataaagaaaagtgttaagaagagaggtggtttgttgagaattatatggttaggggttaattttaaagtagtgagtttttgttttagtatattttgtttttattttttgatttagttttgtagttgaatggtgttttttaatttttttaattttagtttttttatttgtgaaatggaggagttggattattgggttgggagtttttgatattatgtgtgattttgtatgatttttttttttttttgtattttagtttttttatttgtaaaagaagttgttagtattttattttaatgttatttataaatgttgttttaaaataaaatttttggtgagggaaggttttaagtttagttttttggaaataggttttgagttagagttttgtttgtgggaggtttattgggggagagtttttaggaatattgtggtaggggtgagggaagtaggattatgtggagggagaagttgaattgtgaagtttttttagtaggggttttagttgtttttatagggaattttggagttgggatgttttaaattgagtaaggggttaggtttttgaatttatgtatttattagatattggatatgggtttttgtttttttatttgtttaaaggtatgatgtggggtgaggtagttgattttggttgagggttgttagtagttatagggttaaaattgttttgggtggtatgatttattatataaaatttgttaaaaatttgggttgattttagttttggaaataatagtaggtaagatgtggtttgagtttgggtttatttagttgggtttggttttgttttgagggtttgttgtttgttgtgattatagtaggattagtgttttagattttgtttaaagtttggtggttattgtttgttttgtagtttattttttgtagttttttgaggttttagtgattatgttattgaaaattttgtttttattttgttaattttgtagtaaattataggtttggggaggtgtgggttttttttttaaataagatttaattttatttagttgtttttatttttattttatatatgggtttttttttttttattattttgggtttgggatttatggtttttttttgtaggtagttggtaattatggtaagttttttagggaggttttaggttggagtttttttagttttagattttagtatggttggttgtttttttttaggatgggagaggggagaggttagagatggtaggaatgggttttaggggttaaggttgagaggttatagtaattttagtaattatgagaattttaatattattatatttgatttttataataattattattttttttattatatagatgggtaaattggggttagggagtatgaggttattgttaaggttataattaaggaagtagttgattttggggttgaggtgtttaagtattttggtatattttttttttttttagttgttgtttttggatgtttaaattttttttagattttagtttttgtttatatttttttagtgatggggaaattatttttttttggtaggtttgttatttttttaatgattagatatagttgttaaataattgattaggttttgtgattttttagaagggttattttgatattgattgttttttgtgatttggttgttaatttttttttgtaaattgattttttatggtttgttattatagtaggttgtttggggtttttttgttgtttagtgttttgttttgttttaggttttttttatttatttttattttgttttaattattagttttgtttttatttttattatagaatattaaagttggaaatttatgattttttatttttttgatggagagaggtttagagaggggatgtatttttttagtgtatagggtgaattgatagtgtgggttttaaattttttgttaataaaataataaatagtattgagtatagttaatttttgttaagtgtttgataattattattttaagtatttatgaatgtaatttatttattttttatataattttatgag

SEQ ID NO: 2521 - DNA, 2301 bp, Artificial Sequence
  chemically treated genomic DNA (Homo sapiens)
tttatagggttatgtgagaagtaaatggattatatttgtgaatgtttagaatggtggttattaagtatttgataaaagttagttatgtttagtattatttattattttattggtggaagatttgggatttatattgttaatttattttgtgtattagagaagtgtattttttttttgggtttttttttattaggaaaatgaggagttatggatttttagttttgatattttgtgataggaatggagatagggttggtaattggagtaggatgggaatgaataagaaagatttggggtagagtgggatattgagtagtaaggagattttaggtagtttgttgtggtggtaaattatgaaagattagtttgtagaagagagttagtagttagattatagagggtagttagtgttaaaataatttttttgaggggttatagggtttgattaattatttggtaattatgtttaattgttagagagataataggtttgttagagaggagtgatttttttattattaggggaatgtaagtaggggttgagatttaagagagatttgaatatttaaaagtagtagttggggaaagaaggagtatgttagagtgtttaaatattttagttttagagttaattgtttttttggttgtgattttggtagtgattttatgttttttggttttagtttgtttatttatataatgggggaaatgatggttattgtgagggttagatgtggtagtgttgaagtttttatgattgttggggttattatgattttttggttttggtttttgaagtttatttttgttatttttggtttttttttttttttattttaggagaaagtggttggttgtgttggagtttggggttaaggaggttttagtttgaagtttttttaaggagtttgttatggttattagttgtttgtaaagagaggttataaattttgagtttggggtggtgggagggagggaatttgtgtgtggggtgggaatgggggtagttaagtggaattgaattttgtttaaggaggaggtttatgtttttttaggtttgtaatttattgtgaggttgataagatgaaagtggaatttttagtggtataattgttgggattttggggagttgtgggagatgagttgtgaggtaggtggtggttgttaggttttaagtaagatttggggtattgattttgttgtgattatagtaagtgatagatttttggagtggggttaggtttagttggataagtttaggtttaggttatgttttgtttgttattgtttttagggttgaggttggtttgagtttttagtaggttttatgtgatggattatattatttaggatggttttgattttgtagttgttgatagtttttagttaaagttagttgttttattttatgttatgtttttaggtgggtgaggggatagaaatttatgtttaatatttggtagatatatggatttaaaggtttggttttttgtttgatttggagtattttagttttagagttttttgtgggagtagttgaggtttttgttgagagagttttatagtttaatttttttttttatgtggttttgttttttttatttttgttatggtgtttttgagaatttttttttagtgaattttttgtaggtaaagttttggtttaaggtttgtttttagggagttggatttagggtttttttttattaggagttttgttttaaagtagtgtttataagtagtattggagtaggatattggtaattttttttatagatggaaagattgaggtgtaggaagggaagaaaattatgtaaggttatatatggtgttaggggtttttagtttaatagtttaatttttttattttatagatggaaagattgaggttgggagagttgggagatgttatttagttgtagagttgagttagggaatggaagtagagtatgttggggtggaagtttattgttttggagttggtttttagttatgtggtttttagtaagttatttttttttttgatatttttttttgtttattggtaattggagagattaaagtttattttaggaggatggtgtgataattgtttaaaataagagtaataagagtttatattggttgtgtgtgggaatgagttttttatatatattttgttgaattattgtgaaaatatgtagtagttggtttggggttgggtatatagttagtgtattatgtttgatttttgttttataatttgtggattatttgttttagaggtttttaggttaatattagaatttgttagaagttatt

SEQ ID NO: 2522 - DNA, 2351 bp, Artificial Sequence
  chemically treated genomic DNA (Homo sapiens)
tataaaatgttttagggagttattgaatttttttaaggggtagtagataaagtataattttggagtagggagatttgttgtgttagtttaggagatgttggttgttgtaatagggaaattttgatattttagggatttggtttaataaagtgtattttttgtttatagaaagtttatttggtggtagggttgagggtgggtgggggttttttgttttataaagttatttaggtatttaggttgatagagattttatgtttttaatatgtggtttttaaggtttttttggattttataagttagatgtgataggatagagtatgaagggttggtgtggggtatttttgggagtggtgtatattattttttttgatttattggttggaatttagttttatagttatgtaattttaaggagagtgggaaattttgtgtttaggaagaagaggaaatggatttggagagttatattagtttttgttatatttggttttgaatttagattttgttatatattatttgtgggattttagtttttttaatatgtttgagttttagtttttttattaaagggtaaatggtgataattttttaggaggtatgatgttgggagggttttttgagttttttttttaatatttttatgtagttgtggtttttatttgtagagttttagtttttatgtataattgtttatatatttgttaatttttttggtaataattttttttttggagggtaaattttattagaataggggttatattgtttttaattagagttgtagttttaataattggtttggtgtttagtatttagtaggtatttaataaatatatgttggggaaatgaatggatggataagttaatatgaatatatatgtgttaagatttatttttttaaaaatttttttttaataaatatttgtatttttatgttttattatggtgtggtgagggggagggaggggggaagaagatgaggaggaggaggggtattttttttttatttttattggagtttaaattataaatagttttagttggaatttgattgtagatttttttagtaaagttagtatttttaggattttttattttggatggggattgggagtgtttttttattaattatagttttttaattaatagttttgagtttggaataaaaggtgtttattgggagaatgttagtgggttttgaattttggttgtttgtttttatttggaggatttggtgttttggggagtaggtatggtatggtttagtgttgagtttggtaggggatggggtttggagggtgagtagttggtaggttggttgtttgtttttattttggatatttttatatagagttgatttgattttgagtaggttgttggtagttttgttttttttaggttgatgttgatgttattggtttggggtggggttggatagtgaagttgttatgttttttaggtggttttaatgtgtatagtttgaaaaatattgttttagggatggtaggtttggtagaaggtattgagatgggtttaaaggtttaattgagtgatttagagatggatatttatttaaggtatgtttaatgtttaggtagattaaaggtttattttttttttttttttttgttggtggatgtagtaggaatggaatttgttttttttttttttattatgttttttggagatgattagaggagagttagattatagaagtaggattttagttaggggttgggtgggaggtttggaaggtaggaggaagtatatatagtttggtattggaagtagtggttttagggtttttgttgagttttaggtgtaatattaagttgatgtaaaagttgttgtggttttttttattgtttttaatgataaaaattgtaatttgataaaaggttaatatttagaatttataatgaatttaaataaatttataagaaaaaaataaataattttattaaaaagtgggtaaaggatatgaatagatattttttaaaagaagatatttatgtagttaaaaaatatatgaaaaaatgtttattattattggttattagagaaatgtaaattaaaattataatgagatattattttataatagttagaatggtaattattaaaaagttaggaaataataggtgttggagaggatgtggagaaataggaatatttttatattgttggtgggattgtaaattagtttaattattgtggaagttagtgtggtgattttttagggatttagaattggaaatattatttgatttagttattttattattgggtatatatttaaaggattatgaattatgttgttataaagatatatgtatatgtatgtttat

SEQ ID NO: 2523 - DNA, 2351 bp, Artificial Sequence
  chemically treated genomic DNA (Homo sapiens)
ataaatatatgtgtgtatgtgtttttatagtagtatgatttatagttttttgggtatatatttagtaatgggatggttgggttaaatggtatttttagttttagatttttgaggaattgttatattgatttttataatggttgaattagtttatggttttattaatagtgtaaaagtgtttttatttttttatattttttttagtatttgttgttttttgattttttaatgattgttattttaattgttgtgagatggtattttattgtggttttgatttgtatttttttgatggttagtgatggtgagtatttttttatgtgttttttggttgtataaatgtttttttttgagaagtgtttgtttatgttttttgtttattttttgatggggttgtttgttttttttttgtaaatttgtttgagtttattgtagattttggatattagttttttgttagattgtggtttttattattgaaagtaataggaaaaattataatgatttttgtattaatttgatattatatttggggtttagtaggagttttagggttattgtttttagtgttaagttgtgtgtgtttttttttgttttttaagttttttatttagtttttggttgaagttttgtttttgtggtttggtttttttttgattatttttaggaggtatgatgggagaaggaaaggtaggttttatttttgttgtatttgttaatggggagaagaggagggagtgggtttttgatttgtttgggtattaggtatgttttgggtaagtgtttatttttgggttatttagttaggtttttggatttattttagtgttttttgttaagtttgttatttttggagtagtgttttttaaattgtgtatattagagttatttggggaatgtgataattttattgtttagttttattttagattaatgatattagtattagtttgaggaggatagagttgttagtaatttgtttgaagttgagttagttttgtgtggagatgtttaaggtggagataggtagttggtttgttagttgtttgttttttaaattttattttttgttaggtttagtattgagttatgttatgtttgttttttaaggtgttaggttttttaaataaaaataggtggttagagtttagggtttgttggtgtttttttggtaagtattttttgttttaggtttagagttgttaattaaagagttgtgattaatgaggaagtatttttggtttttatttaggatgagaggttttggggatgttgattttgttggaggaatttgtagttagattttaattggagttatttatagtttgagttttagtaggggtgggagaaaggtgtttttttttttttttgtttttttttttttttttttttttttattatattatgatggaatatagaggtgtgaatatttattgaggaagaatttttaaaggagtaaattttagtatatatgtgtttatattaatttatttgtttatttatttttttgatatgtatttattgaatgtttattaagtgttgggtgttaggttagttgttagggttgtagttttgattgagagtagtgtggtttttattttggtggagtttgttttttaggagaggagttattattaaggaagttgataagtatgtggataattgtatatagaggttggagttttgtaggtaagaattatgattgtatgggagtgttggagaaaaaatttaagaaatttttttaatattatattttttaggagattattattatttgttttttaatgaggaaattgaggtttagatatgttaaggaagttaaggttttataaatagtgtgtggtaaggtttagatttaaaattaagtgtggtagagattgatgtggttttttaaatttatttttttttttttttaggtataaaattttttattttttttgagattatatagttatgaggttgagttttagttagtgaattaagaggaataatgtgtattatttttaagggtgttttgtattagttttttatgttttgttttgttgtatttagtttatgaaatttagagggattttggaagttatatgttgaaggtatagagtttttgttagtttggatgtttgaatggttttgtggaatagaaaatttttatttatttttaattttgttattaagtagattttttgtaagtaagaaatatgttttgttgaattgagtttttgggatgttagagtttttttgttatagtagttagtgttttttaaattaatatagtagatttttttgttttaaggttatgttttatttattgttttttaggaagatttaatgattttttaaaatattttata

SEQ ID NO: 2524 - DNA, 2440 bp, Artificial Sequence
  chemically treated genomic DNA (Homo sapiens)
attgtataaatgttattgtgtttattgtatgttagatattttttgagtattggaaatatgttagtgaaggaggtggataggagtatgtgtttagttaggatgatagataatagaggaattattaattttaatggtgataaatgtattttatatattggatttttatgtaatatttaattagaagataaagtttttttattgaaaaataattagtaggtttttaggttagtatattttgtgggttatgaagttagtagttaagagtggtatttggaattttgtttttgtggtttatttagggtgggagagtgtttgtgaggtttagttattttgttagaatggaagttttattatttgttgatgagtgttagatagtgtgttagtttattttaaagttgttaaaatatgtatttatttgggtttgttttgataaatagataagaatttgtgttttttgtgagtttattagaatttagttattataattatttgttatatgttttttaattttatgggtaattttagggaggtggttgatttagatgaaagaaggttttttagtaattgtttagggtatttggaagaatatttaagttttttattatgatttatgggtttgtgttgattttggttttttttttttgtttatttttattttgttttatggttttttatgttgtagatgttaattttaggttttatttgaattatttttagttgtaaattaggaaggtattaattggtgtatgttttgtaagtgttgttagaattagagttattgggttggttgataggagtttagagggtagtttttttttttttttgagtttgtttttttagttattttttttaaaagttgttgggttgatgtttgtattttggttggttttgatgttagttttgatggggttattttggaatttgtttgtataggttgttgagggtgtgagaatttaagtagataatttttagttttattttttttgttgtgttaggttgttagtgttagttgaggaggtttttttttgtttttgtttgttttttttgattgttatgtaatgtttggtagtaggaggtaaatttttttttaatttttaggtttgttatagtgtatgaattttattgtggggagttatagtgattgagtttagtagttaggttttatgttgagtgttataaattaggtttattattagttttttttggtagatgttatagttaagaatttgtttattgtttgtgagatttagttgtttttgtatattgttaaattagggttgatagatttattggggatttaggggatttttatgatattttggttgggtgttgttaggaattttattttgagagagtaggaggtgatatagtttttggtaaggtattttagatttgagattttatagtttgatgtatggggagtagaattagggtatgattatttgtaggttatttggattttttggtatggtggttttttgtgtgtttggttgtatatgtaagaatttttaggggatttgttaaaaaatatatattttttaggtttatttttagagattttgatttggtaagtgttttttgggatatggaaattagtattttttattagattttaggtgattttgatgtaggtggtttttggattattttttgagaaatgttgttttgggattagttgtatttttgaagtgatgtttgtaaaatgaatgtttataaattgtgggttttttttttttatttttttttattatttggttgaagatgtgtttgtttggggaagaagatgtgggttttaagaattaatggtaattaaattgaagaataagataaatttttgattatgatatatttaaagggtaataataatgttaatagtaaggggaaaagttttgtagtaggatgttttgttgatatttaatgtgttatagggggagttttatttttgttttttattggttttgtttgtatgattaaggttgttatatgttttggttattttgggttagtttaagtttatgtaggttgttttagtgtaatttttaatagttttttttttgatttttgaaagttttagtttggatgatagttgttattttgttaataatttataggattgttttttttaagatttttattttttttttaaagggatttgttttatagttgtttttgaaggattttgttagattgattttagtagtggattttatattaaagtttattttgattttgggttgggatgaatggtaaaaggaattttttgattaggtaatttttttattttttttaggaaattttggtggggaaaaggaaggttttatgatttgaatagaagaaatagaatttggtggttagggaaagttttttttgggggtttattttttttgtgatttgaatagaagaaatagaatttggtggttagggaaaattttttttgggg

SEQ ID NO: 2525 - DNA, 2440 bp, Artificial Sequence
  chemically treated genomic DNA (Homo sapiens)
ttttagggaaggttttttttggttattaaattttgttttttttgtttaggttataggaagggtggatttttagggaaggttttttttggttattaaattttgttttttttgtttaggttataggattttttttttttttattgggattttttggaaagagtagggggattatttggttaaagagttttttttattatttattttagtttagagttagggtgaattttagtgtgaaatttattattgggattagtttgataaaattttttagagataattatagggtagatttttttggaagaaaagtggaggttttaagggaagtaattttatgggttattgatagagtaataattgttatttagattgggatttttgagagttgaagggggaattattagaagttgtattgggataatttgtataaatttggattgatttaggataattaggatatatgataattttggttatatagatagagttaatgagaaataaggatagagttttttttgtagtatgttaagtattagtaaaatattttattatgggatttttttttttgttattagtattattattgttttttaaatatgttatagttaaagatttgttttattttttagtttgattgttattgatttttgaagtttatatttttttttttaggtaaatatatttttagttaaatgatagaaggaaatggaaaaaaaagatttataatttataggtatttattttataggtattattttagggatatagttggttttaaagtagtattttttaaagggtggtttaggaattatttgtattagaattatttgggatttagtaaaaaatgttaatttttatgttttaaggaatatttattaaattagaatttttggggatggatttgggagatgtatattttttaataagttttttagaggtttttatgtgtatagttaggtatataagaggttattatattaggaaatttaggtagtttgtaggtgattatgttttgattttgttttttgtatattaggttgtgagattttaggtttgagatgttttgttaagggttgtgttattttttgtttttttagaataagatttttggtaatatttagttagagtgttatgaagattttttaaatttttggtggatttgttagttttggtttaatagtatgtagaggtggttgggttttgtaagtagtgggtaggtttttggttatggtatttgttaggagaagttggtaataggtttgatttatgatatttagtatgggatttggttgttgagtttaattattgtggttttttatggtggggtttatgtgttgtaatgggtttggaaattggagaggaatttattttttgttgttgaatattatataataattaagggaaataagtagaggtaggagggggtttttttagttggtattggtagtttggtatagtaaaggaggtaggattgggagttgtttgtttgggtttttatgtttttgatagtttgtgtaagtaggttttagggtggttttgttagagttggtattagagttagttaagatataagtattagtttagtaatttttagaagggatggttggggagataggtttagaggaggaaaagggttgttttttaaatttttgttagttagtttagtagttttaattttaatagtatttatagaatatgtattaattaatatttttttgatttgtaattgggaataatttaaataggatttgagattgatatttgtaatatgagaggttatggaataaaatgaagatgggtagggagaagagattgagattagtataggtttataggttatggtggggagtttggatatttttttaagtgttttggatagttgttgaaggatttttttttatttagattagttatttttttagaattgtttatagggttaaggaatatgtgatagatgattatgataattgagttttgatggatttgtaaggaatataagtttttatttatttattaaagtagatttaggtaggtgtatattttggtaattttgagatgaattgatgtattgtttaatatttattagtgggtgatgaaatttttattttgataaggtggttgggttttatagatatttttttattttaaatgaattataaagataagattttaagtattatttttagttgttgattttatgatttataaaatgtgttggtttagaaatttattaattattttttagtaaaagaattttattttttgattaaatattatatagaggtttaatgtatgaaatgtatttattattattgaaattaatgatttttttgttgtttgttattttgattagatgtatatttttgtttgttttttttattagtgtatttttagtatttaaagagtatttggtatgtagtggatatagtagtatttgtgtaat

SEQ ID NO: 2526 - DNA, 2476 bp, Artificial Sequence
  chemically treated genomic DNA (Homo sapiens)
ttaatttaaatttttattaagatggaaaatattattgttattttaatgtgtttttttatgtttttttttagtgaaattttaattttattgattttagaggtaattattgttttgatgttttttaatattgatttgtttttttttttttaaaattgtatataaatggaattatagaatatgtattttttttttgtaaaattttttttatttaatatagtatttttgagatttttttaagttttagtatatattaatagattattttttttattgttgagtagtgttttattgtatggatatattatagtttgtttatttgtttttttgttgatgtatttttaggttattttttatttttggttattatagataaagagattatgagtattttgtgatattttgttatatttatttattttgttttttggttattatgaataaagaggttatgagtattatattatatattagtatatttttttattttatgtaaatatttaggagtggaatgtgggttatagggtaggtataaatttatttttataaaaagttgttggatttttttttaatataggtgtagaaagagtttgttttttttagtaatattaattagatagtatgtgaatttggtataaagtaagtgtttaataaatatttgttaaattaatatatagagaaaataaatagaaatatagtgattgttttaatttttttttattgtttattagtgaagtgtgattgtttatgaattatttaagttttatgagtttttaatatttttttatgtgggaataataaaatgtgttttagatgtttgaaaaggttagtgttgaagggttaggggtatggggggagattttaggaggtgagggatattatttatttaatataagtgtgtttttttttttttttttgatttttttagtttgtaagattttggtttgtagttgttagggaatatgttaaagtttaggtttaggaggggttagggtaggtgaaaggggaagaggtatttggattaattattggttgtttttaaatgtttaaagttggtatttatatatttgattttttttatagttttttttttttagatttaatgtttaggtttttttgattttaaaattgggttatttgaatgttaaatttttgataattttttaatagaggtgtttattaatttgtgttaaattagagtttagtgtttttggaaatatatgtgatatttatatgaatattaaatgtttttattaggtatagtatttatatgatgaatattaaatgtagagtttaatgtagggatatagattttgttttgaggatttgttaatatatttttgtgtttttttagtggtattggttagttttgtttgttgtttatttttaggtgatgagatgtggtaattgtggtattggttgaaataaataaatggtattttaattattaagtttagagatggagtagtaaaggaggttatagttgattatttaggagttagtaaaaggatgtttatttagtatgtaagatgatttttaaatattttataaaaggtgataattttttttgattaaagaatatattatttataagtgattttaatgttttttttttttttttttttattgttatttttttgttttttatttttattgtatgttgtagtatttgtttagtgatgaagttttttgtaataaataatttataaagtaatttataagtatattatttttagtaataagataagatttggaagaaagtgttttattgatatatatatatatatatatatatgttttttggtttataagtagtaagttattagaatattaataattaaggtttatgggtttggggtgaagggtgttataagttatagtgttggagtttttatatataagttatgtaaagtgtttgaagtgtatttgtataataaataagagaaaatttattaaaaatagtttttttttttaatttttgtatatagttgttatggttttgtttatatggtgtgatattaagtgaagataatttttttttaatggttaattttttttgagtatatttattgagttaggtttagtgttaagagtttttaataaattgttttattttattttttttatttttatgagatatgttttattagtatttttgttattggataaagtaatagaggttgttttttagtttttaatatttagtttttgaatttttaatttagttaaagttatttatttaagtatttatttaatgttaatattttataggtatttgataagtatttgttattttttattttgggagttaggatgtatagatagatgatgtatttatagtagtattgtttaatagaaatataatgtaaattataaaggtaagttgtatataaaattttaattttttttttttaaaaaaaattagttttttggttaaattaaatttaattaaaaatttggttttggtttgttgtatagg

SEQ ID NO: 2527 - DNA, 2476 bp, Artificial Sequence
  chemically treated genomic DNA (Homo sapiens)
tttgtgtaatagattaaaattaaatttttggttaaatttaatttaattaaaaaattaattttttttaaaaaaggaaagttgaaattttatatgtagtttgtttttgtgatttatattgtatttttattaggtagtattgttatagatgtattatttgtttatgtattttagtttttagaataaagaatgatagatgtttattaaatgtttgtaggatattagtattgaatgaatatttgagtgagtgattttaattggattgggaatttaaagattgaatgttgaagattgggaggtagtttttgttattttgtttagtaataggaatattaataaaatatattttatagagatagggaagataaaataagataatttattgagaatttttaatattgggtttggtttaatggatgtatttaagagaagttagttattaagggaaaattgtttttatttagtattatgttatgtggataaagttatggtagttgtgtataaggattaagagaaaaggttgtttttagtgagtttttttttatttattatgtaaatatattttagatattttatatggtttatgtataagggttttagtattatggtttataatattttttattttaagtttatggattttagttattggtgttttgatagtttgttatttataagttaaggggtgtgtgtgtgtgtgtgtgtgtgtattagtaaaatatttttttttaggttttattttattgttaagaataatgtatttgtaaattgttttataaattatttattatgaggggttttattattgaataagtgttataatatatagtgaaaatggggggtaggaggatggtagtgaaggagggagagaagaaggtattggaattatttataaataatatattttttggttaaagaaagttattgttttttatgaagtgtttggaagttgttttgtatattaagtgggtatttttttgttgatttttgagtgattagttatagttttttttgttgttttatttttgaatttggtgattaggatgttatttatttattttagttaatgttataattgttatattttattatttggaaataaatagtaaatagggttgattggtattgttgaggaaatgtaaagatgtgttggtaagtttttgaagtgaaatttgtgtttttgtgttgggttttgtatttggtatttattatgtaagtgttgtgtttaatgaaggtatttggtatttatgtgggtgttatatgtatttttagggatgttgggttttaatttagtataggttaatggatatttttattaaagggttattgaaagtttgatatttaaataatttagttttaaaattagagaaatttagatgttaaatttgaaggagagaaattgtgagagaagttaagtatataaatgttaattttagatatttgagagtaattaatggttgatttaagtgttttttttttttttatttattttgattttttttgggtttaggttttggtatattttttgatagttgtaggttgaaattttgtagattggggaggttagggagagaaggaagggtatgtttgtattaaatgaatggtgttttttattttttaaaatttttttttatgtttttggttttttagtattaatttttttaggtatttaaggtatattttattatttttatataaaaggatattgaaggtttatggaatttaaatgatttgtaaatagttatattttattagtaaatagtaggaaaggattagaatagttattatatttttatttattttttttgtgtattaatttaataaatatttattaagtatttattttgtgttaaatttatatattatttggttgatgttattaaagaaaatagattttttttatatttatgttgaagaaaggtttagtagttttttataaaaataagtttatatttattttatgatttatattttatttttaggtatttatataagataaaagaatatattaatatgtaatataatgtttatggtttttttatttatggtagttaaaaaataagataaatgaatgtaatagaatgttatagaatgtttataatttttttatttataatagttaaaaatagaaaatagtttagggatgtattaatagaggaataaataaataaattgtggtatatttatataatggaatattatttagtaataaaaggaatgatttattgatatatgttgagatttggaagaattttaaaaatattatgttgagtgaaagaagttttataaaaaaggaatgtatgttttataattttatttatatataattttagaaaaggaaaaataaattgatgttgaaaaatattaaaatagtagttgtttttggggttagtggagttggagttttattaagaaagggtataagaaaatgtattggagtgataataatgttttttattttgataggggtttgggttag

SEQ ID NO: 2528 - DNA, 2497 bp, Artificial Sequence
  chemically treated genomic DNA (Homo sapiens)
tttggtagaagtgtaggtattttgtaattttagtagtttttattttatttgttgtttaggtttgttagttaattggtatgttttagtagggtgaattggttttgtatgtttgaagtttttttgtaataattggtaaataatttttgttttgagtttttgttaaattttttgttaatatttttgtttttttagtttttttttaggatttttagattttttattatttaggaatttaaaagaaaatatttggtaaagttagattttgtaagagttgattttaaatgtataaatgattttagtttttatttgttagtgtttgggttttattagttgttggaattttgtgaaatatttgtattatttattatatttaaaggaagtaatttaattttttaattgggtttttttagttttttttattagatttgaggtaaggggattatattttttatttatttttttttggaatggtagtaggaaaaatattttaatatatttttttaaagaaattttttttttaatttagtattttaatttttttatattttttatgtggtttttgaattttatatattgagggtttgtattaaatgtttatttattgaaattattgttgataattaatttttatatattatatatatatatatatattatatatatatatatatttaaatgtgtttggttataagaattttttatgtagtagattattgaattatagattttttagtattggtatttggaaaaggtttaaatttgaaggtagagaaaattaatagtttaaggtttttaatttaaagatagattttattaattttaggttggttgttttgtatagttttgtaatgttttttttatatgtgagtttggtttgtttgttttttttgtttttatatttttagttttttggttggtttttttagggataatttttagtgtttgtttgatttgtgttataaagtagatatgaatagttaggttagagagttatgtattaattttttgggtggttaattttttttttttatattttagtgttattttaagggaaaagaaatgtaggatatggaataaatagagggaaatttgtttgatttgttgttaatgtgttagtgttttgttttgtgggtttaatttgtagaaggtaggtttttgttttgttattttttggtatttaatagggtttgtttttagtgatttagttgggtttttttagatagaaaatagttatttagtgttttttatattattaagaaaatgagattattttttgaggagattagtagtttttggttgttgttgaaagggtgttttgtttgtttgtttggttgaaaggtattatgtagtttaggtttgtttaaaattagtttttttataaattatttgtataatgaagtgtttgtttttgttttttgatatatttgtgtttttgtttatttttaatgatgatatggttttttttgtttttatttggttttttattttttatatttttaagtattaatttttgtggtaaaagtataaaatttaagaaattgtagggaagaaagagttttttttttattagtatataaatgtagtggggaaattgagttagttttgggggtatttttggaggaaattgttttttttttaattttgttagattataatattttgaaattgtattttttgaaagagtaagagggtgatggtaatattttgtaatttgataggggtttgtgttatatatgtgtatgtgtttgtaaaatttaataaatgtatatgtattttatatgtaagtttttatataaagaaaaaagtaaattaataatgaattttaataatatttatatagaattatttaagaagaagtatattagtttttttaatttattttgaaatgtatttaaaattgtgataaattaattgatggatagatggatagatgtgataaaataagtagaaaaaaaatgttaaaggtaaaatatagatggtaggtataagtttgttttttgtaaaattattttaattttgttgtaagtttgaatatttttataataaattattagaataaatgtttttttggtgatttatattgaatttttggaaatattagagagttatagtttttaaaattttgtattttatttaaattttatttttaaaaatttatatttatatagagttaaattgtaataatttatgataataaggaaaatagtatttttgatttagtaaaaagtataaaatatagaatattttaagagagagggaaattttattagttagatatataagaattttttttaatttaaatggtatgtaattagaagtttttaatgtagttttttaatttaatatataaaatataaatgaagaatagtaaagggtatataatgattaaaatttatataggatgaatttaaatgggtttggggtgagaaagtttaattttagtgaatttatagttattgttgaaataaataaataaataaatgaatatttagaaaag

SEQ ID NO: 2529 - DNA, 2497 bp, Artificial Sequence
  chemically treated genomic DNA (Homo sapiens)
tttttttgggtatttgtttgtttgtttgtttgttttaatagtaattgtgggtttattaaggttggatttttttattttaggtttatttgaatttattttatgtgggttttggttattgtatgttttttattgttttttatttgtgttttatatattggattagagagttgtattaagaatttttagttatatgttatttaaattgaagaaggtttttatgtgtttaattaataaaattttttttttttttagaatattttgtattttgtattttttattgggttaaggatattgttttttttgttgttataaattattgtaatttaattttatataaatatagatttttaaaaataaaatttgggtggaatataggattttagaagttgtggttttttgatgtttttaaggatttagtgtgggttattaagagagtatttattttaataatttattgtaaaaatatttaaatttgtagtaaagttgaagtaattttgtagggaatagatttgtatttattatttatattttgtttttaatattttttttttatttgttttattatgtttgtttatttatttattaattaatttattatagttttggatgtattttaaagtaaattgagaaaattagtatatttttttttaaatagttttgtataaatattattagagtttattattagtttatttttttttttatgtaaaaatttatatgtaaggtatatatatatttattgagttttgtaaatatatatatgtgtgtaatatagatttttattaagttatagaatattgttattatttttttatttttttaaaaagtataattttaggatattataatttgataaagttagaaaggaggtaattttttttagaaatatttttaaggttaatttagtttttttattatatttatgtgttggtagaaaaggaatttttttttttttgtagttttttagattttgtatttttgttatagaagttagtgtttgggagtgtggagagtaaagagttaaatggaaatagaaaaagttatgttattattaaaaataaatagagatataaatatgttagagggtagaggtagatattttattgtgtaagtgatttatgaggaagttaattttaaataagtttgggttgtgtggtgttttttagttaaataaataggtaaagtgtttttttgatagtagttgagagttgttgatttttttaaggaataattttatttttttggtggtgtaaaaggtattaagtggttgttttttgtttaaggaaatttggttgagttattgaaggtaggttttgttaaatgttagagagtaataagataaagatttgttttttataagttaaatttataaaataaaatattgatatattaataataaattaagtaggtttttttttgtttattttatgttttatatttttttttttttaaaatggtattaggatatgagagagagggattggttatttaggaaattagtatatggttttttggtttggttatttatgtttgttttgtaatatagattaggtaggtattgagagttatttttgggggagttagttaaggaattgagaatgtagaaataggagaggtaagtgggttaggtttatatgtggaggagatattgtaaagttgtataaggtagttagtttaggattagtagaatttatttttagattggaggttttaggttattagttttttttgtttttaggtttgagttttttttaaatgttaatgttgaaaaatttgtagtttaatagtttgttgtatgggaaatttttatagttaagtatatttaggtgtgtgtgtgtgtgtggtgtgtgtgtgtgtgtgtggtgtgtagggattgattgttagtagtaattttagtgaatgaatatttaatatggatttttaatatataaggtttaaaagttatatgaaaggtataaaaagattgaggtgttagattaaagagagaatttttttgggaaaatgtgttggagtattttttttattgttattttaagaaggggtgggtaggggatgtggtttttttgttttaagtttagtgagagaggttggaaaaatttaattagggagttagattgttttttttggatgtaatgaatagtgtggatgttttatagggttttaataattagtgaggtttgagtattgataaatgagaattgaaattatttgtgtatttggagttagtttttgtagggtttggttttgttaagtatttttttttaggtttttgaatagtgggaggtttggaggttttgggaagaggttgaggaggtaagggtattggtagaggatttgatgggagtttagagtagaagttatttattaattgttataagaggattttaaatatgtaaagttagtttgttttattagggtatattagttaattagtagatttgaatagtggatggagtaggggttgttggggttatagagtatttgtatttttgttaag

SEQ ID NO: 2530 - DNA, 2396 bp, Artificial Sequence
  chemically treated genomic DNA (Homo sapiens)
tttttttttttggttttattttggttttttttttattatttaaattttttattttgaataaagtagtaaaatgtatttttttttttatgtggtttagtataaggataggtttggatttttataatgaaagtttatgtttttaataagtgtttatagttagtgttttttgtatttatttaattgttgttttttgaaagttattattttttattttttgtgattaatgtgtattgggagttaaatttatatgtgtgtgtaggattttatttttaaagatatgttttattattgtttattgatagggtttttaattttaagttaggatttatgtatgttagaggttgtggtgagttatgagtattgtgtttatttatgtatgggtataaatttttatggttttttttttttgtatagtttgagatatagggtggatatgtagtaatttaggtttttatagtgggttttagatttatttttgttaggatatagatattgtagagagatttttttattgtttattttttttattagtttgagttttttatttttagattttttttgtagttttttaatattttgaataatattatgtggtagatatggtttattttattttatagatgtggaaattgaggttaaatgtttatttaaaattatatagagattaaatgttttaattataataggatttaagtttttttggtttttaagttttatgttttttttataattttttagttaatatatttagtttaaataaagaatagattaattgattaatttaaatttttaaatttatttttgtattagtgttttggaggattaaggttatatttatagagtatagagtaaaaaaggagaattagtaaatatttagagtatttggtaagtattttagatatttaagttagaagatttaggagtgaaagagaatttttattattataattgttattataattgttaaaataaataaaattaattaaggatatgtagttgtatttgtatttaagtaagattgtagtagtttttaattaattaatatgtttattagtatgaagtaattgtgttttgtttgtgattggtattttatttttatttattaaatatttattgggtattagtgatgtgttaagttttgtgttggaatttgagatgatatagatgattgatgtggtttttgtttttgggaagtatgtagtttaggaaagttatagaatgtagtttttaagaagaagttattggagtaagtagatgaaggttgggaaattatgtaagtttagggtagattagttaaattgtaatgggaatgtagttagttatttattttgaggttttaaagtggaataaaagggattgtaatagtttagattttttttttttttttttagggataggagtagttattatttaaatttttttgtgatgattagttgttttagttagttaaggttgttataataaattattattgattggatgatttaaataaaaatatttatattttatagttttggaaattgggaagtttaagattaaggtattggtagatttggtgtttgataagggtagttttttggtttgtagatggttgttttttagttgtgtttttatatggttagagtatttttaagtttttttataggtattaattatattttttaaaggttttattttttaatagaatgatattgggggttagattttaatatatgatatttgggaggatgtaaatttttagtttatagtatgagtagtttttatgtataggaggttaattatgatattttatgtgtttgttatttgagttttatattttttttttatgttagagtgggttattttatgttattttatttatttttgatgtttttttttagttgaatagaattttttttttatttaaggaatatgtattgttttgttaaataagggaggtttttttatttagggtaaagtataatagtattttagttaggatttgggggatttaggtatggattatttggaggttagatgggttgatagttaattggtattagatattgttattttttattaatagtttaggtatttgggagtttgtttattttagggtaagtttattgatttattttttaatttatagaaatttgaatttaaaagattggtagtaatatgtgatgtttatatttaggaattttagttttggtgtattgggggtttttgtttgttttttggttttagaaggtattttaagggtttatgtaaattaagttttttatagttattttagagatgttagggtgttttagatgggtatattagtgatattatgttatttgatgtttggatttttttagataattgttttgttagtgaataatttattggatttagttattgagatattgggg

SEQ ID NO: 2531 - DNA, 2396 bp, Artificial Sequence
  chemically treated genomic DNA (Homo sapiens)
ttttagtgttttaatggttgaatttagtgaattatttgttagtaaagtagttgtttgggagggtttaagtattagatggtatggtgttattggtgtgtttatttggggtattttggtatttttggggtggttgtaaggaatttaatttgtatgagtttttgagatgttttttaggattaaaaggtaagtaggggtttttagtgtattaaaattaaaatttttgaatatgggtattatatgttattgttaattttttagatttaggtttttgtagattaaaaaataaattaatggatttgttttgaggtgggtaagtttttagatgtttgggttgttaatgggaagtgatagtgtttggtattagttggttgttagtttatttagtttttaaatgatttatgtttgagttttttaaattttagttaggatgttgttatattttgttttaagtgagaaagttttttttgtttgatagggtaatgtgtattttttgggtgggaaggggattttgtttaattaagggagagtattagggatgaataaggtagtataaagtgatttattttggtatggaggagagatgtgaggtttaaatggtaggtatatgaagtattatgattagttttttgtgtatgaagattgtttatgttatgggttgaaagtttgtgtttttttaaatattatatgttgaagtttagtttttagtgttattttattaagaggtggggtttttgggaggtgtgattagtgtttataagaagatttgagagtgttttagttatatgaagatataattagaggataattatttgtaaattaggagattgtttttattaaatattagatttattagtgttttgattttgaattttttagtttttagaattgtgagatataaatgtttttgtttaaattatttagttaatgatgatttgttatagtagttttagttgattaagatagttagttattatagaaagatttgaatggtggttatttttgtttttgaggagggaaaggggaaatttaagttgttgtagttttttttattttgttttagggttttagagtgagtagttagttgtatttttattgtagtttggttggtttgttttaggtttgtatgattttttaatttttatttgtttgttttagtggtttttttttgggagttgtattttatgatttttttggattgtatgttttttaagggtggggattatgttagttatttgtgttattttgagttttagtatagggtttggtatattattggtatttaataaatatttgatgaataaaaatgaggtgttgattataggtaagatataattgttttatgttaatagatatgttgattggttaagaattgttatagttttgtttgggtgtagatatagttatatgtttttggttaattttatttgttttggtaattatgataataattatgataataagaatttttttttatttttaaattttttggtttgaatgtttaagatatttgttaaatgttttgggtatttgttagttttttttttttgttttgtattttgtggatatggttttgattttttagagtattggtgtagaagtgagtttgggagtttaaattagttagttaatttgttttttatttggattagatatattaattgggggattgtgagaagaatatgaaatttggggattaaagagatttgagttttattatgattaaggtatttagtttttgtgtaattttgagtaaatatttaattttagtttttatatttgtaaaatggaataaattatatttgttatatagtattgtttagaatattaaggaattataggaaagatttggagatagagagtttaggttgatgagggagatagataataaaaaaatttttttataatatttgtattttggtaggggtgagtttgaggtttgttgtaggagtttgaattattgtgtatttattttgtgttttagattgtgtaggggagagaggttatggaggtttatgtttatgtatgagtaaatgtaatgtttgtggtttgttatagtttttggtatgtgtgggttttggtttggggttgagagttttgttaatggatgatgatgaaatatgtttttggaagtagggttttgtatatatgtgtgaatttagtttttagtgtatattagttataggaaatagaaaatgatagtttttaggaggtaatagttaaatggatgtagagggtattggttgtggatatttgttagaaatatgaatttttattgtagggatttaaatttgtttttatattaaattgtatgagaaggggggtatattttgttattttgtttagggtggaggatttaaatggtaagagaggggttaaggtgaggttaggaagggagg

SEQ ID NO: 2532 - DNA, 2391 bp, Artificial Sequence
  chemically treated genomic DNA (Homo sapiens)
taaaaaggtaatatataaaataattaagtatagtatgttagaggaaggtatttgttatagaaatagattatagtaagggagttagggagtattggggtggggagggtttattatttggataaggtagttaggaaaggtgtttgttaaagtgatattttaatagtgatttataggaagaaaggaagtaaattatgtagattatttgaaggaagagagttttaggaaaagggaatagtaagtttaaaggttttgaggttggagtgtgtttggtgtgtttaaagaagagtaaggagattaatatggttagagtagtatgagaaggttagaaagagttaggtaatgtagagataggtaatgtagttagagagaggatattgtgagattatgtggggttttataaagttattgaaaagattttagtttttattttgagtgagatagggaagaattatagttttgagtagaatgttgttatttgattgatatttttataaagtattttgtgatttagttgagaatagattgtagagtagatggaggataaaggagaaagttaggaggttagagaggatagtgatgtgataatataggggagagatgtgggtggtatgagttttggtgatgaaggtggtgaaaagtgattggattttggatatagtttgaaagtgaagtttataggatttataggtatggttgtaaataatgtgaagtgttatagagaaaaagtatagggatattgtgtattattggtgagtagaggttgtttttttaagaaagtgattttggggttaaaatttgagatttaagtaggagttaatttgataaagattttatagattttttgtttagttatttgtagttttttgataatgagaggaggggagggaatggaatgggagaggaagaggttgtttttttttgggaaaggggaaaattttgttataaaaagttggaaatagtttaaagagttatgttttgttagatatgtatttgtaatttaaatagttttgtttttatgggtttgtttgttatagattagttagtgggtagattgttttggttggaaatggagatttagataatgttagagtggataatggtgtttgaatgttgttaggtgttaattaggatttggtaatgattttgttgtgtagattgaagtgtgagtatttggagttattatttaaggtttgtttttgtaattagatgattgtataattttaatatgattaattttgttggatgtgaattgtgtagttgtaattataaaataaggtggtatttttgtttttttgttgaatataaatattatatatgtgtaagttataattttataatggttgtttttggtaagaaagagttttgttagttagaagatgtagttgaggggaaaaaatatatatatatgtaatataagtgtttaaagaggtggttataatgttaggttttgttttgggaaatattgttttgtgggttttgtatttttttttttttttttttgtatatattaattttgaggttaggaagttgggaaatttggagtttatattgagtttttttgggataatatagttttgtatttgtatatgtattatgttgagagttatagggaattagtttgatatttattagtaattgtatattatattttgtttattaagttttattgtttagtggggatgtgagttatgatttaggttttttagatttgagatttttgtagaaattttagtttgttttttaaggtttggtttgagggattatagggatatagtttttaaatgttttttttattttataggtttagggtgtgttggaggggatgagatggatgaggggattaatgttgagaatgttaagattttttttttgattttggtttaatttgtagggggtatagaattttgagaaaggaaaaaaaatttagaggttaagagttgttttgttatgggttgtagtttaattttgggaaaggagagagagagaaagagatggagatggggtgggaagaagggagtaaggagatatatttaagaatagtgtagtgtgatgggatgtttagagatgaaatttagtggttaaataagtgaatgtttaagattaggtgagagtgtgtgtgtgtgtgtgtgtgtgtgtgtgtgtgtgttagagaaaaagaaagagaggaagtgggagaaggagggggagagagagagagagagagtatttattaatagtatttgattaagattgtaattttatggttgtaattaatgataaagttaagtgttgaaggtttagtttttgaggagatagattttgagatatagatttgaatataagtttattggggagtgtttttgggtttatatttatagggaaaggtagtaggaatgggtagagggagagata

SEQ ID NO: 2533 - DNA, 2391 bp, Artificial Sequence
  chemically treated genomic DNA (Homo sapiens)
tgtttttttttttgtttatttttgttgtttttttttgtagatgtggatttaagagtattttttgataaatttgtatttaaatttgtattttagggtttgtttttttgagaattaagtttttgatatttgattttgttattagttgtagttatgaaattatagttttggttagatgttattggtaaatatttttttttttttttttttttttttttttttttattttttttttttttttttttttgatatatatatatatatatatatatatatatatatgtttttatttaattttaggtatttatttatttggttattaggttttatttttggatattttattatattgtgttatttttaaatgtatttttttgtttttttttttttattttatttttgtttttttttttttttttttttttttaagattaagttatgatttataataaaataatttttaatttttaggttttttttttttttttagagttttgtgttttttgtaaattgggttagagttagaagagaaattttgatatttttagtattggtttttttatttgttttattttttttgatgtattttgagtttgtgaggtggaaagggtatttgagggttgtgtttttgtagttttttaagttgggttttggggggtgggttaagatttttgtaaggattttgaatttgaagagtttaagttgtagtttatgtttttattgaataatgaggtttgatgaatggggtgtgatgtgtaattgttgatgaatattaagttgattttttatgatttttaatgtggtgtatgtgtgagtgtaaagttgtgttgttttgggagggtttaatatgagttttaagttttttaattttttggttttaaaattgatgtgtataaaggaaaaaaggagaagatgtaaaatttgtaaagtaatattttttaaggtgaagtttgatattatgattgtttttttaagtatttgtattgtatatatatatattttttttttttaattgtattttttgattgataaagtttttttttgttaaaagtgattgttataaaattatgatttgtgtatatataatgtttgtgtttaataagaaaatagaaatgttattttattttgtggttatagttgtataatttatatttggtaagattgattatattaaggttatgtaattatttaattgtagagataagttttgagtaataattttaaatgtttgtattttaatttgtatagtagagttattgttgagttttgattagtgtttgatagtgtttgggtattattatttattttggtattgtttaaatttttatttttagttgaagtaatttatttattaattgatttatgataaataggtttataagagtaaagttgtttgggttgtagatatatatttaataaaatatgattttttgggttgtttttagttttttgtagtaaagttttttttttttttaggagaaggtagttttttttttttttattttgtttttttttttttttttattgttaggaggttgtagatgattagatagggaatttgtaaaatttttattaaattaatttttatttggattttagattttggttttaaggttgtttttttagaaaagtagtttttatttattagtgatatatagtatttttgtgttttttttttgtaatattttatattgtttgtaattatgtttgtaagttttatgggttttatttttaaattatatttagaatttaattattttttattatttttattattagggtttatgttatttatgttttttttttgtattattatattattgttttttttggttttttagtttttttttttgttttttatttattttataatttatttttaattgagttataaagtattttgtaaaaatgttaattagataatagtattttatttaaaattgtaatttttttttgttttgtttagagtaaaagttaaagtttttttaatggttttataaggttttatatgattttatagtattttttttttggttgtattgtttatttttgtattgtttagttttttttaatttttttatgttattttagttatgttagtttttttgtttttttttgaatatgttagatatattttggttttagggtttttggatttgttgttttttttttttggagttttttttttttagataatttatatggtttgttttttttttttttatgggttattgttgaaatgttattttagtagatattttttttggttattttatttaaatggtaaattttttttattttagtattttttggtttttttattgtgatttgtttttatagtagatatttttttttaatatattgtatttagttattttgtgtattgtttttttg

SEQ ID NO: 2534 - DNA, 2470 bp, Artificial Sequence
  chemically treated genomic DNA (Homo sapiens)
aaatttggtgagttttttgattttattatttttatttttattatgttgttatttttatttttagaaattattataatttgtatattttatttagttagttgtgtattttataggttttgttgttgttgttttgtattgttttatattttttttttgtttttttttttttagaatgaatattttatgaggttaggaattgtttgttttttttatttttgtagttttagtattagtatagtatttgataataaaatttagtagataaaagtaaagagtttgggttaggttttttgggtttgaattttagagttggtgttatttaattgtagagagataatttggataatatagtgttttagtttttttttttgtaaatggggttaataatagtagtgattttatggttgggtgtagtggtttatatttgtaattttagtattttgggaggttgagataggtggattatttgagttttagattagttggttaatatggtgaaattttatttttattaaaaatataaaaattagttaggtgtggtggtaagtgtatgtaattttagttatttgggaggttgaggtaggagaagtagtagaatttgtaaggtggaggttgtagtgagttaaaataatgttattgtattttggtttgggtaataaaagtgaaattttgttttaaaaaaaaaaaagtagtaattttattaggaggattaaatggtattatgggtaaagtatttaagaatagtgttggaatataggaagtgttatataagggtttgttttatatgtagatataggtagatgtagttagagataaaatggtaggtgtttaagaaatatttgttaaattaatatgttaagtttaggaatgggataaagttttaattggggtagagttttagatagggataatgatatttttaagggtaagttttttgatttgaatagagaaaaatttggaaagtttggaagttagaggtagttgggaagggtagttgtaagtaaaggtttggtggggtggggtaggggttataagagattttttatggaatttttatttggaatagttagattgagtattaatatatattgaatagttaaattatatattattgatttgttaaatgtatttgtatataaataagtatgattatttatggaggtttgagtagtggtatttttttttagtgttatgattatagatggatggttttagttagatatgaattagggatgttgttatttttgttgtaaagttagtggttgatttaaaattatatttattggagtatgtaagtgtgatagtttagtggtgagtttgggataattagtttaaaagataagataaatgatttttaaaattggtattgtgatgaagattttattttatttttttgttatagttagtttagttttgatgttaaaaatatagttgaagataattaattaggaaatgttaataggtaggattatgttttaattgtattttttagaggattttagaattttatatttaagttgattgtgtttttttttttttggtgattaggtaggagaggtggatttttagttagaagtagaggttgggtggggtgggtagataggtttagataaggtttttaaggttaggtaagtaggtggttttagttagttttttttgagtttgaattgagatggatttgttgggtgaagtatgttgatttgggtaaattatatttgttatgttaatttattttatgtgggagattagttatgagtttagaggttggtattggttgtttttgatggattaagggatttagttgtttagatataatgttagagatttgttattgtgggggaaatatggtttgttaatgttttattttaattgttttaaattatatttgaagatgtatagtttaggaggttagttagtaaatattaaatgttattttgaggatttgtttggtttagagaggaatttgtagttttaggattggggttttattgttttgttgatatagaagagagagttattgttttttggttttattatttgtttttttgtttttaaggaaggggtagagaatgttttgagatttttgatgtattttatttataggtttgagggttttttttttgagagttaagtttaatggatttagatagaaagaggggggtgggtttttggagtttgtttgaggtaattaaagaagaatttaaaaggaaggtagtatagtagaggaagttatggtagaagatgtttttgttttaatttttaaaattgtatatgataaaggggattttgtagatatgattaaagatattgagatggggggagtgagtgagagtgattgtaatgttattgtaaggtttttagaagagggttagggagagagatgaaaatgttattagttagttggtattgaagatggtattgaaggtgtaggtgggttttagaagttggaaaaggtaagaaaataaagggt

SEQ ID NO: 2535 - DNA, 2470 bp, Artificial Sequence
  chemically treated genomic DNA (Homo sapiens)
attttttgtttttttgttttttttagtttttggagtttatttgtatttttagtgttatttttaatgttagttgattaatagtatttttatttttttttttggtttttttttaaggattttgtaatgatattgtaattatttttatttattttttttattttaatatttttaattatatttatagagttttttttgttatgtatggttttggggattaggatgaggatattttttgttatggttttttttgttgtgttgttttttttttagatttttttttgattgttttaaataaattttaaaggtttatttttttttttttgtttaggtttattagatttaatttttagagaaggaatttttaaatttatggataggatgtgttagaggttttagggtattttttattttttttttgggagtagggaggtaggtggtgaaattaaaaggtagtggtttttttttttgtattagtaaagtggtgaggttttagttttaggattgtagatttttttttaggttaagtagatttttaaggtaatgtttgatatttgttggttggttttttgggttgtgtatttttaagtgtaatttaggataattaaaataaagtattagtaagttgtgttttttttgtaatgataagtttttagtattgtgtttgagtagttgggttttttgatttattagaggtagttgatgttagtttttgagtttatggttgattttttatgtggaatgaattaatatggtagatataatttatttgggttaatgtgttttatttagtagatttattttggtttaggtttggggaaggttgattggagttatttgtttgtttggttttagagattttgtttgggtttgtttgtttattttatttagtttttgtttttagttaagaatttgttttttttgtttaattattagggggaggggaatataattaatttgggtgtaaaattttaaagttttttggaaaatgtaattggaatataattttgtttgttaatattttttagttaattatttttggttgtatttttggtattagggttgagttggttgtggtgggggggtagggtgggatttttgttataatattagttttaggagttgtttattttgttttttagattaattattttaaatttattattaggttgttatatttatatgttttaataaatgtagttttaaattagttgttgattttgtggtaggggtagtagtgtttttggtttgtgtttaattagggttatttatttgtaattatggtattgaggggaggtgttattgtttgggtttttatgaatgattatgtttatttatatgtaaatatgtttgataaattaataatgtatgatttagttgtttagtgtgtgttagtatttggtttggttattttaggtgggggttttatggagggttttttgtggtttttgttttattttattaggtttttgtttatagttgttttttttagttgtttttggtttttaagttttttaagtttttttttgtttagattaaggaatttatttttgggagtgttattgtttttatttgaggttttgttttagttaggattttgttttgtttttagatttagtatattaatttggtaaatattttttgaatatttattattttatttttagttatatttatttatatttatgtataaaataaatttttatatagtattttttatgttttagtattgtttttgagtgttttatttatagtattatttaatttttttaatgagattgttatttttttttttttgagatagaattttatttttgttgtttaagttggagtgtaatggtgttattttggtttattgtaatttttgttttgtaggttttattgttttttttgttttagttttttgagtaattgggattatatgtgtttgttattatatttggttaatttttgtatttttagtagagatggggttttattatgttggttagttggtttggaatttaagtgatttatttgttttggttttttaaagtgttgggattataggtgtgagttattgtgtttagttatgggattgttattattattggttttatttatagaggggaaaattgagatattgtgttgtttaaattgtttttttatagttagatagtattagttttgggatttagatttaggaagtttggtttagattttttgtttttatttgttgggttttattgttaagtgttgtgttggtgttggagttatagaagtaaagaaggtaggtagtttttgattttatagagtgtttattttgggggaaaaagagtaagaagaaaatataaagtaatataaaataataataataaaatttataaagtatataattagttaaataaaatatataagttgtaataatttttaggaatgaaaatgatagtatgatgggaatgagaatggtggagttagaaaatttattgggttt

SEQ ID NO: 2536 - DNA, 2493 bp, Artificial Sequence
  chemically treated genomic DNA (Homo sapiens)
agttttgttttgttttttaggttggagtgtggtggtgtgattttggtttaatgtaatttttgtattttgggtttaagtaatttttttgttttagttttttgagtagttgggattataggtatgtattattaggtttggtttttttttttttttttttttttttttttagtagagatggggtgttattatgttggttgggttggttttgaatttttgattttgtgatttgtttgttttggttttttaaagtgttgtgattataagtgtaagtttgatgtttttaagaaatagtaaagagatttgtttggtaaggtttgaagtgaggatggttgtttggaagagggttagtttggtaggttatagtaaggtttttagagtttattttaagataaaaagttattggagggttttaagtagaggattaatatgatttgaattttttaaaggattgtaaagagaaatataagtttttatttataaaataaagatgtattttttataatttagttataagttaaagaaaaaaagtatagaataaaagttgtgtagtatgatagtatttttgtaagaaaaaatatgtatatatgggaataaggttaaaaggtttaatattaaattgtgatttattatggtttgtgggattatggggttttttttgttttgttttgtttgtaatgtttttttttgttttttaagttttttgttttaaatatgaattattttggtaatttttaatgttatttttaaaaagaaaaaagtattttattatgagattttttttgtttgaaattttattttaatatgaaaaaaaaaaaaataaatttaaaattaaaaattaaaataatatggggaatatttttttttaaaaattattatattttttatgtaatgtttgtttgttatgaattattgtataaattaagttttgtttaatgtattaaggttataaaattaatttggttaatatgttgattattatatagtggttttgttttttatagtaattttgatattatttttttaaggtagtaatagaagggttttttttatttattttttatgtgtttttgatattattttgtgtttttggatttttttattgtatgttttttagaaataaattaagtttgaataagttgttttagttaatgaagtgtgtttttggttttttttttgtggtttagaattatttggtaaaatattaattgttttaggatgtatttttttttagttttgaaatattgtaatattaagttattataaataaagagtattgagataataatatataagaatgtgtataaatggaaattattgtaatttttttttaaattaaggatgtgtggatgttttatgaataaatatttaggatatttggataaatatatattatgtgtttatatagataaaaatagaaaggagtatttttttttattttatttttttattttaagttatataagttttttgtagggtataagtttagggtaattattgtttagaaatgtaaattatgtaatttaaaatgatttaagtttttaaatattttttatttaagttttatattttatttattttttaattatttttaataggtttttttgaatgaaaattttaaattgggaaggtttaataagttttaaattttatttatatgttatttagggaatttgaggatttggggtttatgtgtagtgtttttgtgtgggtagataagggttttaagatttagggtgttattgtattttgagtggtttgagttttggttttgttgtttttattggttgagttgatgttttttatattgggggtatgggttgttatattttagtagagtgtaagggtttttgggtgtggatgtaggtggtttttgggtgtatatgtggaatgtatatttgggtatgtatttttatatggttaggtgggtttgtgtgaatgtttttgttttttttttattatttttttttgtgttttttatgatggtggtatgtggggttattttgatttttaggatttttggatgtttgtttttggagtttggggggtgatgatagatggtggagggtggggttttggggggaaggggtggagttttttagtatgggggtgttggtggttgatagaaagattaggggtagttggtgggagggggttgattgagattgtgggttggttgtgggttaggtgtggtgggaaggagtttgtgtagatatagggtttgataggtagagagagatatagatattggggattgatagttgtgggggtatgtggggttggttggttgtggtgggtgtttatttggtagtggtggtggtggtggtgtttgtgattgggttgttttttttgtgttgtgggtttttttttttgtggttgggtgggtggttggtgtaggttttgtagaggtggtggtggtggtgatgttggagttgtggattgttgagtggtggggatgtagttgtattaattgattttgggttgtttggttgggtt

SEQ ID NO: 2537 - DNA, 2493 bp, Artificial Sequence
  chemically treated genomic DNA (Homo sapiens)
agtttagttgagtggtttggagttggttggtgtagttgtgtttttgttgtttagtagtttgtggttttggtgttgttgttgttgttgtttttgtggggtttgtgttggttgtttgtttggttgtggggagggaggtttgtagtgtgggaagagtggtttggttgtgggtgttgttattgttgttgttgttaggtgagtgtttgttatggttagttggttttgtgtgtttttgtggttgttagtttttggtgtttgtatttttttttgtttgttagattttgtgtttgtgtgagtttttttttgttatgtttggtttgtggttggtttgtagttttagttagtttttttttgttggttgtttttggtttttttgttagttgttagtatttttatgttgagaggttttgttttttttttttggagttttgttttttgttatttgttattattttttgggttttaggagtgggtgtttaggggttttaggggttagggtagttttgtgtgttattattgtagaaggtgtaaaagggggtggtagaggggaagtgggggtgtttgtgtaggtttgtttgattgtgtgagagtgtatgtttgagtgtgtgttttgtgtgtgtatttgagagttgtttgtgtttatgtttgagggtttttgtattttgttgggatgtggtagtttatgtttttggtgtaaagagtgttagtttgattagtgaaggtggtagagttaggatttgaattatttggggtatagtagtattttgaattttgggatttttgtttgtttatgtgaaaatattatatgtgggttttaggtttttggattttttgagtggtgtgtgagtggagtttggagtttgttaagtttttttagtttgggatttttatttagggaagtttgttggaagtgattgaggagtggatgggatgtaggatttaggtggggagtgtttgagggtttgagttattttgagttgtatggtttatatttttgagtagtgattgttttgggtttgtgttttgtgagaaatttatgtgatttggggtgggggagtgaggtaggaaggaatgtttttttttgtttttatttatgtgaatatatagtatatatttatttagatattttaaatgtttatttatgaggtgtttatatgtttttaatttaaaaaaggattatagtagtttttatttatatatgtttttgtgtgttgttattttaatgttttttatttgtggtaatttagtattgtaatattttaaaattaagagaaaatgtattttaaaataattggtattttgttggataattttgaattatggagaaggagttaaaagtgtattttattagttggaataatttatttgagtttaatttgtttttaagagatatatagtggaaaaatttagaagtgtaaaatagtattaaagatatatagaaaatgaatgaaaagggtttttttgttgttgttttggaaagatggtattaaagttgttgtagaggatagagttattatgtaatgattaatatattaattaagttggttttgtgattttgatatattgagtggggtttgatttgtgtagtggtttatgataggtaaatattgtatgggaagtgtggtaatttttggaaaaaaatgttttttatgttgttttggtttttggttttgagtttgttttttttttttttatattgaagtaagattttagataagggaagttttatggtggagtgtttttttttttttaaagataatattaaaaattattaaagtaatttatgtttaaggtagaaaatttgaaaaataaagaaaagtattgtaaataaaataaaataaaaaaaattttataattttataaattatagtaaattataatttggtattaagttttttagttttgtttttatgtatatgtgtttttttttataaaaatgttattatattatataatttttattttatgttttttttttttgatttataattagattatgagagatatatttttgttttatgagtaggaatttgtgtttttttttgtaattttttaaaaaatttagattatgttagttttttgtttagagttttttaatagttttttgttttaaagtaaattttgaaggttttgttgtggtttgttaggttaatttttttttgaataattatttttattttgagttttgttagatagatttttttgttgttttttaaaaatattaagtttatatttgtaattatagtattttgggaggttgaggtgggtggattatgaggttaggagtttgagattagtttggttagtatggtgatattttgtttttattaaaaaaaaaaaaaaaaaaaaaaaaaaaagttaggtttggtggtgtgtgtttgtaattttagttatttaggaggttgaggtaggagaattgtttgaatttgggatgtggaggttgtattgagttaagattatattattgtattttagtttgggagatagagtgagatt

SEQ ID NO: 2538 - DNA, 2385 bp, Artificial Sequence
  chemically treated genomic DNA (Homo sapiens)
ataggtttttattattatgtttggttaatttttgaatttttttagtagagatggggttttgttatgttggttaggttggttttaaatttttggttttaagtgatttatttgttttggttttttaaagtgttgggattataggtttgagttattgtgtttagtttttttttttttttttttttttttttttttttttttttttttttttttttttaagatagggttttgttgtgttgtttagattggggggtagtgttgtgattttagtttattgtaatttttattttttgggtttaagtgatttttttattttagttttaagaataattgggattataggtgtgtgttattatatttagtttatttttgtattgttttataagagttgggttttattatgttgtagaggttggttttgaatttttggatttaagtgattggtttgttttagttttttaaagtgttgggattataggtatgagttattgtgtttggttttattgtataatttttttaatttttttgtatgtttgaaattttttattataaagtgttggggggggggataaaatttttatttgaaaatattagttagatattttttataaaatttttttttattgttagattaaggttgttatgagattatgttaagttaattgtttttgtgttttttattaatatgtttaggaagaaagagtagggagataattttgaaagaggttttgagggtgttagggagttttagggattagttaaggtgtttgggttttgtgtttgaggaaattgaggtttaggttgttttgtgttgttgtttagaatttagggaagtttaggatgtttttttttaagttatgttggggtgtttaggtttagtggagaagtggggtatggttatatgaatgatatgtagttggtagtatatagtaggtatataagtgtttgttgaatgaatatttatatgaaattggaaaggagttttttaaagatggagttagtaggagatagtgaagttgtttgtgtgggttgggggagtttgtttttgtttttgttttagtttatttttggtttggtttgagtattttgagaagtgggtttaggagaggtttttggatttttgggtttttggatagttagggtgagggtgttttgttatatttttaggagagagtatatttaaaataatttttttttttaaaaatttagtgttaatggattttagatgtttgtttgttatataatggggtttgttttaatagtgttaatttttagatgtgtagtttggaattaagaagtttattggttttttgaggatattgtgagttaagttgagagttgtttgggggagagatatggatgtgtagaattagggatgggagaggagttagggtgtttttttgttgtttattgggttgtttatttgttttgtagttgtttttagattgaaagataggaagggtgtttttgttttttttttttttagttttgattttgagtaggggtttttaggggataattatagataggtagtttggggagggtttgttttggaatttggtttaagtaggtttagttggatgagtttggagaagtttttggtttttttgtttttgaatggaaaatagaataatgttattttatttagagaggttattgtgtaaaatgaaatgaagtaagtagtatagtatggggtttagaaagttttgattttttttgagtggagagaataggggtttaagttattgagtatttttttttattttttttagtaatatggatgtttttgggtagtatgggttgtattttttttggaatattggaaaagagttaaggtggggagtttattattttttttagtggtttgttttatggttttgtagttttaatggatagaatatttttttgtttattgagttaaaggtggtttttgtgtgatttttaattggtttgagttttgttttttggagttttgttgagtaggttatatttttttttatttgatatttttgagtatgggaagatagagattgagttttttaattttttttttagtaggtagttgtagttatgatattagatggatgaagattaagatgttttaaggagagatgtttaaaattttaaataagaaaagttttaatgtttgggggaatgattttgtggttttttttgtgtagatgttaataaaatttgtatgtttttattttaatttaaagagaaaagggttaggtttatgtttgtaatttttataatgggaggttgaggaggattatttgagtttaggagtttgagattagtttgagtaatatagagagatttgtttttattaaaaataaaaaaattaattaggggtggtggtatgtgtttgtggttttagttaattgg

SEQ ID NO: 2539 - DNA, 2385 bp, Artificial Sequence
  chemically treated genomic DNA (Homo sapiens)
ttaattagttgggattatagatatatgttattatttttggttaatttttttatttttagtagagataggtttttttatgttgtttaggttgattttaaatttttgggtttaagtgattttttttggttttttattgtggggattataggtgtgagtttggtttttttttttttgaattggagtgaaggtatatagattttattaatatttatatagggagaattatagaattatttttttagatgttgagattttttttgtttgggattttgaatatttttttttagagtattttaatttttgtttatttgatgttataattgtagttgtttattaggaaaagggttgggagatttggtttttgtttttttatatttgagggtattaggtgaaagagggtgtggtttgtttagtagagttttagagagtagaatttagattagttgggggttatatagaggttgtttttggtttagtgaatggaagaatgttttatttgttggagttgtagggttatggaataagttattgggggaggtggtgagttttttattttggtttttttttagtgttttagggaaaatgtagtttgtgttgtttaggggtatttgtgttgttgagaggagtaggggaggatgtttggtgatttgggtttttgttttttttatttagggaaagttaaggttttttgagttttgtgttgtgttgtttattttattttattttgtataatgatttttttgggtagaatggtgttattttattttttatttaaagatagggaggttaaggatttttttaggtttatttagttaggtttgtttgaattagattttaaagtagattttttttaagttgtttgtttatgattgttttttgggagtttttgtttagagttaggattgaaaaaaaaggaagtgggaatattttttttgttttttagtttggggatagttgtagggtaggtgagtagtttagtgggtagtaagaaggtattttggttttttttttatttttggttttgtatgtttatgttttttttttgggtagtttttagtttggtttatagtgtttttagggggttaatgggttttttgattttaggttgtatatttggaagttgatgttattaaaataaattttattatataataaatggatatttggaatttgttagtattgagtttttagaaaaagaaattgttttggatgtgtttttttttaagaatgtggtaaagtgtttttattttggttgtttaggaatttagggatttaggggttttttttgggtttattttttaaggtatttaggttaggttagaggtgggttggggtagagatagagatagatttttttggtttgtataggtaattttattgttttttgttggttttatttttggaaggtttttttttaattttatgtaaatatttatttagtaaatatttgtgtgtttattatgtgttgttaattgtatattatttatatggttatgttttgtttttttattgagtttaagtattttaatatggtttaagaaaaaatattttggatttttttggattttaaatagtaatgtaaaatagtttgagttttagtttttttaaatatagagtttaaatgttttagttagtttttagaattttttagtatttttaaggttttttttggaattgtttttttattttttttttttgggtatattggtgggggatataaggataattgatttggtatagttttgtggtaattttgatttagtaatgaagaaagattttatgagaaatgtttagttaatatttttaaatggaaattttatttttttttttaatattttatgatgaaaaattttaaatatatagaaaagttgaaagaattatataatgaggttaggtatagtggtttatgtttgtaattttagtattttgggaggttgaggtaggttgattgtttgagtttaggagtttaagattagtttttgtaatatggtgagatttaatttttataaaataatataaaaatgagttgggtgtggtggtatatgtttatagttttagttatttttgaggttgaggtgggaggattgtttgagtttaggagatggaggttgtagtgagttgagattataatattattttttagtttgggtaatatagtaagattttgttttaaaaaaaaaaaaagagaaaagaaaaagaaaaagaaagaaaagaaaagaaagggttgggtgtagtggtttaagtttgtaattttaatattttgggaggttgaggtaggtggattatttgaggttaggagtttgagattagtttggttagtatggtaaaattttgtttttattaaaaaaatttaaaaattagttgggtatggtggtgggaatttgt

SEQ ID NO: 2540 - DNA, 2440 bp, Artificial Sequence
  chemically treated genomic DNA (Homo sapiens)
tttgtggttggggtttgtttggatttttgtttttgtgtgtggtttgtagtggtgtatttttaaggatggttgtttggtttgagtgaaagtgggagtgggagtagtagtttggtgtggtagaggttgtttttttttttaggttgtaggttgttgtttgttttttgttaggttgtttgtttgttggttttgtttggattttagtttggttgggtttggatgttgttgtagttttttattttggttttatttataggggtattttaatttggttggtggggtggggttggggatttgtggataaggttggtttgttgaggttagggaggaaaataaaaagttaagagaagaatttatttaaaatggtttttgtagtagttaaaatataaatagttattatttggtgaagtttagtttagatattttgtaaggatattttaatttattttgggtttgttttttttgttgtgttattgggttttgttggtttaaaatatagatttattggttattttggttgttgtttagatagaagtttattttaagtttgtttgtaggggtgagtgatgggtttgttttattgtgtttgtatttgtatggatgtgattgtggttttgattggttggtgttgagattgttttgttttttgttttgtgttttttgttttggagatgttgttgtgtttggttttgtttttttgggattagtggtagggttatgggggtggggtggggttggggttttgtgggttgagggggtggggtggggttttgtatgttgtagattgtaggtagggggtggggatttggtgtgtttgggtgttggtgggggtttagtgtttaggtggaggttttttaggtagttggttagtgatttggaagatttggggttggtgtttttgggggtgggggaggatgtggttggggttttgtgatataggggttttgtaggggttgaggttatgtgggtagatgtaaggagaagtgagggatttgtaggttaggaaaagaagattttgagtggttaagtgaatggagtagtttttatttgtgttttttgttgtttagtttggttttttggtatttttggtttttaatgggtttttttttaaggtttagtgtatttgggagttttttagttttggggattttgtagtgttttggatagatttttgtgaaattaggtgttgagttatggtgtatttatttttgggtttgttgtttttattatttttgtagtatttttaaggatagggtttagtgtttggtagagatttaattaattgttatatttttgaatttatttgttagtaggtaatttttgagtgtttattaaattttagatattgatataaaatgggatattgtggttaataagataaagtttttgtttttatggaataggtgaaagattaaatataaggggtaggtagtgataaatgttgtaaagaaaatagatggaagaagaagggaaattagattagggtttaggaattaggaaatttttaaattatgaaaggaggtatggagagtttgttttgtttggttgaatattttgtatggtgttttattattgtttttttttattttaattttggtagttattagttttttttgtgttttgtttgtttattgtgttttttaagtatttattaaaaaattgattggattttgattgtagaggtttattttattttaaagtagaaatgatttgagtttgatgattttaagagtagtttgtgggatatatttaggataagtatattttgattgtgttaggggttatgataatgatttagtagaggtttattaattttagagagagaatatttttagtttttttgaaattttagttttttgatggtttttagtttgtggttttaatttttttttgagtaatattttttattttttggtagatataagagatttttttagtttgaaaatagaggtagtagttttttgttgtttattttttttatttgtgtgtatttttgttatttgatttaaggttggttaagatgttttatggttttttttttttgttttttttttttttttaaatagatatttattaggtattaattatgttttaggtattgttttagatataaggaatgtagtattaaataagataaataatatttttgtttttaaggagtttataatttagttgagggtgagatagagagttatgtatagattttgaggatttttaattttgttaagttgttggtgagtgagtatattgagggttatttgtttgttgttgttttttggggatagtatgtttgattttttgaattagttgttttaggagttgaagttgaagttgaggtaggattaggtagttggtagttataatttttttagtttaaatattagaattataggttttaaagtttttaatagtgtttatgggagttttggtttttatgttttga

SEQ ID NO: 2541 - DNA, 2440 bp, Artificial Sequence
  chemically treated genomic DNA (Homo sapiens)
ttaagatatgagagttaagatttttatgggtattgttgagagttttggaatttgtgattttggtgtttgagttggagaggttgtggttattagttgtttggttttattttagttttagttttagtttttgaagtagttggtttagaaggttaagtatgttgtttttaagaggtagtagtaggtgagtagtttttagtatatttatttattagtagtttggtaaaattggagatttttaggatttatgtgtaattttttattttatttttaattggattgtaagttttttgagggtaaagatattatttgttttgtttaatgttgtattttttgtgtttagaataatatttggaatatagttggtgtttaataaatatttgtttaagggaggaagaaagataagaaagaaagattataagatattttggttagttttgagttaaatgatagaaatgtatatagatgagagagataggtagtagggggttgttgtttttgtttttaagttggagaaattttttgtgtttgttaagaagtgaagagtgttatttagaagagagttagggttataggttgaaagttattagaaaattgggattttaaagaagttaaaaatattttttttttggagttagtaagtttttgttaaattattattatggtttttgatatagttaaaatgtgtttattttaaatgtattttataaattgtttttagaattattagatttagattatttttgttttgaggtagaatgagtttttatagttagaatttaattagttttttagtgggtgtttagaaaatatgatgggtaagtagggtgtgaggagggttggtgattgttaaggttagggtgggagggggtagtaatgagatgttatatagagtatttagttaggtagggtaaattttttatatttttttttataatttaggaattttttaatttttaaattttggtttaattttttttttttttttatttattttttttatagtatttattattatttattttttgtatttagttttttgtttattttatgaaagtaagggttttgttttgttgattgtaatattttgttttatattaatgtttggaatttagtgggtatttaaagattatttgttaatgaatgaatttgagagtgtaataattagttgaatttttgttaaatattgggttttgtttttgaggatgttataaggatggtaggggtgataggtttgaaaataaatgtattatagtttgatatttgattttatggagatttatttaaggtgttgtagggtttttggggttggaaaatttttgggtgtgttgggttttgggaagaagtttgttgggagttaggagtattagggagttgggttgagtggtagaagatgtgggtggaggttgttttgtttgtttggttatttaggattttttttttttgatttgtgggttttttgtttttttttgtatttgtttgtgtggttttggtttttgtggaatttttgtgttgtgggattttagttatatttttttttatttttggagatgttagttttgggttttttagattattagttagttatttgagagatttttatttgggtgttgaatttttgttggtgtttgagtgtgttaggtttttgttttttgtttgtgatttgtagtgtgtaggattttgttttgtttttttggtttgtgggattttggttttgttttgtttttgtggttttgttgttagttttgggggggtggggttgagtgtagtggtgtttttaaggtggggggtatgaggtagggggtggggtggttttagtgttggttaattaaggttgtgattatatttatgtaaatatgagtataatggagtgagtttattatttgtttttgtaagtaagtttgaaatgggtttttgtttgagtggtagttgggatgattaatgggtttgtgttttggattggtgaagtttaatggtgtgatagggaaggtgggtttgagatgggttagggtgtttttgtagggtgtttgagttaaattttattaaataatagttgtttgtattttggttgttgtaggagttattttaggtaagttttttttttaattttttatttttttttttggttttggtggattggttttgtttgtgggtttttggttttgttttgttggttgggttagggtgtttttatgaatggagttgggatgaggggttgtggtggtgtttaggtttggttgggttggggtttgagtggggttggtgggtgggtggtttggtggagggtaggtggtggtttgtggtttggggagaggggtggtttttgttatgttaggttattgtttttgtttttgtttttgtttgggttgggtggttgtttttgggagtgtgttgttgtgggttgtgtgtaggggtgggggtttgggtagattttggttgtggg

SEQ ID NO: 2542 - DNA, 2422 bp, Artificial Sequence
  chemically treated genomic DNA (Homo sapiens)
agatggaagttggttggtatgttttgaaatggtgaggttttaggagatatgggtgggatttttttaagaattgttataaatttttgttttgaaattagattatttggatttaaatttttgatgtttttttttatttgttatgtgattttgggtaagttatttaagttttttagttttagttgttgaatagaaaatatgatagtttagattttattaggtggttgtgaagattaaaagagataaggtatgtaagatatttatagggtatttggtataaggtaaatatttaatagattttagttgttatttgtaattagtttatttattgtattgaaattgattgggggaatatttagatttagatgatgttatggggaaaaatagataagaaataataatttaaggttttatttaagagttatgtgatgtagagtgtgattagtggatagtattgtatatttggataaatatgaatatataaatttttgagttgttttttggatattagtttgtttataggaggattttttgtgtagttgatgaagtttatgtagttggaattaaaagtttttgtatttatgggttgaattggtagtagtaaattgattagggaattagagtatgatatttaagatagtgggaattagttgagatgtaggttataattatgataatagtaggtaatatttattgagaattttttgtgttaagttatgtgtaaaatatattattagattatgatatttttttattataatagtttaaggtggtgtttttgttatgatagtttgtttattttttttttagagtgtatgttaaaataattttttattgtaattagtggattttttagtagttttttttttttttttatttttttttggagtttggttttttataataagtttttaggtgtatttggagttgttatttgtaaatgtggtaggatttttttttattagatttttgtttttgtttttttttttgaagagtaaatatgttgtattagaaggaattagtggtttattgttattggtaaagttgaggtagtgggaggattattttttttttgggtttagtaatttttttagtggttagtagatagtagtataatggttagttagtgtgaaattgtgtaaattgttttataaataatttgtaatgtataggtaatagggagaggttatagtttatggataaatgattttttgttattttggggtattaaattagggataatttggattttattatggggatttattaattattatgggttttttgtatgtaagtttgttgggatttaggtttgtttggtgttttttgtggtattatgatgggggtaaaatatttttaagtagggttatgagaaagagaatgtaagtatttttaataaattagttaggggtgaattttgtaggagttaagtattttttttgtggaatttgttttttgaagaaatttttttgaagtgtagagaaaaatataataattttaataattaatatgtattgggtatttattttgtgttaggtattgtgttaagtttttttttttttttttttttttttgagatggagttttgttttgttgtttaggttggagtgtagtggtatgattttggtttattgtaagttttattagttgggtagttgggattataggtgtttgttattatatttggttaattattgtatttttagtagagatggggttttgttatgttggttaggttggatttgaatttttaattttaggtgatttgtttattttggttttttaaagtgttgggattataggtgtgagttattgtatttttgtgttaaattttgtgtaatttttataaatattttattgagtggatattattattattagttttatttttatagaggatgaagtgatagtttatagaggtttagttatttattttaggtaatatagttaatatgtggtgaatgtattagttagtttttgttaggttgtggtaataaatagtttattagttttagtggtttaaaattataagagtgttttgtttttattttatgttatttatggattagttgtttttttttatttgattttattataggatttaggttgaaatagtagtttttatttgggatatattatttttatggtagaagaagataagagtaagaaaattggtggaattggttatggttgtgaaagtttttgtttagaatgggtatatattatttttgtttatattttattgattaaaggtggttatatggttaagtttttttttaatggggtgaggaagtttattttttatattgggaggtattgtaatgaatgataattggggagagatatttaagttttttagaggaaaggtagagattagagaatagtaatataatttatgtagttgagtgagattagatttttgtgg

SEQ ID NO: 2543 - DNA, 2422 bp, Artificial Sequence
  chemically treated genomic DNA (Homo sapiens)
ttataaagatttgattttatttagttgtatagattatattattattttttgatttttgttttttttttaagagatttagatatttttttttaattgttatttattgtagtattttttagtgtgaggagtaaatttttttattttattgaaagaaggtttggttatatgattatttttgattaatgaaatgtgagtagaggtgatatatgtttattttgagtagaagtttttatagttatggttagttttattagtttttttgtttttgtttttttttgttatgagaatagtatgttttagatagaggttattattttagtttggattttgtaataaagttaggtaaaggagagtagttgatttatgagtggtataaaataggagtaaaatatttttgtgattttaaattattgagattggtggattatttgttattataatttaataaaagttgattaatgtatttattatatattggttatattgtttaaaataaataattaaatttttgtgagttattattttattttttatgaaaataggattaataataatagtatttatttaatggaatgtttgtgggagttatataagatttagtataggggtgtggtggtttatgtttgtaattttagtattttgggaggttaaggtgggtagattatttgaggttaggagtttaagtttagtttggttaatatggtaaaattttatttttattaaaaatataataattagttgggtgtggtggtaggtgtttgtagttttagttatttggttggtggagtttatagtaagttaagattgtattattgtattttagtttgggtgatagagtgagattttattttaaaaaaaaaaaaaaaaaaaaaaagatttagtatagtgtttggtatagagtaaatgtttaatatatgttaattgttaaggttattatgtttttttttgtgttttaaagagatttttttagaaagtaagttttatagagaaaatatttggtttttatagggtttatttttggttggtttgttaaaggtatttatatttttttttttatggttttgtttggaagtgttttgtttttattatgatgttataagaagtattaagtaggtttgagttttagtaggtttgtgtgtgggaaatttatagtagttaatgaatttttatggtgaggtttggattatttttggtttaatattttgaaatggtagggagttatttatttatgagttatggtttttttttgttgtttgtgtattatgagttatttatgaggtaatttgtatagttttatattggttggttattatgttgttgtttgttaattattaggagggttgttgaatttagagaaaaaatggtttttttattgttttggttttgttagtgataatgagttattgattttttttagtgtagtatgtttgttttttagggaagagaatagggataaaagtttgatgaagagaaattttgttatatttataggtagtaattttaaatgtatttgggggtttgttatgaaaggttggattttagaaaaaaataaaaaaaaaagagagattattgggaaatttattggttgtagtgagaggttattttaatatgtattttgaaaggagagtaggtaggttgttatgatagggatattattttggattattgtgatgagaaaatgttataatttggtgatgtgttttgtatatggtttgatatagaaaatttttagtaaatgttatttgttgttattatgattatgatttgtattttagttggtttttattattttgggtgttatgttttaattttttggttagtttgttattattagtttagtttatgggtatagaagtttttgattttagttatatgggttttattaattgtgtagaggatttttttataaataagttaatatttgaaagataatttaaaagtttatatatttatatttgtttaaatatataatgttgtttattggttatattttatattatatagtttttggataaaattttgggttgttgttttttgtttatttttttttataatattgtttaggtttgaatgtttttttagttagttttagtataataaatagattagttataaataatagttaaagtttgttgagtgtttgttttgtgttaggtattttgtaagtgttttgtatgttttattttttttaatttttatagttatttggtaaagtttggattattatattttttatttaatagttaagattaaagggtttaagtgatttgtttaaggttatataataaataggaaggaatattggaggtttgaatttaggtagtttgattttagagtaggagtttgtagtagtttttgaaggggttttatttatgttttttggagttttattattttagggtatgttaattaatttttattt

SEQ ID NO: 2544 - DNA, 2186 bp, Artificial Sequence
  chemically treated genomic DNA (Homo sapiens)
gtgtgaaaatgtttttttaattatattgaatgggaggatttttgattatttgtattttatttgaaaatttagtatttggttgggatgtttgggtgggtggaggattttgttgtgttgggatgaaatagtagggatatgtttaaaatataagaattatgtgtggtggtttatgtttgtaattttagtattttgggaggttgaggtaggtggattataaggttaggagtttgagattagttttgttaaaatggtgaaattttgtttttataaaaaaaattaaaataaaataaaaaataaataaaaaaaattattaaaaaaataattagttgggtgtggtggtgggtgtttgtagttttagttatttgggaggttgaggtaggagaattgtttgaatttgggaggtgaaggttgtagtgagttgaaattgagttattgtattttagtttgggtgatggagtgagattttgttttaaaataaaataaaataattttatgttaagattgttttgaaatataggtagaaaaattaggtaaaaaatgttaaatggttaattattttggtttagttatatatttatttgaaagtttgttttttttatttttagttttagtgttaagaatgtaaaatagggtgtttagaagtttaagtgataaagatttttttattgagagttaagggataaaatttattatagataagtttagtttttttattttttttggatgtttttttttgattgttaaagaagtagttgttttttgggtagttgttaggaaattagtttggttttgtggtgttgtttttattttgtagggtgtaagaggtgtattttttgtgttttttttgtggttaaattggggtgtgggaattttttttagagaagttgtgagttggggaaattttgttattgatttattgtggtgttgggaaaggggatgtggggtttggaagggttagattttgtaattttgggattgatatttttttttttttttattttttttagttttggattgggttaatgaaagtttgaaaaagaaaaaaaaaaaaaattaaattttaatgtagttggagtgtaaaggttgtttggttttgttttttggtgggggaatgtgttgtgttggaggtgtgaataggagttgtagatggtgagttttattgttgtaaatgttagggtagtgaagttgaatagaaaattttattgttttaaaaaggtagttgtttgttttttttttttttttttgttagggtgaggggttttttaagtttgggatttgtgagttgtgtggaggattttgttaaatttgagtattgtgtggtgttttttaagagtttgaataatgggaatttagtaaaaaataagttggttttagaaggtagttttttttttttttttgtgtatgggttataattgtttttagtttttaaattgttttagtagaggttgtgtggagagagtagagttgagggatttagtgtaaggtgggagttaagtgtggttgttttaagaatgtggagagtgtgtgtttgttgttagttggtttgggttgtgtgtttttgttgttattgtgtgttttttgtttgtttgtttttttgtttgttggttttaaagtttttgttaggatttatgtttatatgttattttttgtatggaggtatggttagtttttagttttgtgttttttgtttttttttagtttgtgttggagttataatttttaggagtatggattgaaggtgtttttgttttagtgtttttttgagattttttgtgtttttttttgttttttttggttgtttttattttggggggttttttgttttttttgttttttttttttttttttttttttgtaaatatgttttttttttttttggggttttggaaggagttgtttgtttgaagtttggagatgttgtgttgtgtttagttttgttgttgtttgttggtttttgggttgtgttgtgttgttgatttaagttggggatttttggttgtttgttgttgttgtttgtggtttttgtttgttttaggtttggggtattgttgttggttgttgattttgtgttttgtttgattggtttttttttttttaaatggaaagtagtttttttttgttgagaggattgtttttagtgtggttttgtgtttttggttattttttgagattttttggggggtgtt

SEQ ID NO: 2545 - DNA, 2186 bp, Artificial Sequence
  chemically treated genomic DNA (Homo sapiens)
agtgttttttggaaaattttaaaaagtgattgggaatgtagagttatgttggggatgatttttttggtggagaaaggttgttttttgtttaaaaaggagagagttgattgggtagggtgtggagttggtggttggtggtgatgttttgggtttggggtaggtagggattgtgggtggtggtggtgagtagttgaggatttttaatttgagttggtagtgtagtatagtttgagagttggtgggtggtggtggggttgagtgtggtgtggtgtttttgggttttaggtaggtagttttttttagggttttgggaaggaaggaggtatgtttgtgagaggggaaggggaggggagaggtagggggagtggagagttttttaaaatagaaatggttggaggaaatggaggaaaatataaaggattttagaggggtgttggggtgagggtgtttttagtttatgtttttgaaagttgtggttttggtgtaggttgggaaggaatgaagagtgtggggttggaaattggttatgtttttatataggaagtaatatgtgagtatggattttggtagagattttaaagttggtgagtgaaggagtgagtgaatagggggtgtgtggtggtggtgggggtgtgtagtttgggttagttggtggtgggtgtgtgttttttgtgtttttaaagtagttgtgtttggtttttgttttgtgttgggttttttggttttgttttttttgtgtggtttttattgggatagtttggggattgggggtgattgtagtttgtgtgtggagagaggagggaggttgttttttggggttggtttgttttttgttggatttttgttgtttgagtttttaaaagatgttgtatggtgtttgggtttggtgagattttttgtgtagtttgtggattttggatttgaggggttttttgttttggtgaggggaaagggggagggtggatagttgtttttttaaagtgatggggttttttgtttggttttattgttttggtatttgtagtggtgaggtttattgtttgtggtttttgtttgtgtttttaatatagtgtatttttttgttgggaaataaagttgagtggtttttgtattttggttatattgagatttaatttttttttttttttttttttgggtttttattggtttagtttaaggttggggaaagtgggggaggggaggaatgttgattttaggattgtgaaatttagtttttttgagttttgtatttttttttttggtgttatgatggattggtggtggagtttttttaatttgtagtttttttggagaaggtttttgtattttggtttggttgtggggagggtgtaggaagtgtgttttttatattttgtagggtgaaagtagtgttgtggggttggattgattttttggtagttatttggggagtggttgtttttttagtaattggggagaggtgtttgggggaaatgggaggattaggtttatttgtaatgagttttgttttttggtttttggtaagaagatttttattgtttagatttttaagtgttttattttatatttttaatgttggggttaaaagtgggggaggtgggtttttgagtaaatgtgtaattgagttaaggtaattagttgtttgatattttttgtttaatttttttgtttgtgttttaaagtgattttgatgtgggattgttttgttttgttttgagatggagttttgttttgttgtttaggttggagtatagtggtttgattttggtttattataatttttgttttttgggtttgggtgatttttttgttttagttttttgagtagttgggattataggtgtttgttattatgtttggttgattatttttttggtggttttttttgtttgttttttgttttattttggttttttttgtagaggtggggttttattgttttggtaaggttggttttgaatttttgattttgtgatttgtttgttttagttttttaaagtgttgagattataggtgtgagttattgtgtatggtttttgtgttttaaatgtgtttttgttgttttattttaatatggtagggttttttatttatttaaatattttaattggatgttaggtttttaaataaagtatagatggttggagatttttttgtttgatgtgattaaggaagtatttttatat

SEQ ID NO: 2546 - DNA, 2420 bp, Artificial Sequence
  chemically treated genomic DNA (Homo sapiens)
agggaggtttaggaatgggatttgttttttttttattttttatgttgggttttggagaatattttaggggtggggaaatttttatggtaaaaaaagtttaaaaaaaattttattgtattattatattgtgtttttaggtttttgagtttttgaatatggtttttttatatttataaggattttgtttataatgttttattttatttttttttgtttgttaggtaattttagttagagaggggatgtttataatttttttttttggggttgtgggtttggtggatatgtggtatttgtttatttttttggatatgttgtttttattgttgttggatattattaaatatggtaatgtttatgttggttttttatttttttttaagtagatggggatagattttgtgtgtgtatgtatgtgtatttgtgtgtttgagtatgtatgtgtgtgtttattgtaggtaggtgttatgggttatgtgttttagtttggatttattggtttagatatttatgaggttagagggtttgtaaagtttttttggttgtgttttttttttataatttttagtaaattttttggttttttgggtttaaggttttagtttgttttttaggtttttttaggttggtggggattgtaggttttgttatggagtttggagtttagtgtttgtttgggatatatgaggggttttgagggtttatatgttttttagtttgggaagttatttagttgggttttggtggggtttagtagaattttgggtatttttatggttttttgatattttagtttttgttgtttttatttatatggagatagtttttttttttttatattttttattttttatgatattttttggtatgattttgattattttagttggataattaagttttttaagttttttatgttgttttattttttttagtattgttgatttaattttagggggattttttttttgatgtttttatgttttgttttttttttttgtagattttttggtagtttttttgtgtagaatagttatttggttttattttttttgtaaggttggagttgttgttttatttttttgatttatatataataataaaaaaaattatttttgttatgtgtttttttatttttattaagtggttgaaatttaatttgattgtttgagtatttttggttggatttgggttggagttgatgggattttatgagggttgtaaaagttaagtttttaatatgttttaaataaattggtgtgtaaaggagaaatgttagaagaaggaatatggttgtagatgggaggtttgggaatgttagttgtagtattggggtataggtggttttaataatgtatataagtttggttgtaagttgtttttataagagtagaagaggttgtagaattatttttaggaggttgagattaaattttttggtttttgagtgtatatagttttgtatggtttttaaaatatagattttaggattatttataataatataaatttgtggttaattttgttgaatttttatttagatttaagttgtgttgttagtagaaatgtaattgtgttagagaaaaattgtttatattttttgagatattgtgataatgaaaaatagtattataaatttttattaagtaagaagaatattaattgtattttatgttgtttttttgggttagtatgttgatatagatatgttttattttagtaaaatatggttaatttttgtagtatggtatttatttttttttttaattatatataattgtatagtttaatttattttaatgtttgatgttgaaaagtgtatatttatgaattaagggttagtttgggagggaggagaattataaatgggtataattgtagttttttgggggttgtttatgagtgattttaaagaatgatgatgtttattttgaatttttattagtgaaagatagtagggttgtttttagttaagatattgttttaagaatgtagataataggataatttgtttagttgtttattatattagtggtttttttttggataagtaggtaagaaagattaaagatgtgggttttatatattttgtgatgtgatgaaatttaggtatatagatagtattagtaaatgtgtaattgaatattaaaatgagtaatgtggttttaggtagtatagttgtagatttttgtggataagggagagtgtttggaattttgttggatgatagtttttttagggggaaaagtaggatttatttgattattagtgtaatttattttagggttttttttggaatagtgtatttagttttgtaattgtattttagaaaaattatttttaagttttgattataattaattaattaattatgatgaatgttgatggtgatttagtaaaagtggaatgatgatttaggg

SEQ ID NO: 2547 - DNA, 2420 bp, Artificial Sequence
  chemically treated genomic DNA (Homo sapiens)
ttttaagttattattttatttttattaaattattattaatatttattataattgattaattaattatgattaaagtttaaaggtgatttttttgaaatatgattgtaaaattagatgtattgttttagagagagttttaaagtgaattgtattaatggttaaatggattttgtttttttttttgagaaaattattatttaatagagttttaagtatttttttttgtttatagagatttgtagttgtgttgtttggggttatattatttattttaatatttaattgtatatttgttgatgttgtttgtgtgtttggattttattatattataaaatatgtggaatttatatttttaattttttttgtttgtttatttaaaggaaaattattagtgtggtaagtaattagataaattgttttgttatttgtgtttttagaatagtattttaattggaggtagttttattgttttttattggtaagaatttagaataaatattattattttttgaaattatttataagtagtttttaggagattgtaattatatttgtttataattttttttttttttaaattaatttttgatttataaatgtgtattttttggtgttaggtgttagaataaattagattatataattatgtataattaaaggggaaaatgggtattgtgttgtaaagattagttgtgttttgttgaagtaaagtatgtttgtgttagtgtgttggtttagggaggtagtatgaaatataattaatgttttttttatttaatgggggtttatggtattgttttttattattatagtattttaagaaatataaatagtttttttttaatgtaattgtatttttattgataatatagtttgggtttaaatgaaaatttagtagaattaattataggtttatattgttatggatgattttggaatttgtattttaaaagttatgtaaaattgtgtgtatttaggagttgagaagtttgattttaattttttgagagtggttttgtagttttttttgtttttgtagaagtaatttatagttaaatttgtgtgtattattaaagttatttgtgttttagtattatggttagtatttttaagttttttgtttgtagttatgtttttttttttaatgttttttttttatatgttaatttgtttgagatatgttaaaagtttgatttttataatttttataaaattttattgattttaatttaaatttagttagaagtgtttggataattagattgagttttaattatttgatggagataaagaaatatatagtaagaatgattttttttattgttatatatgagttaagggaataaaatagtaattttggttttgtaagggagatagaattggatggttgttttgtataaaagggttgttaaagaatttgtagagggaagaaatgaggtatggaggtgttaagagaaaggtttttttgaggttaaattaataatgttggggagaatggggtggtatgaggagtttgaaaagtttgattgtttagttaggatggttaggattatattaagagatgttatgggggatgagggatgtgggaggagaaaagttgtttttgtgtgggtggaggtggtaggggttggagtattaggaggttgtgggggtgtttaggattttgttgagttttattgaggtttggttgagtgattttttaggttgggggatatgtgagtttttggggttttttatgtattttaggtagatattgagttttaagttttgtaatggggtttgtggtttttattggtttggaaggatttggaaaataggttgaggttttgaatttagaggattagggagtttgttgggaattatggggaagaaatatggttagaggagttttgtagattttttgattttatgggtgtttgagttagtaagtttagattaaaatgtatgatttatagtatttgtttataatgaatatatatatatatgtttggatatataggtatatatgtatgtatatataagatttgtttttgtttatttaaggaaggataaggggttaatatagatgttattatgtttggtaatgtttagtaataatggaaataatatatttaaaaagataagtaaatgttatgtgtttgttaggtttatagttttagaagaagggattgtaagtattttttttttgattggggttatttgatgagtagagaaggatggagtgaaatattgtgggtaggatttttatgggtatgggagagttatgtttaggaatttgaggatttaagggtatagtgtggtaatgtagtggggttttttttagattttttttgttgtggaaatttttttatttttgaaatattttttagaatttaatataaaaagtaggagggaggtagattttatttttgggttttttt

SEQ ID NO: 2548 - DNA, 2437 bp, Artificial Sequence
  chemically treated genomic DNA (Homo sapiens)
tttgagaatttaatgatgtgggtgatttgataggaggtggagtttaggtggtaatgtttgtttgtttgttgtttattttttgttgtgtagtttggtttttaataggttatgaatgggtatttgtttttagtttaggagttggggattttgatataaagttttagattgtgtttgatatagattaagttttagagaaattttgttgttgttatgattattattgatattattgatattattgatattattattaggttgggtatggtggtttatatttgtaattttagtattttgggaggttgaggtaggaggattttttgagtttaggagttagaggttggtttgggtaatatagtgagattttgtttttagaaaaataaaaaaataaaaaattagttgggtgtggtggtatgtatttgtagttttagttatataggaggttgaggtaggaggattatttgaatttaagaggttgaggttgtagtgagttatgattgtgttattgtattttattttgggtgatatagtgagattttgttttttaaataaataataattaatttaaaaataaaagtattagtagtagtagtagtagtagtagtagtagtagtagtagtagaagtatggattaatttaagggggaaaaaaggagggagtgggattgaggtaaagtaagttgttatttggagaaaaaggtaaagaagatgattagatagatgtgtgtgtagatgtttatattatttttagagatttaagagattggtggtagtggtggagggagtggggatttgagggaggggaaaggatattgattttttattttttgtttttttttatgttgtttgggttgtttttttttttttgtgtatttgtgtggatatttaaaattaaatattatagaaagaaattttgtaagaggtttttttttttagtgaaagttttaaattgttttttttagttttgtttttttttatttttatattttggtttgtgggtggtttagtttggttttttatttttgttggtgttttgtgtttttggttttggagtaggtttgagttggaatgttttgtaagaaagggggttttttagagttttttagagtggttttggttttgggtagttaggggtgtggggttttggggaggggggttttggttgattgatgagaattttaaatgttttttagttttggttgttaattatttttagattggttgggttagggttagggttgttgttgtttggttttataaatagtttgttgttttagatggtggttggttttagtttggtgagtaggtttatgggggattggggggtggtagtaggtggaggatttttattttattagttgttttagttgttatatttttatattgttttgagttggggattttgggttagaaggggtggtagaaattgaatttattgtttagaggagggaaattgaggtttggaaggggtaatgtgggtggtggttaaggtggggggaagatagagatgtaaggggggtgttttttgagggttgatgttgggtttattttatttttgtgaatttagtatattatgaggatgttgtaaagatttgaggagggagggaaggggggtattattgttagttgggtttaaattttggttttagtttttattttttgagtgaataaattatttttatttttagttttagtttttttatttgtaaaatggggatggttggagtataggattgttggaagatttaatgatttggtttttgtagatagtttgtattttatatatggtgtaggtgttgaatatagttttttttttttttttttttggaaattttttttatttttgttttttttgttgttggagagtatagtggttttttttaggaagttattttgatttttatttagatttttttttttgtgttaggtattgtgttttttttatagttttttttatagggtttttttttgatataattggtatttgatgtttttgtttttttgaaaataaggaaatagagggttagggaagtaattggtatttagtgttgttagggttttgttttttgtagatgaggagataaagggttagggaggtagtgggatggatatgttgaggttgttaggaaaagatagtttgatgtgtatttggagttgtttttgaaggttttatagaatttggtatagtgttaggtaatttggttgttttttttgttatatttattaattttagagtttatattttggtatagaaggaagagatttaggttggtgttgggttgtaatattttagggaaaggggtaaggagttttgatttgtttttatatttgtttgtttttaaattgggttggattttggttgggtggttgttgggtggtagttttgttttaggatatttggtagtaggataaggtgggggagttagttgttttgtgagttt

SEQ ID NO: 2549 - DNA, 2437 bp, Artificial Sequence
  chemically treated genomic DNA (Homo sapiens)
gaatttatagagtaattggtttttttattttgttttgttgttgggtgttttgggataaggttattatttagtggttatttagttaggatttagtttagtttggagataggtaggtatgggagtaggttaaggttttttatttttttttttgggatattatgatttagtattagtttggattttttttttttgtgttaaggtgtgggttttggggttggtgggtgtggtaggagaggtagttgggttatttgatgttgtgttaggttttgtgagatttttagagatagttttaggtgtatattaggttgtttttttttggtgattttaatatatttattttattgtttttttggttttttgtttttttatttgtaaggggtggggttttaatagtattaggtattagttatttttttgattttttgtttttttgtttttaaaaggataagagtgttaggtgttagttgtgttgaggagagattttgtgagagaggttgtgggaaaagtatagtgtttggtataaagggagaggtttgagtaaaagttaaggtggttttttggaggaggttattgtgttttttggtggtaggagaagtaggaatagaaggagtttttggaaaaggaagagggagaagttgtgtttagtgtttgtgttgtgtgtggagtgtaaattgtttgtaggagttgaattattgaattttttagtaattttgtattttagttatttttattttatagatgagaaaattgaggttgggggtggaaataatttatttatttagggagtaaaagttggagttagaatttaaatttagttggtaatgatgttttttttttttttttttttgggtttttatggtatttttatggtgtgttggatttatagaggtaaagtgaatttagtattaatttttaaggagtattttttttatatttttgttttttttttattttgattattatttatgttgttttttttgggttttagttttttttttttgagtaatgggtttagtttttgttattttttttggtttagggtttttaatttagggtggtgtggaggtgtggtagttgaggtggttagtgaggtgggggttttttatttgttgttattttttagttttttatgaatttgtttgttaggttggagttagttgttatttggagtgatgggttgtttatggagttaggtggtggtggttttggttttgatttggttaatttggaagtgattagtagttggggttggggagtatttggagtttttattagttagttgggatttttttttttaaagttttatatttttggttgtttagagttagggttattttgagggattttgaggagtttttttttttgtagggtattttagtttggatttgttttaaggttaggagtgtagaatattagtagaggtgggagattagattgggttatttataggttgggatgtgggggtgggagggggtggggttgagagggatgatttggggtttttgttaaggaaggaaattttttgtagaatttttttttgtagtgtttggttttgaatatttatataagtgtatagaaaaaaaggaataatttaaatagtgtggaaggggataaagggtggaaagttggtgttttttttttttttttaggtttttattttttttattattgttgttagttttttgggtttttggagatggtgtgaatatttatatatgtatttatttggttattttttttatttttttttttaagtagtagtttgttttattttagttttatttttttttttttttttttttggattaatttatatttttattattattattattattattattattattattattgttaatgtttttatttttaaattaattattatttatttaagaggtagagttttattgtgttatttagggtggaatgtagtggtataattatagtttattgtagttttgattttttagatttaagtgatttttttgttttagttttttgtgtagttgggattataggtgtatgttattatatttagttaattttttgtttttttatttttttagagatgaggttttgttgtgttgtttaggttggtttttaatttttgggtttaaaggatttttttgttttagttttttaaagtgttgggattataggtgtgagttattgtgtttgatttaatgataatgttaataatattaataatgttaataataattatagtaatagtaaagtttttttagggtttagtttgtattagatatagtttgaggttttatattggggtttttaatttttggattggagataggtatttatttgtggtttgttaggaattgggttgtatagtaggaggtgagtagtagataagtgagtattattgtttgaattttgttttttgttagattatttatattattagatttttaga

SEQ ID NO: 2550 - DNA, 2383 bp, Artificial Sequence
  chemically treated genomic DNA (Homo sapiens)
ttgtttatttgtttttgggtggtagttttatttttgttttttttggttattattgtgtttttagattttaataaagtattttgtataagaaagtgtttagtttatagttgtagaataaatgaatgaatgaatgaatgaatgaatgaatggaaagtgtttagttttatgtttgatttttagtaagtatttgaaatttaatgttgtgtggtggtgttagttttggtttttgatttttagttttatttaattttatttttattagtttggtgtttgtgttttttttgtttggttagttttttgttgtttgtatagttttttttttgggttaggatgatttttgagggaattgtgggtttgtatggttggttttttttggttttgtttttagttttttttatattttttgggggtagaggtttttgggaaataggttttgaagtttttttgggttagatttgttggggttttttttaggtattgtttgatgtgattttattagtgaataaatggggatagtgagatttagagaggggtagttatgtttgatgttaggttttggggtttttaaaatatttagggaagtttttaggattttggtttttttgttgtttttggaatagagttgagtttaggtgtttgttttttagatgataaaattgaattttgttataggttttggagttaggtttgaattttagtttttttattttttggttgtgtgattgaggtttgttatttggtttttttgaggtttagtttttttgtttgtaaaatggtattttaatggtatttaatttatggaggtgtttggggggataaggttagttattttgtaggtaggtggggtttttggttttttttatggggttttgggatttttggttttggaatttttaaggtttagtttttttagggtttgtatggttttttttttgttgggataatttatagttttagggttatagttgttgttgttttattttttttttttttttgattttttttttttttattttggttttatttttttagaattagtttgtttttgttttttgtttttatggttttataaatgagttatgggtttgatttgatttaattttgttgtaattgttatttttttaagtttgtttttttttatttggttatttatgagattataaaaatttaaataggatggggttttttttagtttggttttttggttttttgggattttgggttagggttagtagtttttggagattgaggtggggtttgtggagtttttgtggggagggatttggtgtttttagtaggattgggtattttgagttttgggttgtagttttgttgttggatagttttgagagaattgtttgagttttttgatttttttagtattttttttagtaggttttagaatagggaattaaaatttaggtatttttgggttagaaggtgaaaggatgagtaaggtggtttggtgttggttttggtgaattggagagaataggttttttttaggggatggtggtttttgagttagtaggtggtttggatttttttatttagtaagagaagttagaagtttgagattgtatgtgaaaagttttgatttttaaatgttggttaatgagttaaattaaaaataaataaataaaatttgattttgtggatatttgtggttttgtgggttatttttggtttagaaggttttaattttagttgtggtagttgtgtttttagtttttttatttttttgtttgagtagttttttttgtttgaaattttttttttttttttttttattttagttatttttattttttgaattttggtgtgttttttgtttgtagtttagaagagatgatatttgttttatttatgtttgtttttttaaggtgtttagttgtttttaatttatttttgtttttatgtttttttttttatggagggtttgttttgtttgagattgtttttgtagtgggggaaattagttttttagttgttaaaagttataatatatattttgtttgttttattatttatttttaaaatggggtatgatatttttttggttatttaaaaattgaagatgtgaggttgatgtttttagggatgtgtgttgggtggtaggagttaggtgtggggttaaggagtgggggtggaggaggaagttaggtttttagttagggggttgagggttgtttttttaaagtttgggtatggatatgtgattagggtttattaattatatgtagttatgttagatttatgaattagaagttggaaatgttgggggttgattgtttaggattttgttttggggtgggtggggttgtagtttggttatttttttagaagttgtagtgggttagttttgggggtagtgattagggtt

SEQ ID NO: 2551 - DNA, 2383 bp, Artificial Sequence
  chemically treated genomic DNA (Homo sapiens)
agttttggttattgtttttagaattggtttattgtagtttttggaaaaatagttgggttgtagttttatttattttagaatggagttttaagtaattagtttttaatatttttaatttttgatttataaatttggtatggttgtatgtgattggtgggttttggttatatgtttatatttaagttttggaggagtagtttttagttttttggttggggatttggtttttttttttgtttttattttttggttttatatttggtttttattgtttagtgtatatttttggaggtgttggttttgtgtttttggtttttaaatgattaaagaagtattgtgttttattttagaaatgaatgataagataggtaggatatgtgttatgatttttaataattaaggggttaattttttttattatgaaggtggttttaaataagatagattttttatggaagagaaagtatagaaataaaagtgaattgggaataattaggtgttttgggaaggtgaatatggatgaagtagatgttattttttttgagttgtgaataggagatatattgaggtttagagaatgagagtgattgagatgaggaggaagaaggagagagttttaggtagaggggattgtttaggtagaagggtggaaggattgagaatatggttgttgtagttagaattggaattttttagattagaggtggtttatggggttatagatatttatagagttaggttttgtttatttgtttttaatttgatttgttggttaatatttaaaaattaggattttttatatataattttagatttttggttttttttattaaatgggaagatttgggttgtttgttggtttagaggttattgttttttgaggagagtttgttttttttagtttattggagttagtattaggttattttatttatttttttattttttggtttagaggtgtttgggttttggttttttgttttaaagtttgttaaggaggatgttggggaaattagaaagtttgaataatttttttaaggttgtttagtaatagagttgtagtttgggatttgggatatttagttttgttggggatattaagtttttttttatagaagttttatagattttattttagtttttaggagttgttgattttggtttggagttttgggggattaggaggttgggttggggaaggttttgttttgtttaggtttttgtggttttgtgagtaattgagtggaaaaaaataagtttgaaaagataataattataatgaaattaaattaaattagatttgtgatttatttatggagttgtaaaaatagaaaataaaaataagttggttttggagaagtgaggttagggtgaggaagggagaagttggggaagggaaaaaaataaagtaatagtagttatggttttgggattgtaaattattttagtaaggagggaattatgtgggttttggaggggttgggttttgggggttttggagttaggagttttaggattttgtgggagaggttagagattttatttgtttgtaggatggttgattttgtttttttaaatatttttgtgagttgggtattattagggtgttattttgtagataaggaagttgagttttagagggattaagtgataaattttgattatatagttaggaagtaagaggattgagatttaaatttggttttaaagtttgtaatggggtttagttttgttatttagaaaataggtatttgagtttagttttgttttaaaaataataaagaagttagagttttggaagtttttttggatgttttgggagttttgaagtttgatattggatatggttgtttttttttaggttttattgtttttatttgtttattaatggggttatattaggtaatgtttaaggaaggttttagtgggtttgatttaggggagttttaaagtttgttttttagaagtttttgtttttgggagatgtaagaggagttggaggtagagttagagggagttagttgtgtaggtttatgatttttttagaggttgttttgatttagggaggagattgtgtaggtagtaggaagttggttaggtagagaaagtatgggtgttgggttgatgagggtgggattggatggggttagaaattgggagttaaagttaatattattatatggtattgggttttaggtgtttattaagggttgggtgtggagttaagtattttttatttatttatttatttatttatttatttatttattttgtaattatggattgagtatttttttgtatgaggtgttttgttgggatttggggatatagtgatgattaagagagataaagatggagttgttatttaggagtgggtagataa

SEQ ID NO: 2552 - DNA, 2495 bp, Artificial Sequence
  chemically treated genomic DNA (Homo sapiens)
atatagagggtatagatttttttttattttttttttttttataaaagaaatgtaaatagaaaatataaataagagtaaaattttatgtaaatttattatttaattatggttaatttttaatattattgtttttttttaaaattgggagtttgggattatattggatttattatttggtaatagattttgattttgtaatatatttttattgtaattttatattattatttttatggttatagatttggtttatagttgtgaaagtagatttattataatgggattagttaattttttttttttggatattaggatatttttaattttttatttttatatagatatttaagtgaatgaagtaaaatgtttgtatatatttttagttatttaaaggtatgatgttagattgtttttttttatttatatttttattatattagaatgttgattatagttatttttgatggtatgatgtgagattattattttgtttttatatttattttttttaaatgttttgtaatgaataggttttatttgtataaatataatattatttaaaatgatgttatgaaaatttttatatgattattgtttttatggtaatggtttgttatggttgtttgtaattttatataggggataggttgtaatttatttaattattttttattattgattggttgggttttttttaatgtttttaagattgttatataggaaatttattttatatttggggttatgtttttagggagtagtttagtaaaggttggtgaatagattttatatttttggtttattttgttaagttgtttttttgaaaagatgttttaatttttttttttattggtagtgtgtgggaatgtttgtttagttgtttttttttttttgagatggtttaggtttttggatagttgtattttttgttaggagggtaagagaaagtaggaaataatttggttagtaagtgattttagatttagagttaggagtgatttttaataagtttgatttttagaatagaatttgtagagaaaaagaaagtaagtaaggaaaaaaaaaaaaaaatttttttttattggaaaaaatatatatatatatagattaaaataatatttggtatttatgttgtatttttaaaattttttaaatgttttataaatattagttaattaattaagttgtttaaatttggttgtagttggtggagagagtttgagaggagttaaaaaaaaaatgggggagttagtgttatataattttagattttattgttgtttgtttggggtgtgattataggtttttggttgtattataagaatagttttgttttaatatgttgtatgtttgattttgtagttttttttgtgttttttgtttttttattaattgttgatttatagttttttgtggtgttattgataaggataataataattgtaagttaggttgagttttgggttttgggtttgtatttttttttggatatgttagtattaattttatttaatatatgaagagagaggagatttgtttagggttatggagttaatgatattttttttttttttatttattattgtatttattttgtatatttttattgatgatattgtgttttaggtaggaggttggaaatagttttttgtggattttatattttattattgggaatgtgataatttagagaaaattaaatatgtgaataatatagttatgtgataataatgggaataagaattaaaatttatttagtatttatgtagtaggtatattattgtgttagggtttttatgattgtgttggggtggatgttggaattttattttatggatgatggaatgggggtttagggaaggtgggtatagaggtggttaagaggggagttatgttgttatttaggtttgttggttttagtaattgtgtttttttgaggtagtttttttagttggtttagttttgaggttgaaatatagatttatttggaaagtttttagtttagtgttgttggtgttgtttttgatgtttttgtttggatgggttttttgggttttttatatatttggttattagttttattttttttaggttgtttgatgttggttgggtttttgtttattgtgggttttgtttgtttattgtgggttttgttttttttttttgtgttatgaagattttgttatgtttaattttaaatggaaatgaaatgagaagttggattttttgataataaaagtagttgaggttttaagtggttgattaggaaaaggaagttgaaatggtaatatttatatttaaagtaggtggagtggttttaggtattttgagattttatttatttgttatgagaattgggttttaagggtgattttttgttagagttaagattgggtgaggttgggaatgggagaaagaggtaggataatgggtagatagttttgggttttttgtagtgagggtagataggggtttgtgagtttttttttttggtt

SEQ ID NO: 2553 - DNA, 2495 bp, Artificial Sequence
  chemically treated genomic DNA (Homo sapiens)
agttagggaaagaggtttatagatttttatttgtttttattgtaggaagtttagggttatttgtttattgttttgttttttttttttatttttagttttatttagttttgattttggtaagggattatttttggggtttggtttttatggtaggtgagtggagttttagagtgtttaagattattttatttgttttgggtgtaaatattattattttgattttttttttttgattaattatttaagattttaattgtttttattattaggaagtttagttttttattttatttttatttgaagttgaatatggtaagatttttatggtataggagaaaaaaatagaatttatagtggatagatagaatttatagtggatagaggtttagttagtattagatggtttgagaggggtgaggttggtggttaaatgtgtgggaggtttgggaggtttatttaggtggggatattagaggtagtattagtagtattgagttaggaattttttggataggtttgtattttagttttgagattggattaattggaaaggttgttttggggaagtatagttgttagggttagtaggtttgggtgatagtatggttttttttttagttatttttgtatttattttttttggatttttattttattatttatgaagtggggttttggtatttattttagtatagttatgaggattttgatatggtggtatgtttgttgtataggtgttgggtaagttttaatttttatttttattattattatatagttgtattatttatatatttgattttttttggattgttatatttttaatagtaggatgtaggatttataagggattgtttttaattttttgtttaaaatatagtgttattgataaaaatatgtagaatgaatgtggtaatgaatgaaggaaggaaggatgttgttggttttatgattttgggtaaattttttttttttttatgtgttaggtggagttgatattggtatatttaggggagggtgtaggtttggagtttgggatttagtttggtttgtagttattattatttttattaataatattataaggggttgtgagttagtagttggtgagggagtaggaggtgtaggagaggttgtggagttaggtgtgtagtatgttggagtagggttatttttgtggtgtagttggaggtttgtaattatattttaggtaggtgataataaaatttggagttgtgtagtgttggtttttttattttttttttagttttttttgagttttttttattgattgtagttagatttaggtggtttaattaattagttagtgtttataaagtgtttgaagaattttaaaagtgtgatgtaagtgttaaatattattttaatttgtgtatgtgtatgttttttttagtagagaggggtttttttttttttttttttgtttgttttttttttttttgtaggttttgttttgagaattaggtttgttaaaaattatttttggttttgggtttggggttatttgttggttaaattattttttgtttttttttgtttttttagtagaggatgtgattgtttaggggtttgaattgttttagggagaggagggtggttgggtaggtatttttatgtattgttggtgggaggggaaattggaatatttttttgggaaagtagtttggtaggatgaattaaaggtgtgaaatttgtttattagtttttgttgggttgttttttgaggatgtaattttagatatggagtaggttttttgtataatgattttaaagatattagaaaaagtttagttggttaatgataggggatggttaagtgaattatggtttattttttatgtggaattataggtagttgtaataagttattattatgaaaatggtggttatatagaaatttttatggtattattttaaataatattgtgtttatgtaaataaaatttgtttattgtaaggtatttagagaaaataagtatggaaataaagtaataattttatattatattattaaagataattgtaattaatattttgatgtagtaaaaatatgagtgaagaaaaataatttaatattatatttttaggtaattaagaatatgtgtagatattttgttttatttatttaagtgtttgtatgaaaataaaaaattgaaaatattttaatatttaaggaaaggagattggttgattttattatggtgaatttatttttatagttataggttaagtttatagttatgaaaatgatggtatagaattataatggaaatgtgttataagattagagtttgttattaagtagtagatttagtgtgattttaaatttttaattttagaaaaaaataatgatattaaagattagttatgattgagtggtagatttatatgggattttgtttttgtttatgttttttgtttgtattttttttgtaagaaaaaaaaagatggagaaaaatttatattttttgtat

SEQ ID NO: 2554 - DNA, 2491 bp, Artificial Sequence
  chemically treated genomic DNA (Homo sapiens)
aaaaaagaagatatttatggtgtttttgtattatatgtttgatagatatattatgtgtatatggtgggtatgtgttttgtatgattaagttttttttatgtgtataatggatataaaatgtgtgggaggaggatatgttatgtgggaggtgaatttgttgggggtatttgttatatgggatggttttatagtatttgtaataattatattttgggtaattatttataatataaaatgtgtattaatgtatttgttttgtgtattttttatttttttgtgtatatattgtgtagggtgggtatatattgtgtatgatgggtataggttttgtgtttgtttagtatgttatatgtgtgggatgagtgtaggttatatgtggagtatatgttgtttatgtttgtgtgaaggttatattttgagtgtgtgtgatggttgtattttgtgagtaatagtatttaaggtataaatagtgtttataaagaatgtgttgtgtttgaggagtgtatatggtgtgggtgatgggtatattttggggagggatgtgttgtataatagatgtgttatatgggtgatgagtatatattgtgatgtatatatagtgtgtgataatattatatggggtatgtgtgtgtatatgttatatatggagtatatattgtatgtgtgatgggtatatagtgtgttgggtataatgagtaataagtataggtagtgtatataatggatttattttttatggtgaatatatattgtgtgggagtgttaagtatatattttgtggtataaataagttttgtgtgattagtatatggtgtgtatggttgtatagtgaagttgttattgtgatgggtttgtttggtgtgtattaggtattttggtatatggaggttatgatgggaatatgggatgtgtgtttgagtgggagtaggtagaggggatttattttgtggggagggggtatggtagggagtagttggatttttatttgtttttagaatttttagatttttgagtttattgattatattgttttaggtttttttttaagtttttttttaaatgtaattagaattgtttgaagaatgtggggaattttagagatatgtgttgtttttaggtgggtttggagagagggtttttttttgtaattttatttttttttgatggaggggaggggagggggaagggaaggttgtgattttgttattttgggaaaggtttttaaggtagatttttgtttagttttgtgtttttttagtttggttggtgtttgttgggggtggggtagtttttttttaatttgtgttggttgttaagggaggttttattagagttttatttaagaagatgttaattgtgatatttttatatgattaatgatttaggtaatttgtatagtgtgaagtggagagtagttgtttttagtatatttttaagttgtatattttttttagtgtagggtgggggaagaaggtagttttagttttttttttagaatagggtaggggtttttgttgttgagttttttggttgatgttgtttatttttatttgtttaagattttatttttggtttggaggtttgtggatataatttagtattttgtgtatgtaaaaatagtagttattttttgtttaaggagttagtttttttaggggtttttatttttgtagtgtttggggagttagtttatttgggggtattatttgatttagttggtttttttttattagtttagatattgtaggattgaagtttttttttttttattagtgattttaaattttagtatttaattattagttttaaggtgttggttttttattatattttttttttgggagtttttgagggttttagttaggttggttttggttttttttgtaggtggtggtgtttatgatggtgagtgtggatggatatgtgttggttgtgtttgataatatgtttgtgtataataattttaagtatggttgtagggtgtgttgtttggatttttttgaaggttaggatttttggtttagttttggttgttgtgggtttagttagttttttaggttttattttagtgtggttttttgatttgggtttttttttgttttttagttgttattttttgtattaaggttattagttttggggagggttggattatgggtggtgttattgttattgttattggtgataatttttttgatgggttgtaggttgtgtttggaaatgtgtttgtgtggagtgaggtgggttaattttgttagtttttttttgggtttaggggttgggttttttttttgttggtgtgggatttgtaggttttttttttttttttgtagtttattatgttttatgttatttgggtgtagatgtttttgtggtatatttttggggtggtggaggtgatttttttttataagtttaagtagttttgtaagggatgttttggttgttttgtttatataggtaaggagttgggtgggggagtggaggttta

SEQ ID NO: 2555 - DNA, 2491 bp, Artificial Sequence
  chemically treated genomic DNA (Homo sapiens)
tagatttttatttttttgtttgattttttatttgtgtagataaagtggttggggtattttttgtaaaattgtttggatttgtaggagagggttatttttattattttggggatgtgttgtgggggtgtttgtatttggatggtgtggggtgtgatgagttgtgaggggagaggggaggtttgtaggttttgtattggtgaggggagggtttagtttttaggtttagagggagattggtggggttggtttattttgttttatatgagtatgtttttgaatatgatttgtaatttgttgaagaagttgttgttgatgataatgatggtggtgttgtttgtggtttagttttttttggggttgatggttttgatgtagggggtggtagttgggaggtaggagaggatttaggttaggggattgtgttgaggtggggtttggggggttggttgggtttgtggtggttggggttgggttgggggttttgatttttggaggggtttaggtggtgtgttttgtggttatgtttggagttgttgtgtataaatatgttgttggatatggttagtatgtgtttgtttatgtttattgttgtggatattattatttgtggggagagttgaggttagtttggttggggtttttgggggtttttgggaggggaatgtggtggggaattagtattttgaggttggtggttggatgttggaatttagggttattggtgggaggaggagggttttaattttgtagtgtttgagttggtggaagggggttagttggattaggtgatatttttagatgaattgattttttaggtgttataaaaataaagatttttgaaaaaattggttttttaggtaaagaatggttattgtttttgtatatatagaatgttgggttgtatttatggatttttaagttaggaatggggttttaggtaagtggaggtgggtagtattagttggagaatttagtagtaggagtttttgttttattttggggagaaaattggggttgttttttttttttgttttgtattgagaggggtgtgtagtttggggatgtgttaagggtagttgttttttgttttatgttatgtaaattgtttgggttgttaattatgtaaaaatgttataattagtatttttttaagtgggattttaatgaagttttttttggtagttagtataagttgagaaggagttgttttatttttagtaggtattaattaggttggggaggtatagggttgggtagagatttgttttggaggttttttttagggtggtagggttatagtttttttttttttttttttttttttttattaggaaagggtggggttgtaaggggaaattttttttttagatttatttggaagtggtgtatgtttttgggattttttgtattttttaggtagttttggttgtatttgaggaagaatttgaggaagaatttgaaatagtgtggttggtgggtttaagggtttgggggttttggaaatagatgaagatttaattgttttttgttatgttttttttttataggatgagttttttttgtttgtttttatttaggtatatattttatatttttattatggtttttatatattagggtgtttgatatatattagatagatttattataatgataattttgttatataattatatatattgtgtgttgattatatagggtttatttatgttataaagtgtatatttagtatttttatatagtatatatttattatgaagagtaagtttattatatatattatttatatttattatttattatatttaatgtattgtatatttattatatatataatatatgttttgtatgtggtgtgtatgtatatatattttatgtaatgttattatatattgtgtatatgttatagtatatgtttattatttatatagtatatttgttatataatatatttttttttagagtatatttattatttatattatgtatattttttagatatagtatattttttgtagatattgtttatgttttggatattattatttataaaatatagttattatatatatttggggtataatttttatataagtataaataatatgtattttatatatagtttgtatttattttatatatatggtatattaagtagatatagagtttgtatttattatgtatggtgtatgtttattttatatagtatatgtatagagaaataggaaatatatagaataaatatattaatatgtattttatgttgtaaatgattatttaaaatatagttattgtaaatattgtaaagttattttatatagtagatgtttttagtaaatttattttttatatggtatattttttttttatatattttatatttattatatatataggaaaagtttaattatatagagtatatatttattatatatatatggtgtatttgttagatatgtggtatagagatattgtgaatgttttttttttt

SEQ ID NO: 2556 - DNA, 2395 bp, Artificial Sequence
  chemically treated genomic DNA (Homo sapiens)
aagtttatttttatttttgggattttgtatttgttggttttttagtttggaatgtttttttattatagtaagatttgtttttttattttttttagatttttgtttagatgtgatttttaagaagtttttttgttttttttatttaatttgggtttttatttattttgttttttattttttttttttattttattttttattatggtatttattattgtttgtggttaaattttttatttatttgtttattttttgttttattattggaatataagttttatagagtaagtagtttgttttttttgtttatttttgtatttttagtatttagaataagtttggtatatagtagttgtttaggaaatttgtgtaaaatgatgaataattaattattattttttttttatgattattgaagagttatgtttttgttgttgtttgttttttttttttttttgggataaatttggtttttaattttaattttaggagatgaaggttgtatttttaagggaaaaaaatgtatttaaggaataatttgatgataaaatttttaattttttgtaatatggattgaagtttgtgtttttttagttttatttgaagattttaaaatttatattgttttttttaaattttaatatttagattgttttttaaatttaaagttgtggatgaatttttgtgatttttgtatgtattttgattgttatggttatttgaagttttttttttaaaattataggatggtttagttaaattatgttttttttaaattattttattgagttttttttgttatattttaaagagaagatgtatttttttattagtagttggaatttgaaagaataaataatttaaaatagatttagtttttgttggtttttatgattatgaaggtatggaatattatttattaataagtgttgttggttgattgtttttttttgtatataaaaaatgagtatgtatataattgtagtaatttgtttttgttgtagagtgaatagttttagaaatggattattttgttttattttgtttttatatatgtgggatttagtatgaggttatttagaaataatagaattaggttgaggttagttaatatagttggtagttgttattgaatgtttattgggtggttgtaggtttttggttgattatgtttttaagagttggttaatggagtttttgttatagttttggttaagttagtatatttaatagtttgtagtgtaaatgaaaaatatataggtttgattagggagtattttttttttttgtttttttttgtaaagagaggaaagtgattgttttggaagtttttgatattaatagttatgttggtatgtggttgtaagataatttgagttaagatggtgatatgttatttaaaataataaggttggtatagtggtttatgtttgtaattttagtgttttgggaggttaaggtgggaggttgggtttaagtttaggagattaaggttgtagtgagttatgattgtgttattgtgtttttgtttgggtgatagagtagaattttgtttttaaaagaaaaaagtaatagggtgtgttgtgttattgttatatttataaattattttttattttttagagtatggttgtttttatgattttatttgttgtaagagattttaaatgatattgattaatatttttttgatagtgtaagtttttatttttagaattgagtattatgtaattgatgatatggggagtggggtttgaattttttggattatttagggttgggatgtgagtgttattggagagttttttggtttataggaaggaagggttgtatatgggtatagggttatatggaggtattgtatgagtggtgggaggttagttggtattaagtattgttttttattattagtgggtgtgaatatgattgtaggttatttttttgtgttgtttaggttttgtttttattttttttttgttggtttgattaagttgtttattgtttgtagatggtaataaaatataattaagttgtttgttgttgaagtttttgtaggaaaaaattatttagttttattaattttgtaattatagtttttttttttttatattgaaatagttatttatatgatttttttataatgtgaagtttttaggaatatagttattatagtagagttaattgtaatatgtttgaatgtaaggatttaaattattgaggattattgttattttgatatttgtataaaattatgtattgttaaaaaaaaaaaaaagaaaaagattatgtattgttattgaggtagtttgtataggatagtaagattttttttaagtggtttttttttgatagtttttatagatggtttttttgtgagttgttattatagtttttt

SEQ ID NO: 2557 - DNA, 2395 bp, Artificial Sequence
  chemically treated genomic DNA (Homo sapiens)
aagggattgtgatggtaatttataggaaagttatttgtgaggattgttaaaggaaagttatttggagaagattttgttattttatataaattgttttaatgataatgtataattttttttttttttttttttttgatagtgtataattttgtataggtattagaatggtagtaatttttaatgatttggatttttgtatttaaatatattataattagttttgttataataattatgtttttaagaattttatattataaaaaaattatataaatagttattttaatatgggaaaaggagggttgtggttatagagttgataaaattagataatttttttttataggagttttaataataaataatttaattatattttgttattatttgtaaataataaatagtttgattagattaataaaagagaaataaaagtaaaatttgaatagtatagaaaaataatttgtagttgtatttatatttattgatggtagagaatagtgtttgatgttagttggttttttattatttatatagtatttttgtgtggttttatatttatgtgtagttttttttttttgtgggttaaggggttttttagtggtatttatattttaattttgagtggtttagaaaatttaagttttattttttatgttgttagttgtataatatttagttttgagaatgaaaatttatattgttaggaaaatattgattaatattatttaaggttttttgtagtagataagattataaaaataattatgttttggaaaataaggagtggtttataaatgtaataatagtatagtatattttattattttttttttttagagatagggttttgttttgttatttaggtaggagtgtaatggtataattatagtttattatagttttgattttttgggtttaagtttagttttttattttggttttttaaagtattgggattataggtatgagttattgtgttggttttgttattttaagtggtatattattattttaatttaggttgttttatagttatatgttaatatggttattaatgttagaaatttttagagtaattatttttttttttttatggaaaaagatagaaagggaaaatgttttttagttagatttatgtattttttatttgtattgtgggttgttaaatgtgttagtttaattaagattgtaatgaggattttattaattagtttttagaaatgtggttagttaggagtttgtagttatttagtgggtatttaataatagttattgattgtattgattggttttgatttgattttgttgtttttgaatagttttatgttgggttttatatatgtaaagataggatgagatagaatggtttatttttgaagttgtttattttgtagtaaaggtaggttgttgtgattatatgtatgtttattttttatgtgtaagagaaggtagttagttgatgatatttgttaatgaatgatgttttatatttttatagttatagaaattaataaaggttgaatttattttgaattatttatttttttaggttttaattgttaataaaggagtatattttttttttggggtataataggagggatttagtaaagtagtttggaaaggatatggtttagttaagttattttgtggttttgaaaaggaagttttgagtgattgtagtagttaaagtatgtatagaagttataagaatttatttataattttagatttgaaaaataatttaaatgttaggatttggaaaaagtagtatgaattttaggatttttgaataaaattgggaagatataaattttaatttatgttatagaaaattggagattttgttattaaattgttttttgggtatattttttttttttaaaaatgtaatttttattttttgaagttgaggttgggagttaggtttgttttaaaaaaaaaaaaaaaataaataataataaaaatatagttttttaatgattatagaagagaaataataattaattatttattattttgtataaattttttgagtagttattgtatgttaggtttattttaggtgttggagatataggagtgaataagagagataagttatttgttttgtggagtttatattttagtggtgaaatagaaaataaataaataaataaggaatttaattataggtagtgataaatgttataatgaaagataaaatagaggaaggggatagagagtgaggtgaatggaggtttaggttggatggggaaggtaagaaggttttttggaagttatatttgagtagagatttgaagaaagtgagggaataggttttgttgtagtggaagaatattttagattaagggattagtaagtgtaaaattttggaggtgggagtgagttt

SEQ ID NO: 2558 - DNA, 2469 bp, Artificial Sequence
  chemically treated genomic DNA (Homo sapiens)
gttttttttttgagggttttaggggagatttttttttgttttttttagttttggtgtttgttggtaattttaggtttttttgggtttgtaaatgtattgtaatttttgtttttgttattatatagtttttttttttgtgtttttgttttttttttttagaagaataatagttatattggattaaagatttattttaatgagtttattttaatttgattataattgtaaagattatttttaaataaagttatatttataggtattgggagttaggatttattttaatattttttggattttatgatatttagtttagtttataattaaatttataatgttttttgtgagaaagaagtagtagttatgaagaaagtttagatatttttaagggtggagagtgtttttgattttttttttgatagttttgagtttttttaaatattgttgtttttattgattggtttgttttaggagtagggtttttgatttttaaattttggagtgtagtttagtaaagtgagataagtatattttttgtttttgaggtttaggagtattggaagagtggatagattaattgtgaatagagaatgttttgaaaatataggaagaattatttttttgtagatgtagttttggttttttgtgggagtttttggatttttggtgaggtagatttggaaggttatagtaggggatgtaaagagtttttttttagatttgttttttggtttattattttgtttttttaaatgtattttaagggttttttattttgattattgtttagtggtattgttgtagaggaagtaggagggtgtttggtggagtttgggaggtttatgaatttttgtatttggagaaatgttaatgttgagtttatatttttttttttgtagtatagaagattattattaggtttgtgtgtagaagtttaagtagttagagggggtttttgtgaggtttgtgggatttttttggttagaagatgggttatggtggaggaaggttatgttaaatggttgtgatttattgtttatagggaagagtatgtaatatatatttaggagggtttaggtagttggaattgtggtggttttatatttttaaagtgaattttaaatttgatttatttatgttgtttttatagtaataggaaaattgttttgatttatagttatggaagattttgtaaaagaaattgtaggaggaaaaaaagataatgttaggaaaaaaaaaaatttaatgaagtattatttttttatttatttagttaattgagaataatagtttgtgtatttggtaattaaatgggaagtggtattttgtgttgtaatatgaatttgtttatattaagtgatttatttttttgtttagatatattgtattgagaattttttttaagtagaaagttattaaaaatgtgagaataagtagtttttattaatttgaagtatttggggatttagaggaatgataaatgtaaatagtttagaatttagaaattgttttgaatatttaaattttagattttgggaatgtgtgtatgtttttagttagttagatgtagataatttttttttttgtgaggtttttttttatttatattttgtttggatagggtggagtttttgtttaaattttatttttagtttgaagaaagattaaattattgtagattaaagttagtgttatttggaaaatggaaaagatataggagatagggtatgttttttttagtttgattgtgaatttagggttttttttttggtgagtgtttttgggaggttgtataaggtttatgtttagttattgggttaagttgaaggaatgttttttattttttttatgtttgtattgaagatttgtgtttggtaattattttatagattttttttattatttgattttgggtttgtagttaatgttgtgtttagtatatttttgtgtgattttgataagaaatttattggttaaagattttgtgagttatttttgttttttgttttttttattttttatttaatatgtttgtttgtattatatatgtataaatataattgagttgtattatattaattttttttttttttaaaaatatattaaaattattttttttttttaatttgtttatttatgagtttttgtatggtaatattttgatttttattttggttgagaaattatataaattagtttattgtatgttgttttattttgtatttatggttatgatattgaaattttaggattatatatagatagtatagtttttggttatttaagtatgtaaatagtttggttttttataaagtggaaaaatattttttgtgtattattttaatatgattagtatgttgaaatttggtgtgtaattgtgttaatatttttttggttttgaggagtaaatttggagaattttatggtaatatataaaatgtaaagttggtttgtttattattgggattt

SEQ ID NO: 2559 - DNA, 2469 bp, Artificial Sequence
  chemically treated genomic DNA (Homo sapiens)
aaattttagtagtaaataaattagttttgtattttatatgttattatgaggttttttgggtttgttttttagagttaaagaaatgttgatatagttgtatattaagttttaatatgttgattatgttaaaatagtgtataagaaatatttttttattttataaaaagttagattgtttatatgtttaagtggttagagattatgttatttgtgtgtggttttgaagttttaatattataattatgaatataaaatggagtagtatgtaataaattagtttatgtagttttttagttaaaatgggaattaagatgttattgtgtaagagtttataaatgggtaggttagaaaaggggaataattttaatatatttttgaaaaaaaaaagaattaatgtaatataatttggttatatttatatgtatataatatagataaatatattaaatagaagatgagagagatagaggatagaaatagtttataaggtttttggttaatagattttttattaagattatatagaaatatgttgagtatagtattaattataagtttaggattaagtggtagaaaagatttatgaaatggttattaaatatggatttttagtataaatatgagagagatgagaggtgtttttttagtttggtttagtagttgaatataagttttgtgtaattttttaggagtatttattagaggaggggttttaagtttatagttgggttaaagaagatatgttttgttttttatgttttttttattttttgagtagtattggttttggtttataataatttagtttttttttaagttagaaatagaatttaagtaggggttttattttgtttagataagatataagtgaaaagagattttatagaaagaaaaattatttatatttgattaattgaagatatgtatatatttttagagtttagagtttaaatgtttaagatagtttttggattttgggttgtttgtatttattatttttttaagtttttaaatgttttaggttagtgaggattgtttgtttttatatttttaatagttttttatttgaagaaagtttttagtatagtgtgtttaaataaaaaaataaattatttaatgtgagtaggtttatgttgtaatatgaaatgttattttttatttgattgttaaatgtataaattgttatttttagttgattgaataagtgaaagaatggtattttattaaattttttttttttttggtattatttttttttttttttatagttttttttatagagttttttgtggttataggttggaatagtttttttgttgttatgagaatggtataaataagttaagtttaaaatttattttgggggtatggagttgttatagttttggttatttaagtttttttgggtgtgtgttgtgtatttttttttataggtagtggattatagttatttaatatggtttttttttattatggtttattttttggttagaaaaattttataagttttgtagaggttttttttaattgtttgggtttttatatatagatttagtaatggttttttgtgttgtaaggagagaaatataagtttaatattaatatttttttaagtgtagaaatttatgggttttttaaattttattaagtatttttttattttttttataataatgttattgagtaatgattaaaatgaggagtttttggaatatatttggaagggtagaataatgggttaggaagtgggtttaggaaggggttttttatattttttgttgtagttttttagatttgttttattgaaggtttaggggtttttataagggattagagttatatttgtaggagggtggttttttttgtatttttagggtattttttatttataattaatttgtttatttttttagtgtttttggattttagagatagaaggtatgtttgttttattttattgaattgtattttaaggtttgaagattaaaaattttatttttaagataagttagttagtgaggataatagtatttagggaagtttaaggttgttaaaggaaaggttaagagtgttttttatttttaaaaatatttaggttttttttatggttgttgttttttttttatgaagagtattgtgggtttaattgtgggttgaattggatattataagatttaaaagatattaggataagttttaatttttaatatttgtgaatgtgattttatttggaaatagtttttgtagttgtaattaggttaagatgagtttattagggtagatttttaatttaatatgattgttgtttttttaagagaagaagatagagatatagagagaagagttgtgtaatgatagaggtaaagattgtaatgtatttataaatttaagaaggtttagggttgttaataaatattaaaattagaagaggtaaggaaggattttttttagagtttttagagagaaagt

SEQ ID NO: 2560 - DNA, 2485 bp, Artificial Sequence
  chemically treated genomic DNA (Homo sapiens)
ttattaagtttttttaattggatgtttatgaaattttaggtttaagattagatttttttttttgatattagtatgaggtttttattttgttaattgtagggaagggtgtggtggattttaagatttgttgttttgtgttttgtttttgttttagtttagttgaggtagtggttagtaattaaggggaaaaataaatttttaagtgttgagatttagttattgatatagtttttggagtaaatttgtattttgttatttattgtttggttaggtaataagtttattttgtttggatttgagtagtagtttggagaaaaaaaaaattatattgatggtaatagtttgaaatatgaaattgtttttatttttagtttggagaaattgtagggtatgttttgtttaagtaatttttttgattttagtttgaatataaatggaatattaaaagtgttgggtatatttttttttattttttatttagagattgattttattattataattgtgggtttgtttggtttttggtagttttttttttttaagatttttaatagttttgtagatgattgttgtagtttagtttttttagatggggttgtagagaagaaaggttatgtttttaaaggtttagtattgttttgttattgtttagtttggtttggttttatttagttgtgtgttttttttttatttgtttttttgagtttttgtgtgggtttttgttattattatttttttatgattatttattttagtaaatagtaatgatataagatgtatgatgtatttttttttttttttttttttttatttttttttttttttttatttttgggattattgaaaagttttataattatttataaatatgtaaagggtgtttataagattggagtaagggtggtggtatggggtaaagttagtagtgtttttttaggtgttttgtgatagaggagaagggtgtatttggtttgttgtagtttgagtagattttggggttgaaagttatttttttgattatgtgtttagattttataaaattatagtttgggtttattggttgggtaatattatttgaagtgagtagaataatttaaatttttttatttgtaatataaaaggaaggggttatttgttttagggatgggtatgttttggtgtaatttggtagagtattttagtaattttattagatgttaggttagggtaaaagtggaaatgtgtttgtttagtatattttgggttgattatttggagtgtatgtttttgatttatttgtatataatttatttagggggtgttgtaagagttatgtgatggttaaaggaatttaatgtgttttttattatgttttttaaataagtttttttatgttgattgttttttggaattaagaagttttatttttttagttttgtgatagattttaaaatgagatttttataaatttgagaataagttttagttttggttttaggattatttgttttgattttaagggttagttgaggagtgtgaaggttaggatgagttatggggtgagtgaaaattgtagttgggaaagttttgttttgaggagtttgtatttatgtttttatatattttgaagtaattagtttttatttgtatttgtggtttttttgtttttttggttttatgaggagatagtagttttgttatttattttttgagagatagtgtggtaaagttagggatagtatgggttttagaattagattttttatgtttgttatttattagttttgtgattttaggtaagttgttgatgtttttgtgtattagttttttttggtggtaaaagttatttggtaattattttaaaatttaatagtttgagataatgattatgggattgttgtgggttaggaatttgattgggatttagttgggagagtttgtttttgttttatgtgatgttggttagagtgatttaattgaggttggaagatttatgatggttttatttatatgattgaggttttagagttagatgtgggttgagggattttggtttttttttatgtagtttttttttttatatggtttttatatatgtagtggtttaggttaagtttttttatatagtggttagaatattttaagagaatgaaaatgaaagttgtaaggtttttgttaatatttgttattattttatttttatttattttgttggatagagtgaattatatggttaatgtagatttttagggaggagaaatgggttttattttttttaatgggagatgtggtatataaaaatatagatgggaggtttttataagagttaaataatataggtggagtatttaggatagtgtttggtatagagtttgtgtttataaatgttatgttttattataatatgattattttggtattattttaggaataaatatagtatatgtttattttttgagtgaaaggttttttaatattatatggaggagagataaattttttaggt

SEQ ID NO: 2561 - DNA, 2485 bp, Artificial Sequence
  chemically treated genomic DNA (Homo sapiens)
gtttggagagtttgttttttttttatgtggtattgagaagttttttatttaggaagtaaatatgtattatatttgtttttgaagtgatattagaataattatattataataaaatataatatttatgaatataaattttgtattaggtattattttaaatgttttatttgtattatttaatttttgtaaagattttttatttgtgtttttgtgtgttatattttttattgagagaggtggagtttattttttttttttggagatttgtattagttatgtgatttattttgtttagtagaatgggtaggagtggaatggtgataggtattaatagaggttttatagtttttatttttatttttttggaatgttttaattgttatgtaaggaagtttagtttagattattatatgtgtagagattatgtaaagagagaggttgtatggaggagaattaaggttttttagtttatgtttagttttgaggttttagttatgtgagtagggttattgtggattttttagttttaattgggttattttagttaatattatatggagtagagataagtttttttagttgagttttagttaaatttttgatttatagtaattttgtggttattgttttaaattattaagttttgagatgattgttagataatttttattattaaggaaaattggtgtatagagatattaataatttgtttaaagttatagggttagtaagtggtagatatggggagtttggttttagagtttatgttgtttttaattttgttatattgttttttaaaaagtaagtgatagagttattgtttttttatgagattaaagaaataaaaagattataggtgtaggtgggggttggttgttttagggtgtatagagatataagtataagttttttaagatgaggtttttttagttataatttttatttattttatggtttattttagtttttatattttttaattaatttttagggttagagtagatagttttggagttaaagttagaatttgtttttagatttatgaaagttttattttgaagtttgttatggggttggaagaatgaagttttttggttttaagagataattaatgtagagagatttgtttaaaaaatataataaaagatgtattgggtttttttggttattgtatagtttttgtaatattttttggatgagttatgtgtaaatgaattagaaatatgtattttaagtaattaatttaagatgtattgggtagatgtatttttatttttgttttaatttgatatttgatagagttgttgagatgttttgttaaattgtattagggtgtgtttatttttgagataaataattttttttttttgtgttatgaatggggaggtttgaattattttgtttattttaaatgatgttgtttagttaatgggtttgggttgtggttttgtggagtttggatatatggttaagagggtgatttttaattttagagtttatttaggttgtagtaggttaagtgtattttttttttttgttatgggatatttagaagggtattattagttttattttatgttattatttttattttagttttgtaggtattttttgtatatttgtaaataattgtggagttttttagtaattttaaaagtaaaaaaaaaaaaaagggtaggggggaagaaaagaaaaggaatatattatatattttgtattattgttatttgttggaatgaatggttgtgggagagtaatggtaatagggatttatatagaagtttagaaagataagtggagaaggagtatatagttgggtagagttgagttaagttgggtagtgatagggtgatgttgagtttttggagatataattttttttttttgtagttttatttgagggaattgagttgtaataattgtttgtaaggttattaagggttttggaggggagaggttgttaagagttaggtaagtttataattatggtaatgaaattagtttttgggtaggagataagagggaatgtgtttaatatttttggtattttatttgtatttagattggagttaaagggattgtttaaataaaatgtgttttgtaatttttttaagttgggaataaaaataattttatgttttaagttattattgttaatatgattttttttttttttaaattgttgtttagatttaaataaaatagatttgttgtttggttaggtaatgagtagtaaaatataaatttattttaaaagttatattgatgattaaattttaatatttagaggtttatttttttttttaattgttagttattgttttaattgaattaaaataaaaataaaatataaaataataaattttaggatttattgtatttttttttatagttaataaagtgaaaattttatgttgatattaaaagaagaaatttaattttgagtttgaggttttataggtatttaattaaaaagatttaatga

SEQ ID NO: 2562 - DNA, 2500 bp, Artificial Sequence
  chemically treated genomic DNA (Homo sapiens)
atatattatgatgttgttaattttttggtgttattagtagtaatttgattgttttattttgaatatgaaagttaagttttgaatttttagaaatggattatagggttatgagggtaagtatttatgggatttatatgaggttgtgtttagtttaatttagttttttttgggtttattgattagtaagtatttttagagtattaatttgtggaatatatagtatttttaaaagataagatataagtaaaaaaaaaaaaatgatgttagaggtttggtggtggttaaataattggggagtaatattaatagggtattattaatggttaaaaaaaaaaaaaaatgagttggatgtaggtaggtaattagtaatgtttatagttaagaaaatttttgttggggttgttaagaattgttttttagtatagggttaatggttagtggaaaagattttatagagtaaagaagggtttgagaggtattttgaagtttgagtgagatttatatggatggtaagggataagttggtttttttgtgtggtagatatatggttagaagattagagggttaagtggattagagatgggtgatgagattgagatttgatttgtaattttgttattttttaattgtgtgatatttatttttagtggttatataattattgtaggttttagtttttttatgtgtaaattgtagatgatggtattttttattggaagagtaaatgataatgtatatatagtatttaaagtaggatttgaggtatatagagttattttttatggtttttattatgattattattattgttattgttaaaggattttgataagaaaataggattaagtgtgagtattaataatttgtttttgttatttttgttatggtgatgggaggtatttttagttgggttatttgatttatgttaatggggtagttggaatgagtaggtggtaggaaaaaaggtaggaaaatggattaaatttggtttataaagtattgagaaggtaatgggagagttaagtttaggatattgttgtttagtttggttttatatgaatttaatattttatatttgtggaattttatgaggggttaagttaggttgtatggtgaattttggtttagttgtgagaattttgggagaaaatgaagtataatagaaatttttatagaaagttgtgggggtattgtagttagagtagagagtttggaatttgttggtttgaattaggatttagttaagtttattttattaaaatttatgaagttaatagttttttttatttggtttttgaaggaatatttttattgtgtaattatttttgtggaaattgtaatattgtgtttgttattatatagtattaatattaaatggttaggtgataaaagttaaggatattaagttaaaagtttatgttgtatttttattgtatattataggttataaattgagagtgtgttttttattattttaaagtttttggggttggatttttgtttagtaattttatttatataatatatttgtaattatttttttaaatttttaatttatttttttgaaataatagtattagggtttttgattgttattttgttgttgttttgtttgagggaattattagatagtgatggtaaatgtaatttatagtataagttaattatttgaatggaggttgttttgaattttttaggtaatgtgatgggtgaagttatagtaatatttttgagtaggttttttttgttattagtaattagttttatgtattagttaaatgttaaggtggggttttttggttagtatattggatttttgttgaagtttttttaggaggtgttgtgggtggggggagtattgtggagagggtaaggttttatttttttaatttgagttttagttaagattttaattgagtagggagtggtggtttatgattataattttggtattttaggaggtttaggtgggagaattgtttgaatttaggagtttgagattagattgggtaatatagggaaattttatttttaaaaaaataaaatatataaaataaataaataaataaataaatagttaggtatggtagtatgtatttggggttttagttatttgggtggttggggtaggaggattgtttgagtttaggagtttgaggttgtagtgagttatgattatattattgtattttagtttggatttagagtaagattttgtgattttatttattttttttttgtataagtggtgatattgaggtttagtgatgaaagattttgtttaaggtaggaatatgttattattttgataggaaggggttgaattaggttataaattttttttgtaagtttttaaattgggtgatgtttgtattatttaggtggttgttggtttttttgtgagttttgttattaagtttttaaggttttagaaaaggtgtttttaaatttatataatatgtattttgagaatttatggtttggtaagtatggtgatag

SEQ ID NO: 2563 - DNA, 2500 bp, Artificial Sequence
  chemically treated genomic DNA (Homo sapiens)
ttgttattatatttattagattataagtttttaaaatgtatattatgtgaatttgaggatattttttttggagttttgaagatttgatggtaagatttatagaaaggttaatagttatttgggtgatgtaaatattatttaatttggagatttgtaagaggaatttatggtttggtttagtttttttttattaagatggtagtatgtttttattttgggtaggattttttattattgggttttagtgttattatttgtataagaagaggatggatgagattatagggttttgttttgggtttaggttggagtgtagtagtgtgattatagtttattgtagttttaaatttttgggtttaagtaatttttttgttttagttatttaagtggttgggattttaggtgtatattattatgtttggttatttatttatttatttatttattttatgtattttatttttttagagatggggtttttttgtgttgtttagtttggttttaaatttttaggtttaagtagtttttttatttgagttttttaaagtgttgggattatagttatgagttattattttttgtttagttgagattttaattgaagtttagattggagagatgaaattttgttttttttgtagtattttttttatttatagtattttttaagggggttttaatagaagtttagtgtattggttaggagattttattttggtatttagttgatgtatggggttggttgttgataataaggaagatttatttagaagtgttattgtagttttatttattatattgtttgaaaagtttaggataatttttatttaaatgattggtttatgttatggattatatttattattgttgtttggtagtttttttaggtaaaatagtaataaaataataattaaaaattttaatgttgttattttagagaaataggttggaggtttaaaaaaatgattgtaggtatgttatgtaaatgaaattgttagataaagatttagttttaggaattttaaagtagtggagggtatatttttaatttgtagtttgtagtgtgtaataagaatgtagtatgagtttttagtttgatgtttttggtttttgttatttggttatttagtattaatattgtataatagtagatatagtattgtagtttttatggaagtgattatataatgggagtgtttttttagaagttaagtaaagggggttgttagttttatgagttttgatgaaatagatttagttaagttttaatttaggttgatggattttgggttttttgttttgattgtgatatttttgtagttttttatgggaatttttgttgtgttttatttttttttagggtttttatggttaagttaggatttattgtgtagtttgatttggttttttgtaaaattttataagtgtgaaatattaaatttatgtgggattagattggataatagtgttttgaatttggtttttttattgtttttttagtgttttatgaattaggtttaatttatttttttgtttttttttttattatttgtttattttagttgttttattgatatggattaggtaatttaattagaaatattttttattattatagtagggataatagaggtaagttgttaatatttatatttaattttgtttttttgttagagttttttaataatgatgatgataatagttatgatgaaaattatgaagaataattttgtgtattttagattttgttttaaatgttgtgtgtgtattgttatttatttttttaataaagggtgttattgtttatagtttatatatgaggaagttgaagtttgtagtggttgtataattattggggatgagtgttatatagttagaaagtggtagagttgtaagttagattttaattttattatttatttttgatttatttagttttttagttttttgattatgtatttgttatatgggaaggttagtttgttttttgttatttatataaattttatttagattttaggatattttttaaatttttttttgttttgtggagttttttttattggttattggttttgtgttgaaggataatttttaataattttagtaggagtttttttaattgtaaatattgttaattgtttgtttatatttagtttatttttttttttttttggttattgatgatattttattaatattgttttttaattatttggttattattaggtttttgatattatttttttttttttgtttatgttttgttttttgaaaatattgtgtgttttataaattgatgttttagaagtatttgttaattaataaatttagaaagggttgagttaaattgggtatagttttgtgtgggttttatgagtgtttatttttatgattttgtgatttatttttgaaaatttagaatttggtttttatgtttaagatagagtagttaaattgttgttggtgatattagagggttgatagtattatggtgtgt

SEQ ID NO: 2564 - DNA, 2419 bp, Artificial Sequence
  chemically treated genomic DNA (Homo sapiens)
aggttaaataattagtaagtggtagatttagtatgtgggtttagatagtttttttttagagattgatttttattatttttttatttagtattttttgtattgtatgagaaaaaatatatgttgtatttgtagttgaattttatataatgtatattaattatatttgggagatagatttatttatttataaatttttagtggttattaaaatatttgatagttaaaaagtttattttaaatgtttgtggaaatgaatggaattggatggttttagtagttttaatttgatttatttaagaaaatagtataatttatatgtagttgtttttttgagggtggtttttgtttttattatttgttagttatgaaatagggttgttttatttttgtatagatatttttagtagaatttgttagtaattaattttatttttttagtatgaatattagttttttttttgtatgtgggaggtagaataatgatttttttaaagatgtttatattttaagttttagaatttgtgaatatgttatgttatatggtaaggtggggttaaggttttagatgaaatgaaagttgttaataagttggttttgagatagggagattattttgaattatttgaatggttttaatgtaattatgagtatttttataagaggaaggtagaagagaaagttaaggtgatattatataagaaatattttatttattgttgtgttgttaatgatggagaaatgggattataagttaaggaatgaggaagtttttagaagttggaaaaggtaaaaaaagaatttttgttttttataagagtttttagaaggagtatagttttgttgatattttgtttttagatttttgatttttagaattgtaagagaatgaatttgtgttgttttaagttattaagttggtggttatttgttatagtagttatagaaaattgtttattgtaggatgaaaagttatttttttttggtattttttaaaggttaatttaagagtatggattgttttgtattttttaggagtattattgtaaagttgatttattattttttttatttgttttgtattattgtgttggggtttattaatgttttgttattgggtgttttgtgtgtaagtagaagtgtgttaagaattaattgttttgatttttattttttgttggtgttttgttatttgtgggttgtttggtttgatatatgaattattttttagttgtttggtgttggggaggtatagttattagtttttaaatattttagatatatgttaattgtaattttaatatatattttttttttattgttattttggaattgttttattggtaatgtatgaaatatgaataagaggaaataattgataaggtattattgttgattaaggggttaatttttgaggaagattaaaaatagatgtttttgaagaagaaagaattgaggaagtgaattttttttttttttaattttttagtttattgtttttatttaaaaattaaattaatatattttgaagaaggtttaaggagattaggaatttttaagaatttatttgtattttgtagtagatagtttgtttgttttttattgaaaatttataagaaataatattgtaatttttgttatagtaaataattggtgggtgtatttttttatgttaaatatatgttaagtataaaaaatgtgtttagaaaaataaataattttggaaggttttttttttagtgtttttttattttttttgttttagtttttttttttgtgatggtgtttaatttaagttttggattttttgttgttgattttagtagtatttttttttgatttgtaggaaattgtttaaggtttttaaaattattttttttataaatttttgttttttttttgaataattttaattagtatttttgtaaaaagttgtttaattaatgattttatgtataagtgtgggtaagtgataatatttggatgtgttgttttttttagaggatttgttttttaaatttttttaaatagagatataattagtttggataatgagtgtttaaaattaaagtttaattttttatggtaggagtgtggttagtgtgtgtgtgtttaggggaggtgatatgggttattggaggttttttttgtgttttttaaattatatgatttgtattatttaaatgttgtttttgtttttattttgatgatgaaatgattttatgaatatattgattattataattatagttagtgatatttatagtatgttttattatttttaataagaaaagtttattttatgttatttttattaataagtttgtgaggttaagaattttattatgtttgtgttatatattagaaattaataaattttttgtaaagggttagagagtaaatattttaggttttgaggtta

SEQ ID NO: 2565 - DNA, 2419 bp, Artificial Sequence
  chemically treated genomic DNA (Homo sapiens)
tggttttaaagtttgaaatatttgttttttggttttttatagaaagtttgttgatttttggtgtatagtatggatatgatggaatttttgattttataggtttattggtgaggatgatatgaaataaattttttttgttgagaataatgaagtatattataaatgttattggttataattataatggttaatatatttatgaaattattttattgttagagtggaagtaggggtagtatttgggtagtataaattatgtgatttgaggggtataaagaaagtttttaatgatttatattattttttttgagtatatgtatattgattatatttttgttatgaagggttaagttttagttttgagtatttattatttaggttgattatgtttttatttgaaaagatttggaaaataagttttttgggaagggtaatatatttaggtgttattatttatttatatttgtgtatgaagttattaattaggtagttttttgtaaagatgttggttgagattgtttgaggaaggaataggagtttatggaaaaggtaattttgaaagttttgggtagttttttgtaagttagggagaaatgttattgaaattaatagtaaaggatttagggtttaggttgggtattattatagaaaggaggattaagataaaggaagtaagaaggtattgggaaaagagttttttaaagttatttgtttttttaggtatattttttatgtttggtatgtgtttggtatggagggatatatttattagttatttgttataataaaggttgtagtattgttttttgtaggtttttaatggggaataaataagttgtttgttatagaatataaatgaatttttgaaaatttttgatttttttaaattttttttagagtgtgttagtttaatttttggatgaggataatgaattaaagagttaagaggagagaagatttatttttttagtttttttttttttaaggatatttgtttttaattttttttaaaggttagttttttagttaatagtggtgttttgttaattatttttttttgtttatattttatgtattgttaatggaatagttttagggtgatggtagaaaaaaaatgtgtgttgaaattgtaattggtatatgtttgaaatatttgggggttggtgattgtgtttttttagtattaggtagttggagagtaatttatatgttaagttaagtagtttatgaatgataaaatattaatagggaataaaggttagagtgattgatttttaatatatttttatttatgtatagagtatttgatgatagggtgttaatgagttttagtatggtgatgtggaataaatgaaaaaagtaatgaattgattttgtaatagtgtttttggaagatatagaataatttatgtttttagattagtttttgagaaatattaggagaaagtggttttttattttgtagtgggtagttttttgtggttgttgtaatagatggttattgatttagtggtttaaaataatataaatttatttttttatagttttaggaattagaggtttaaaagtagggtgttagtagggttgtgttttttttagaggtttttgtagggggtagggattttttttttgttttttttagtttttggaggtttttttattttttggtttatgattttatttttttattattaatggtgtaatagtggatgaaatattttttgtatgatattattttgatttttttttttgttttttttttgtaaggatatttgtgattatattggggttatttagataatttaggataatttttttgttttaaagttagtttattaataatttttattttgtttaaaattttaattttattttgttatgtggtataatatatttataagttttagggtttagaatgtgggtatttttgagaaggttattattttgttttttgtatgtagagagagagttaatatttatgttggagaagtgaggttggttgttgataagttttattgaagatatttgtgtagggatgaagtagttttgttttatggttggtagatagtgaaaatagaggttatttttaggaggatagttatatgtgggttatattgtttttttagatgagttaaattgaagttattaaaattatttaattttatttatttttataaatatttaagatgggttttttaattattagatgttttggtggttattgggaatttgtaaataaatgaatttgttttttaaatgtagttggtgtgtgttgtatgaagtttagttatagatgtaatatgtatttttttttatgtaatatagagagtgttgaataaagggatagtgagagttagtttttggagaaggattgtttaggtttatatattgaatttattatttgttagttgtttggttt

SEQ ID NO: 2566 - DNA, 2353 bp, Artificial Sequence
  chemically treated genomic DNA (Homo sapiens)
tttggaaaatattaattaaataatatattttaaataattttgaaaaagataaaggtatttttttaatttggggtattttattagttattaagaattaatgttattatttttttatttgtttagtgtttagaattttttttaagtttgttgataatggtggtaatgagggttaaaggatggagttgtttagttttggtaaatattggttaggtatagaggtttatgtttgtaattttagtattttgggaggttgaggtaggtagattatttgatgtttggagtttgagattagtttggtttggttaatatggtaaaattttgtttttattaaaaattagttaggtatggtggtatatttgtaattttagttatttaggaggttgaggtaggagaattatttgaattttagggatagaggttgtagtgagttgagattatgtttttgtatttaagtttgggtaatagagtaagattttgttttaaaaaaaaaaaaaaaaaggtatggtggtttatgtttgtaattttagtattttgggaggttaaggtgggtggattatgaggttaggagattaagattattttggttaatatagtgaattttgtttttattaaaagtataaaaataaaattagttaggtgtggtggtgggtttttgtagttttagttatttgggaggttgaggtgggagaatggtatgaatttgggaggtggagtttgtagtgagttaagattatgttattgtattttagtttgggtgatagagtgagattttgttttaaaaaaaaaaagaaaagaaaagaagaaaagaaaatataaaatgtttagttatttaggatataattgtgtggtttgattgtttagttgtattattttttttatttggaaagtgttttagtgattatagaagttgttagaatttttaaaagtaagaagaaagtgatgggaaaatgtgttaaatttataatgggagaatattgtgttattagaaaattatatgattttggtaattttaggagtatggaagaaagattttaaataagtttttgattatgtatttttttttaaatttttttgaatgttgaagaaatgttaaattttattaagttttatagttagatttaatatagatataaatttttttaatgtttgttttagttaaaagtgagtggaatattattgttaaattagtgtatgtgggagaattatttgaggaaaattaaaataggtatagttgggaatattaagttgtggttatattagatgtaagtaggtgtaatagtaaaattttttaggttttaatggattgggttattttgttttttagtttttatatagatgagttttgttttggggtaatatggttgtagtttgagagtttatttgaaggagtttattttttttttattagtttatgagtatagtgtaattttagttaatattgttatatagtttttagttgggttatttggttaaatgtttttagggaaagtagtaagatagaataaaaggataaatgtaatgtggttttttgttttgagtttttgtagttgtggaattatattggtagttaattattattatgttgtatttgtgattataaatttttgttatttaagatgttatttaagttttataagaaatattttgttttttgtggtataatttttttgaggttgggtttgtgtataattataattatagagatttgttttttgtgttttgtggatatgttagtaggtatatagtgttatttgtgtgaaattgaaaatgatattttttattggtgggtgaattgggaaatagtattttgtttatgggtaaattagaaaagatgtttttttttgggtggataaatgagtaaaaggtagtttttttgggttgattaatttttttttaaagttttttttattttggggtgtgggggtggtgtatatggtttggtaagtttaatgtagattttagttgttttttgtgggtaggaatttttggtgtaatgtataatttgtataattgtatataatagttttgattatagaatttatttttataattttgtagttggattatagagtttgttttttagtattttaaaaatatttgtttaattatattagtggatgtttatattaaatatattggtttttttttttatggtaagtaattgttattttttgttaagggtagtgttttaattttggaaataaataggatatttgtaggttgagaaatagaagaattagaggatggtgatttttaggggtttgattagtggtgggtagtggagtggtggaaattatggtggtatttttttattattgtaatgtaatgttttttttagtttttattattattt

SEQ ID NO: 2567 - DNA, 2353 bp, Artificial Sequence
  chemically treated genomic DNA (Homo sapiens)
aggtaatgatggaggttgaggagagtattatattgtgatggtgaagaggtgttattgtggtttttattattttattgtttattattggttaagtttttaggagttattgttttttagtttttttgttttttaatttatgagtgttttgtttgtttttaaggttagaatattgtttttggtagagagtggtagttatttgttataagaaagaagattaatgtatttaatatggatatttattgatgtgattgaatagatatttttagagtattgaggggtaaattttgtggtttaattataaaattgtgaaaatggattttgtaattagggttgttgtgtatagttgtgtaggttgtgtattgtgttaggggtttttgtttatagggagtaattagggtttgtattggatttattaagttatgtgtattatttttatattttaaggtggaggaggttttaaaaaagaattggttagtttagaggggttgttttttgtttatttgtttatttagaaggggatattttttttaatttgtttatagatagggtgttgttttttagtttatttattagtagggaatgttatttttaattttatataaatggtattatatatttattagtatgtttatgaagtataagaaataggtttttatggttatagttgtgtataaatttgattttaaggaaattgtgttatagaagataagatgttttttgtgagatttgaataatattttaaataataggagtttatgattatgagtataatgtggtaatgattaattgttaatgtaattttatagttataggaatttagaataagaaattgtattgtatttgtttttttattttgttttgttattttttttgaaggtatttaattaaataatttagttaggagttgtgtaatagtattagttgaaattgtattgtgtttatggattaatgaaagagaaatgagtttttttagatagatttttaaattgtaattatattgttttagaataaagtttatttgtatggaaattgagaagtaaaatagtttagtttattagagtttaaagaattttgttattgtgtttatttgtgtttaatatggttatggtttaatgtttttaattgtgtttattttgattttttttaagtaatttttttatatgtattggtttaatgataatgttttgtttatttttgattgaaatgaatattaaagggatttatgtttatattaaatttggttgtaaaatttaatgaaatttaatatttttttagtatttaaaaaaatttagaaaaagatatatagttagaaatttgtttgaaattttttttttatatttttaaggttgttagggttatataattttttagtgatatagtgtttttttattgtggatttgatatatttttttattattttttttttgtttttggaaattttagtaatttttgtagttattggagtattttttagataagaggagtgatataattgaatggttaggttatatagttgtgttttgggtggttggatattttatgttttttttttttttttttttttttttttttttttgagatggagttttgttttgttgtttaggttggagtgtagtggtgtgattttggtttattgtaagttttgttttttaggtttatgttatttttttgttttagttttttgagtagttgggattataggagtttattattatgtttggttaattttgtttttgtatttttagtagagatggggtttattatattagttaggatggttttgattttttaattttgtgatttatttgttttggttttttaaagtgttgggattataggtatgagttattatgtttttttttttttttttttgagatagagttttgttttgttgtttaggtttgagtgtgggggtataattttagtttattgtaatttttgtttttagggtttaagtgatttttttgttttagttttttgagtagttgggattataggtgtgttattatgtttggttaatttttagtagagatggggttttgttatgttggttaggttaggttggttttgaattttagatgttaagtgatttgtttgttttagttttttaaagtgttgggattataggtatgagtttttgtgtttggttagtatttattagagttaagtagttttattttttggtttttattgttattattattagtagatttgggagaggttttaaatattaaatagatgaggagataataatattaatttttaatggttaatagggtgttttaaattaaaaagatgtttttattttttttaaagttgtttaaaatatattatttaattgatattttttaaa

SEQ ID NO: 2568 - DNA, 2486 bp, Artificial Sequence
  chemically treated genomic DNA (Homo sapiens)
tgtatattgtttagtaaaagaagttaatttgaaagggttatatattgtatgattttaattatgtgatattttggaaaagataaaattgtatagatagtagaaagataagtagttgtttggggttttaggggtagggaggaaggagggataattaggtggagtgtagagggtttttaaggtggtaaaattatttttttatgatattgtaatgatggatatatgatattatatatttttaaaatttataaaatgtagaatattaaaggttgattttaatgttagttatgtattttagttaataataatgtattaatattggttaattagttgttataaatgtattttattaatgtaagatgttagtaataggggaaattggttattgggggagtatttgggaattttgtatattttgtttagttttttttaaaattattttaaatttgttaagattttattttaaggtttattgataaatgataagaaaaaaattatgtaaattggagttttaaaaattagtatttgtgattattaatttataaaataaattggaatagaatttatggtttgtttgttaaaaaatgagttttgtttgaaagataaaagggtgatattatagaaatggaaaatattgtgtttgaggttgtgtatggtgtagtggaaggttatagtttaggggttggttattttgtgtttgagttttttttagtttgtttttgagaagtattgggattttaaattagttataattaagttttggattttatatttgtaaagtgaggatagggagatttatttgatggggttgttgtgaaggtgaagagagaggaagtttgttaaagtaattaaataatatttggtatgtggagttttgtgttttgttttgttttgaaattttttttggtgttgatttgaatgtttttttttgatttggttaatagttgtgttatttttggttagtgatttgtggttgggttgttagttgatgataggtagttttttaagtaggttataataaggtggtaattgattttgttttttgaggatgtttgtttgggttttgttagaagttaagggttttttgatgtggggttttggttttatattgtggtattttgaataattttttatgggttggtaaaaggtgttttatattttagataggttttaggaggatgatttgttttttttaaggagaattgagaatttttagatgattggaaggttttgtatttttattttagtatttttgatagatttttttatatgtggtaaatatagttatagttggaggtttattgttggttgttaataggtagtgaattgttgttgaattagatagtttatgtatagggtatttttattattatagaaagttttgttggttagagtatttaaagtatatttggtttttttttttagttattttgtttattttttgtttgtatttttttttggtatttgtgttgttgttattttagttttagtttttaatgtttaataatattttgatagattaatagagttgtgttttagtaggtttaatattatgttgtatttttggttttttaaatggtagagttatttttttgtttggtgtttaaggttttattagggttttgattgtttgtgttattttatagtttttattttttaggatatgttgaggagtgtatggagtgtatatatagattgtttgttgtttattgagtaagttttgttagtttgtgttaggtttgttttataatttattttttatttgttttggttaaatttttttttattgtgtatttgttttttatatattattagagataattttttttttaggtaaatatttgaatattttaggttttttttttatgtgatatttagtatattttgttttatatgtaatttgtttgtttgtattttttagttttgtttttttttggagtgtttgtttttttaggaataggtgttttaggtttttttttgtgtaggttagtttagtaatatataattattaagtaatatatatttggtaaattgtaagatgttttttttaagatataatttttaaattttttttttaagaagtttttttttaaatttttataggaataagttagtatatttgtattgattttatattgggagattatagaattgtttttttaagtaattttttttttttgtattagttttttgtttttgtgtttttagattaatatttagttatattagttgagtgtttttttttgtagattaggaggattgggttgtgtattagatattgtttatgtttagtttgtattttttaggtgttattatttagtatgtattattagagttttttattgtttgaatttgaatttttttgtttgagggttttgggagatttttttaatttttaagaggattatattatttgttttttaaagtagattagaagttttaggagaatgaagatttttgagaaaagtttttgattaagaattgatgag

SEQ ID NO: 2569 - DNA, 2486 bp, Artificial Sequence
  chemically treated genomic DNA (Homo sapiens)
tttattagtttttggttaaggattttttttaggggtttttatttttttggaatttttggtttgttttgaggggtaggtggtgtggtttttttagggattggagaagttttttagaatttttaggtaaagagatttaggtttaggtaatgggaggttttgataatatatattaagtagtaatgtttaagagatatgaattaggtatggatagtgtttaatatataatttaatttttttagtttgtagaaggggatatttagttagtgtggttgaatgttagtttagaggtatagagataggagattgatgtaaggagagaggattgtttgagggagtgattttgtagttttttaatgtggagttaatgtaagtatgttggtttgtttttatggaagtttaggaaagaattttttagagaagaaatttagaaattgtattttggaaaaagtattttataatttattaagtatgtattgtttggtaattatgtattgttgggttagtttatatagaagaaggtttagagtatttgtttttaaaggaataagtattttaggaagaagtaaggttgggggatgtagatagataaattgtatatgaagtaggatatgttgggtgttatgtggaagggaaatttgaagtatttaggtgtttatttgagggagaaattgtttttggtgatatataagaagtagatatataatggagaagagtttgattagggtagatggagagtggattgtgaaatagatttagtatagattgataaagtttatttaataaatagtaagtagtttgtgtgtgtattttatgtattttttggtatattttggaggatggagattgtaaggtgatataggtggttagggttttgatgaggttttaagtattaagtagaggagtagttttgttatttgagaggttagagatataatatgatgttagatttgttaaaatataattttattgatttattaggatgttattaggtattgggggttggaattggggtggtagtagtataaatattaaggaggaatgtaagtaagagataaatagggtggttagggggagaggttgaatatgttttagatgttttgattaatagaattttttgtgatgatggaaatgttttatatgtggattgtttgatttagtaatagtttattgtttgttaataattgataatggatttttagttatgattgtgtttgttatatgtgggagaatttattggaggtgttaaaatgagagtatagaattttttaattatttgagaatttttagttttttttgaagaaagtaaattatttttttggggtttatttgaagtgtgaaatgttttttgttagtttataaagaattgtttagagtgttatagtgtgaaattgaaattttatattagggagtttttggtttttagtagaatttgaatagatatttttggggagtaaggttaattgttattttgttgtgatttgtttggggaattgtttgttattggttggtagtttagttatagattattagttaaaaatggtataattgttgattgaattagagagaaatatttaggttagtattaggaaaggttttgaagtagggtgaggtatagagttttatatgttgggtgttgtttaattgttttgatagattttttttttttttatttttataataattttattaagtaggtttttttatttttattttgtagatgtgaagtttgaagtttagttgtaattaatttgaagttttagtattttttagaaatgggttggaggggatttaaatatagagtgattagtttttgaattgtggttttttattatattatgtataattttaaatatagtattttttatttttataatgttgtttttttgttttttaaatagaatttattttttaataagtaaattatgaattttgttttaatttattttgtaagttaataattataaatattaatttttaaaattttaatttatataattttttttttgttatttgttaatagattttaaaataaggttttaataaatttagagtggttttgggaaaagttgaatagaatgtatagagtttttaaatgtttttttgataattagttttttttattattaatattttgtattggtgaggtatatttgtaataattgattaattaatattgatatattattattaattgaggtgtatggttaatattagggttagtttttgatgttttatattttatgagttttgaaaatatgtaatgttatgtatttattattatagtattataagagaatagttttgttattttaaaaattttttatattttatttagttattttttttttttttttatttttggagttttaagtaattatttatttttttattgtttgtatagttttattttttttaaaatgttatatagttggaattatataatatataatttttttaaattggttttttttgttgagtaatatgta

SEQ ID NO: 2570 - DNA, 2457 bp, Artificial Sequence
  chemically treated genomic DNA (Homo sapiens)
aatttttttttttttttttttattaaaatataaaaatttaagagattttttattaatgtttttttatgtggtttgttagaatgtatatttgtttgttataatttagttaatgaataatgaaatttatttaagatgttttttgtaaaaattagagttgatgatgtgttattatattagtgattttatagaataggatttatgtgattaatttatgtatgagtttgggggtttttgggaaaataagttatgttatttttgtagattaattgtggtttttttttagtagataaaattgatgtggtttagtaggtttttttttgttatagatgttagaaaatgtataggtaaagtagttgtttaattgtatttagtagtttttttttgtgatgtaatagaattttatgttattttttttgggtttgtgtttttattattggaagtatattagaattattggagagttttttaaataatatagtgaaatttaggttttattttaggataattaaattagaatttttgtatgtagtttgagaaatgatattttttaaagttttttaggagttttttttgtgtatttagggtgagttagttttttttaggtagttattttttttgtttttttagttgttttattttgtatttgatttttttgtgaattgtttaaggtttatttagaagtatattgggataaattttaaataaaattttatagtgtgtttgttagataaagtataaatgtatttttattatgtagagaagtttggttttttttgaatgtaggagtttaaataataaatttgaatagaatttttgtgaagtgttaaataatgttattattttaggttgattttttttatatttattttttgtaatagtttttttagttatattgtttgattgttataggaaaggatgttgtagattttttttgagtggtgattaagtgaaatgtattaaagaaatgaggatagtgagtaattaagatgtttgaagtaatattggaaagggagttaggtttgagttatttttttttgtagttagtgtgtagtggaagtggtttgtgggtgttttatatttggattggagagtaaagtataattttagtgttaagggaagttttttatgtttttggaatagtgttttatatttttttgaaaaggtaataaaatatgtgtatttgttgattaggaataaatgttaaagtgtttattatgatggaagtgtttgatttttatggttttgataagttgttataggattttatgaatttttaatggttggtttatatttaggggtttttagtttttgagggtggtaaaaggtttatagagatgttatttttttagtatattggtttttgttaagattggtgtttatttaaagtattttttgttttttgaatgtatagagattttgttgataataagaaatttttttgggtttgaaattagatgaaaagattttttatttagaaagtgtttattaatttatttaaaaatatgatttggattatttattatatgttagggtttattttgggtatattgaggaataagatagggtttttgatttttgagtttgtattttagttaggggatataggtattaggtaagaaaataaataattgaggtaatgatagtatagggtaattgttatgaaaagaataagttgggtaattggatattatttaagtatagtagtgatatgagtttatttgtattttgaaagattattttagttgttggatgggaaaaatggattgtagggggataaaagtaaaagttgggaaattaattaagaggttattgagtggtttagggaagagatggtagtggtgatagagatagaagagagtagatgtgtaatatatatttgagaatgaaagagaatgtgttggtgattgggatagaattgtagaaagaaaagaagtaagaaaaattttaaatgggtggtttaattatttggtggattgtgatagtattttttgagatagagaagattgggttgtatatataaagaatagatttgggggaaattttaagtgtatagttatttaaattatttaagtatggttattatttaagggtagatatgtttagagtttggttagaggttaagtttggagatatttattttggagatataagtttgtaagtggtattgaaagttagagttgatttggaaagataatttagttagaaaatgagttttttgaggttaggtatggtggtttatgtttgtaattttagtattttgagagtttgaggagtgtggattatttgaggttaggaagttgagattagtttggttaatatggtgaaattttatttttattaaaaatataaaaattagttgggtgtagtggtgtatgtttgtaattttagttatttgtgaagttgaggaatgagaatagtttgaatttgggaggtggaggttgtagtgagttgagatta

SEQ ID NO: 2571 - DNA, 2457 bp, Artificial Sequence
  chemically treated genomic DNA (Homo sapiens)
tgattttagtttattgtaatttttattttttaggtttaagttatttttgttttttagttttataagtagttgggattataggtgtgtattattatgtttagttaatttttgtatttttagtggagatggggttttattatgttggttaggttggttttgattttttgattttaggtgatttatattttttgggtttttaaagtgttaggattataggtatgagttattatgtttagttttaaagggtttattttttaattgagttgtttttttaggttagttttagtttttagtattatttataagtttatgtttttaaagtgagtatttttaggtttgatttttagttagattttaggtatatttatttttagataatagttatatttggataatttagatgattgtatatttgaaattttttttaaatttattttttatatgtataatttagttttttttgttttaggaaatgttgttataatttattaagtggttaagttatttgtttggagttttttttgttttttttttttttgtgattttgttttaattattagtatatttttttttatttttaaatatatgttgtatatttgtttttttttatttttattattattattattttttttttggattatttaatggttttttaattgattttttggtttttgtttttatttttttataatttattttttttatttaatagttagagtgattttttaaaatgtaaataagtttatgttattgttgtgtttaaatgatatttgattgtttggtttattttttttatagtaattattttgtattgttattattttgattatttgtttttttatttagtgtttgtattttttaattagaatgtaagtttagaggttagggattttgttttattttttagtgtgtttagaataagttttgatatgtagtggatgatttagattatatttttaaataaattaataaatattttttgagtgggaggtttttttatttaattttaggtttaagaaagttttttgttgttagtagaatttttgtatatttgaaagatgagaggtgttttaaatagatattggttttggtagaagttagtgtgttaggagaatagtatttttgtggattttttattatttttagaaattgaaagtttttaaatataggttagttattaaagatttatgagattttgtggtgatttattagagttatggaaattggatatttttattatggtggatgttttgatatttgtttttaattagtgaatgtatatattttattatttttttagggaagtatggggtattattttagaagtataagaggttttttttagtgttgggattatgttttgttttttaatttaaatatggaatatttatgagttatttttattgtatattggttgtaaaaagaggtggtttagatttgattttttttttagtgttgttttaggtattttagttgtttattgtttttatttttttggtgtattttatttaattattatttaggagaggtttgtagtatttttttttgtggtaattagatggtgtggttaaaagaattattgtagggaataggtatgggaggaattaatttgaaataatgatattatttgatattttatagaaattttatttagatttattatttagatttttatatttaagaaaagttaaatttttttatatagtgaaaatatatttgtattttgtttaataaatatattatagaattttatttaaggtttattttagtgtatttttaaatggattttgggtagtttataaggaaattaaatataaaataagatagttggggagataaggagaatgattatttaaagaggattggtttattttggatatatagaagaagtttttagagggttttaaaagatgttattttttaggttgtatgtagagattttggtttaattattttgggatgaggtttgggttttattgtgttatttggaaagttttttagtgattttaatgtgtttttagtggtagaagtataagtttagagaaagtagtgtgagattttattatattatagagaggaattgttgagtgtaattgggtagttattttgtttgtatattttttgatatttatgataaaggggaatttgttgagttatattaattttgtttgttaagaggaggttatagttggtttgtagagataatataatttgtttttttggaagtttttagatttatgtatgagttgattatatggattttgttttatagaattattaatataatggtatattattaattttggtttttgtaggaagtattttaaataaattttattgtttattggttggattgtagtaaataaatgtgtattttagtaaattatgtgaaagaatattagtaaaaagttttttgagtttttgtgttttgataaaaaaaaaaaaaaaaaaatt

SEQ ID NO: 2572 - DNA, 2431 bp, Artificial Sequence
  chemically treated genomic DNA (Homo sapiens)
ggttaaatattaatttaaatattaaatattaatttatttgtttatttttatttttttttaatgtgtttattagaaaatttgaaatgatatttgtggtttgtattatttttttgttggatgtaattagtatagagtttttaaggtttaatgtagtatttattttagggatatttgtagttgaagtaatgatttttattttaaagttaaagaataaattttgtattgtaatatttatgatggaagagagaatttgggagataaattaagtaagtaataagttatatgtttttgaggttagttttatttaggatgtaaggtaaatgttgagtgagattattgtgggattaaatgagtgaatatatagtaagtatttgaaattatgttgttgttattgttatttggatttttgggatttgtgttgtttgttttttgggagtttttaagtttatgaattaaaatatggttttttttttgtgtttttagttattgtataattttttttgagtgtttttgagttatatattatttgatagaagtggggataaggtatatagaagtgttattggttttataaagttgtttagaaaattatttaaaaaataagaaatttaggtagtatttgtgttgttttgatataggtattagtattatttttattagttagttagtttatatttgtattgtttttagaatttgaagatttgtttataagtataggggtattgagttgagtggattaatgtgtggatgtttgaattatttatttattatttaggttattttaaaagttttagaaggaggagataaagtttttttaaaatttggaagatttaattggaaagttttgttagaattttgttattgtgagtttttagtttttaggttttttggattttaagagtaatatttgattttgattttgggaatgttgaataaaataagttaatggattttgaatgtggtatttgttttttattttttaaatttataagagtattttttttttttgttatatgaatagagtagtagttgttgatttaagagtgttgggaaaagggtgattgttttttatttggtatagatatttttgaggataagattattgagttaataattgattttatttttttgtaggtttttttgtagtttatttgtgagggtaggaggaagggtgggtgttttggatttatttatagtttttgtttttttaaataattgtgagtaaggaggatagaaggtggtaaatggagttagtgagatagtttaaatgttgtttgggtgttgtattatttagatataaaatattaattttaaatgttaggttgttttgtgtttgtggatgttttgaaattttttttttattttgtgttgatttagtttgaatattgatttagtttttaatttgtgttttttttttttttgtagtttttgaatatgttgtttatgtatttttttgtggttgtggatgagtattttgttggttgttgtaaagagattttttggtgagtggatatggttgtgtagtggtgaatatgaaagagattgtgtggatagttttgaaatattttttaaaagatatgaaattttttggggtgtttaatttgtttgtaatttgtggttatattaaaatatttattttgaatagtaatgatatttttgaaaggagatagttttttgaatttattgtttattttgtatgttgttattatttgaggtaaatagatagtgtagtaatttaaagaaatggatttaggttgaggggagtaggagaagaattaagtgttgtaagtttggatatttttaaaaattgtttttttttattttatttttagaaatgtttattaatatgatagattttaaagtattttgaataataggatgtatggaaaatgattagtagggttattgagttatggtgatgtgtttttgatagtttttgatagtttgtatagatatttgggggtggtggttatagtttttaagttattttgtaatgttatattagattgtttagatgttaggttaaaggttaatattagtagaaatttggtgtgttatatgaatatggtattttttattttttttgtttttatgggatagattgaaaaggggttttttagaatttaaggaaaagtagagaagaaaaagaaattgttttgaggttgtttttgttattgtaggtggggagtaaaggagtttatgtggatttaggaatattttatttttttagtgatagtatttgtttttattaagtgttagttgatgggattgttttgttagtaatattgttttattttttttttttttattagaattgtgtataaggtagtgttagagttgtattttatattttttattgtgttattttatatgagtttaggtaaggtttgtttaattatttttggtttttggtagtaaatattgaaaattt

SEQ ID NO: 2573 - DNA, 2431 bp, Artificial Sequence
  chemically treated genomic DNA (Homo sapiens)
gaatttttaatgtttgttattggggattagaggtggttgggtgggttttatttaggtttatgtaggatggtatgatgagaaatatgaagtgtagttttggtattgttttatatatggttttggtgaggaaagagagggtggggtagtgttattaataaagtaattttattagttggtatttgatgaagataaatgttgttattaaaaaggtgaggtgtttttaaatttatatgggtttttttgttttttatttgtaatggtaagaatagttttaaggtaattttttttttttttttatttttttttgggttttaaagggtttttttttgatttgttttatggaggtagagagaataaagggtgttatgtttatatggtatattagatttttgttaatattaatttttgatttggtatttggatggtttggtgtgatattataaagtgatttgaaagttgtgattattatttttaaatgtttgtgtaggttgttagaggttgttagagatatattgttatgatttggtagttttgttggttattttttatgtattttattatttaggatgttttgaagtttgttatgttaataaatatttttaaagataagataaagaaaagtagtttttagaaatgtttaagtttgtgatatttaattttttttttattttttttaatttaaatttatttttttaaattattgtattatttgtttgttttaaatgataatagtgtgtagaatggataatagatttaaagaattatttttttttagaaatattattgttatttaaagtaaatattttaatatagttataaattataagtaaattaaatattttaaagaattttatgttttttaaaaaatattttaaaattatttatatagttttttttatgtttattattgtatggttatatttatttattgaagaatttttttgtaatagttaatagaatatttatttatggttataaagaggtgtatgaataatgtatttaggggttgtagaagaagagagaatatggattaaaggttgagttagtatttgggttaggttagtatagggtggaaagagggttttggggtatttatagatatagaatagtttggtatttagggttgatattttatgtttaagtgatgtaatatttaggtggtatttgagttgttttattgattttgtttgttgttttttgttttttttatttataattatttaaggaaatagggattgtaaatgagtttagagtatttgtttttttttttgtttttatgaatgagttgtgggagagtttgtaggggagtgaaattgattattaatttagtagttttgtttttaggggtgtttatgttaagtgaaagataattattttttttttggtgtttttgagttagtagttgttgttttatttatgtgataggagggagagatgtttttatgaatttgaaaaatggaaggtagatgttatgtttagaatttattggtttgttttgtttaatatttttagagttagaattaaatattatttttgggatttaaaaaatttgggagttgaaaatttatagtagtaagattttagtaagattttttagttaaattttttaagttttaaaagagttttgttttttttttttgagatttttaaagtggtttaaataatgagtaaatggtttaaatatttatatattggtttatttaatttggtatttttgtgtttatgaataaatttttaaattttggaaatagtgtagatgtagattggttgattggtgagggtggtgttggtatttatattaggatagtataggtgttgtttaggttttttgttttttgaataattttttggatagttttgtgggattagtggtatttttgtgtgttttgtttttatttttgttggatggtgtgtgatttagaagtatttggaaagaattgtatggtgattaaaagtgtaagaggaaaattatgttttgatttatgagtttgaaaatttttaaaaggtaaataatataaattttaaaagtttagataatgatgatgatgatatgattttaagtatttgttgtgtatttatttatttaattttataataattttatttagtatttgttttatattttgaataggattagttttaggagtatatggtttattatttgtttgatttgttttttaaatttttttttttattataaatattataatgtaagatttattttttagttttaagataaaaattattattttagttgtaaatatttttgggatagatattgtattaagttttaaaggttttatattggttatatttagtagaaaagtaatgtaagttataaatgttattttaaattttttagtagatatattaaaaaagaataaagataaataggtgaattaatgtttaatatttaagttaatatttaatt

SEQ ID NO: 2574 - DNA, 2402 bp, Artificial Sequence
  chemically treated genomic DNA (Homo sapiens)
ggtaattattgttaattagaggaaatagaaagaagtttattaagtttgtttttttgaatagttatggtagttttaggttaggtatgtagtatgtttgagggtaaggttgtgttttgtgggaaatttttattattgaaagggtttttagttataaggattttttttggtttgatagttagtttggaggagtttggggttattattttatataagttttttgttataattgtattttggtttattttgatatttggtgtttattttaagttgaggttttagggaagggtagttggaggttagtggtggtttttagtgatagatgggtagagtgtttgttttggtattatttagggtgtgggtagtagtggtttgagtaggtattattgatttgtaggtagggaaagtttgttaggttagttatgtgtttggtattaggaggagaggattagagttagtagtggttataatgagggtaaaatttttatagtggaatattgttatttaaaagggatgggtggttgtagggttttttggatggaagtataaatgagaaaatatatatgtttttgtaaatggatttgtttgggaagataaggttatagtatatatagttttttagtaatttaaattttatgtgttatgatgtagatatttataggataagtaagaataataaaatttttagttttgttttttagtataagataattgaagatatttgtggtgaaaagtatttttgttattaggaagatagataatagttagtaattaatgtttttttgttgtataagttaaaaagtttattaaatttattttttttttagtgtatatataagaatatatttggatatttttgtaaatttatatttaagaatagtgttttttaaattggttatttgaaagaaatttaaaggaaaaagtagatatttttataatatgtttttgttttgttgtagtttgtaattgtgaatttttgtaaattgttataattttggatgaatgatgggaatataataggttgtagaattggagaatgttaaatttttgtttttaatggtaaaatatgttttttttatttttattagaatgtgtgatttatgttatttgaaattaaattttaaatataatgagttattagtgtaatagtttattattaatagtggttttataaataatatatttttattatatatatgtagtttgttgtgaagttagtaaaaggtattttaggttattgaagttttgttgtgttagtgtggttgtagattagaaggatatttttatgtgaattaagatggatgttaattttttttgttgagagttaggttggttgtttttttttgtatatatggtagatggattggttaattagtgtttgttgagttttgggtttgaaattatagagaagttagataattgtggttatgtagtttttgtttatgagtgtaaataagataaataattatttgttatttgggaaaaaaattaaaatgtttattttggatttttattaaagtgttaatggttttataaaatagttgtgtaaatttaggtttttttagtaagtattattttagggggtttgtaaagaaaggaatatatatgaaaaaattaatttttaaaaattttttttatattttagtattgagaagaaaatagaggaggttttatttttattttgtaaatatgtttgagaataaatgatttttaattgggagatatatttgagaataaatagtagtttaatatttatttttttttttttttttggtgttatttaaaaaattgagtattattgtagtttgattttttgttttaggagattaaagtattttttttgattgggtatttatggaaagatgttgtgtttttgggaatagagaatgtttgtgattattgagttttgttattttttgaatgtaatggttatttaaaagtttgaatatttgagagataggatttagtaaatgtaggtttttaataagagttattagagtttaattagttaattagaatttgtttaaaatttattaataattattttatgtgaaatttaaaggattatgtattttttttttttttttaaattttaaatattttttttgtagaaaataatgaaatatagaattatttaagggatatattaaggagttttagttatagttgtttttttatgtggaatatgatagaattaaagtttgttgttaatttttaatgttttggtattaattaggtatttggtatttaattaaggtttagattagttagttatttatttttttgtttatgtattatttattaaagattgaaaattatggggatgattgtaagagttttagaattaggtattttagggtgatgggaagtttaatatttgtagattagatttatttggtgaatta

SEQ ID NO: 2575 - DNA, 2402 bp, Artificial Sequence
  chemically treated genomic DNA (Homo sapiens)
tggtttattaggtgggtttgatttgtaaatgttgaattttttattattttgaaatgtttggttttgaagtttttgtagttgtttttatgatttttagtttttgatgagtaatatataggtgagaagatgagtaattagttgatttgaattttggttgggtattaggtatttgattggtattaaaatattagaaattaataatagattttaattttattatattttatatggagagatggttgtgattgaaattttttaatatattttttaagtaattttgtattttattgttttttgtaaggaaagtatttaaaatttaaaaagagagagaaaatatatagttttttaaattttatataaaataattattagtagattttaagtaaattttggttgattgattagattttgatagtttttattagaaatttgtatttattgggttttattttttaagtgtttagatttttagataattattgtatttagaaagtagtagaatttaataattataggtattttttatttttaagaatgtagtatttttttataaatgtttagttagagaaaatgttttaattttttaaaatagagaattgggttataataatatttagttttttaaatgatattaaaaaaaaaaaaaaaaataggtattaaattattatttgtttttgaatatgttttttagttaaaaattatttgtttttaaatgtgtttgtaaaataaaagtgagattttttttattttttttttaatattgaaatatgaggggaatttttaaaaattaatttttttatgtatatttttttttttataggttttttaaaatgatatttgttgaaaaagtttggatttatatagttgttttataaagttattgatattttaataaaagtttaaaataaatattttaattttttttttaaataataagtgattgtttgttttgtttgtatttgtgaataaaggttgtatagttgtagttgtttagtttttttgtaattttaggtttaagatttagtagatgttgattaattaatttatttattatatgtgtagaaagagatggttagtttgatttttggtagggaaaattggtatttattttggtttatatggagatgtttttttaatttatagttgtgttggtgtaataaaattttgatggtttgaaatattttttgttggttttatagtgagttgtatgtgtatgataagaatgtattatttataagattgttgttagtaatgagttattatattaatggtttattgtgtttggaatttgattttaaatggtatggattatatattttgatgaaaatgagaaaaatatgttttgttattaggaataaagatttaatgttttttaattttataatttgttatatttttattatttatttagggttgtaataatttataaaagtttataattatagattataatagagtaaggatatattgtggaagtgtttgtttttttttttgagttttttttaaataattgatttgagaaatattatttttaaatatgaatttgtaggagtatttaaatgtatttttgtgtatgtattgaaaaaaaaatggatttaatggattttttaatttgtataatagaaaggtattgattgttggttgttatttatttttttggtgatagaagtattttttattataagtgtttttaattattttatattggagaataaaattgaaggttttgttgtttttgtttgttttgtaaatatttatattatgatatataaggtttagattgttagaaaattatgtgtattgtggttttgtttttttaaataggtttatttatagaaatgtgtgtatttttttatttatgtttttatttaaaaagttttatagttatttattttttttgggtgataatattttattgtgagggttttgtttttattgtgattattgttggttttgattttttttttttgatgttaagtgtatggttgatttggtaggttttttttgtttgtaggttagtggtgtttatttggattattgttgtttatattttggatgatgttaaagtagatgttttgtttatttgttattaggagttgttgttggtttttaattatttttttttaaaattttagtttggagtaaatattagatgttaaggtaagttagggtatagttatgataaggaatttgtatgaagtgatggttttaaatttttttaaattagttattaagttaaagaaagtttttgtaattaaaaatttttttagtagtaagggttttttatagggtatagttttgtttttaggtatgttgtatgtttggtttggaattgttatggttgtttagaaagataaatttgatggatttttttttgttttttttggttgatagtggttgtt

SEQ ID NO: 2576 - DNA, 2471 bp, Artificial Sequence
  chemically treated genomic DNA (Homo sapiens)
tggattaattttattatattgtaatggtttgtattttaaatgtaaggataatattaaatttttagttggttattattttttttttttttttaggttttttgaattaaaatattaagaaagtgatttgtttaatttattttgttagaatttatagttaaatttattaaatgtgtaaatattttataagaaagtttataaggtatgttaataattatatttatgtattataagtgtattatttttttaaaaaattaaaaaaattatttttgattttataaagtgaattaaaatggtttgtatgttttttatttaaaaataaaggtgatatttttaggatattaaatgatattttagaagtttatgttgaaaatgagttaataaagttaattaatttatattaaatattaaagaaatatattttttttttttgaaagttataagatattaaatttattggtttttttatattaaaatttttagtttaattttttaaagtagtgttttttatggataaatataaatgttagtattaagagttatttttatatataaaattgaaaattttatgtatatggagattagaataaaaaatgatgtaaatatttaatatgaagtgatttttggtatttgtgtttttttaatagaaaagagggttttttttatgttaggttttgtaatagttagaatgggatttttatgaatttaggagttgatttataatgtatttattttgagaataataagtatgttaaatttggaatttattaagtattttttttttatagtagtaataataaaaaataatagtaataataataataataatagttaatatttaagtagtttttattttggattaggtattgtttgaagtattttttatttattagtttatttaatttttataattttaattttttagattaggttataaattttaatatgaataataaatttgttgtttattattttaaagttttaaaagagagtttttagaagggtaatttttagtttttttaggagaataatttgaaatgaaaatgaagattatatatattattaagttgaaaaatataatgttattttttttgagggatggtttaatatgttaatgtttaatttaagaattttaaaaatgtttttttattagtaattttaaaataaaaataagttgttatataaagtatggttaaaatattattaaaggtatgataaggattgaaattgtagttaatttagtatatagtatatagattattggattgttttagttttttttatgattaatattaattgatatggttgaattgattttgtagtaaggtgttttaattgttgaaatttattatgtgggttgtgttttagagttttggtttttttgtggatatgtttgtaattttgtaggattgattttattagtatagttagaggtttggtaagtgtttgatattaggtaaggttggattttatatttatggttttttataaaatgttagatgtgatatggggtttttttaatttttattattaattaatataattaaaattttaagatataattttttaaaagtataaaatttagaaaatttaaaatatttataaaataataaatttgatattataatttttaaagaggtttagtaatataataatataattttgtgtttatgatgaaaaattttttgaaaattttaatttatatttaatttttataaagtatgtataatttagatatatgtaagatatttaataattggatgagagttttttttaatatatttgtattattgatttttaatgataatgaattatatggtaaatgttttatgagttagtataataatgtaatgaaaatgtattttaggtttttttgttattgtgatgaagaatatgtgattttttattgggtaaataatgattgaaatatttttaaaggtagttgggataatatttttgtggtagtttttggagtgtttagattagatgatatggattttgttattttttaagtgatgaagttgtaatagtaaattgattgtttattaattagggtgataatagtagtttatgaggggttatggtttataaattgaattataaaatttaaaggttaaaaaaattttattattaaaaaaggttataatattgatgtttttttgtgaggattttaaaaagtataagtgtataaaaatatagtttgtttttttaatgtgttggtattaagataaggtatgttagttttgtaggtatattatagttggatggggttgaggtttttgtaagaatttattttttaatggaattttatttttgtgttagagttttgtgttttatattgttgaatatgtttttaaataattaataatatgtgttttttattttatattgtagttgtgttttataagatttttaatttaatggttattatgaaaataagaatatgaatataagagaatataagttattataat

SEQ ID NO: 2577 - DNA, 2471 bp, Artificial Sequence
  chemically treated genomic DNA (Homo sapiens)
gttgtagtggtttatgtttttttatgtttatatttttatttttataataattattgaattgagaattttataaagtataattgtaatgtggaataaaagatatgtgttgttaattgtttagaaatatatttagtaatataaagtataggattttgatgtaggagtaaaattttattagaaaataaatttttataaaggttttagttttatttagttgtaatgtgtttgtgaagttagtatgttttattttggtattaatatattaagaagataggttgtgtttttatgtatttgtgttttttaaaatttttatagaagaatattaatgttgtagttttttttggtagtgaaatttttttggtttttgagttttataatttaatttgtaagttatgattttttataaattgttgttattattttgattaataaatagttaatttgttgttgtagttttgttatttggggaatgatgaggtttatattgtttggtttgaatattttagagattattgtaggggtattattttaattgtttttggagatgttttaattattatttatttaatgaagaattatatgttttttattgtgataatgaagaaatttgaggtatgtttttattgtattgttgtattgatttataaagtatttgttatgtgatttattgttattgaaaattagtgatataaatatgttaaaggggatttttatttagttgttgaatgttttatatatatttgaattatgtatgttttataggaattaaatatgaattgggatttttaaagaattttttattatgagtataaaattgtattattgtattattaggtttttttggaaattataatgttaaatttattattttgtaaatgttttaagttttttaaattttgtatttttgaaaaattgtattttgaaattttggttatgttgattaataataagagttgaaggaattttatattatatttagtattttgtggagaattgtgggtatggaatttagttttgtttggtgttgggtatttgttaagtttttgattgtgttaatggggttaattttgtagaattgtaggtatgtttatgaagaggttgggattttggagtatggtttatgtgatgagttttaataattggagtattttgttgtagaattaatttagttatgttaattggtattgattatgggaagagttggaataatttaatgatttgtgtgttgtgtattaaattggttgtagttttgatttttgttatatttttagtggtattttagttatgttttatgtagtgatttgtttttgttttagaattattaatagaagggtgtttttaaagtttttaaattaaatattagtatattaagttattttttaagaggaatgatattgtgttttttagtttgatagtatgtataatttttatttttattttaagttgtttttttgaaggagttgaaagttatttttttgaaaatttttttttaaagttttgaaataataggtaatagatttattgtttatattgggatttatgatttaatttaaagggttaaagttgtgaggattaaatgagttaataaatagaaagtgttttaaatagtgtttggtttagagtaaaagttatttaagtgttagttattattattattattgttgttgttgttttttgttattattattatggagagagaatatttaatgaattttaagtttaatatgtttattatttttagaatagatgtattgtgggttaatttttgaatttataaaagttttattttggttgttgtaaagtttgatataaagggaatttttttttttattgagggaatgtagatgttaaaagttattttatattaaatatttgtattattttttattttgatttttatgtgtgtgaagtttttagttttgtgtatgaaaatggtttttagtgttaatatttgtatttgtttatgaagagtattattttaaagaattaaattgaaaattttaatataagagaattagtgaatttagtgttttatagtttttaaaaagaggaaatgtgtttttttaatatttagtatggattaattggttttattagtttatttttaatatgggtttttaaaatgttatttaatgttttaaaaatgttatttttatttttaagtaaaaaatatgtaagttattttaatttattttatagaattaaaagtgatttttttgattttttaaaaagatagtatatttataatgtatgaatataattattaatatattttgtaaatttttttataaaatgtttgtatatttaatgaatttggttataaattttgataagatgaattgagtaaattgtttttttaatattttaatttaaaaagtttaaagggaagaagagaataatggttaattggaaatttagtattatttttatatttaaagtataaattattataatgtaataaaattaattta

SEQ ID NO: 2578 - DNA, 2499 bp, Artificial Sequence
  chemically treated genomic DNA (Homo sapiens)
tatttaatttttgtttgtggtagattaggggtttattattggatagtatttatgttatttatggttaggttatatttttgaagttatttgtgtaagtgtgtttgtgtgtgtgtgtgtgtaataggaattagtaagaaaattataaattataaatttatgtagttgttggttatgtatattaattaaaatatatattgaagtatagttgtgttgttttatgatgaggatatattttaagaaatgtgttgttaggtaatttatgattattttgtgaatattatagagtgatttatataaatttagatggtagatgtttattatatatttaggatataaatgtgtataatatgttattatattgaatagtgtaggtaattgtaatataatggaaattgtttgtatattaaattatatttagtatagaaaaggtttagtaaaaatatagtattataattttataggattattattatatatgtggtttgttattgattgaaatgttatatgattatattatagtaatgtgatttatagttatataatttattatagttttaatataagagtaagaagtaaaatttttatatatatatatatatatatatataaaattttagtttttttttttagattttagtatggttatttaaaaaatttttaaaaataattttgatttaattttattagtattatattagagtaaagtagtagtaatatgttaaattttaatatgtttagtttgttataataaaaattattttatttaataatttatttttttaaaaaattttgtatgtgtttataaattattttttttaagatttttttttttttatatgggttttagtttttataaattttgatatttatatttttaaaattattgtataatgtttaatttagtagagtttatatatggtaaatagtttagtaagtattaatttaaagttttagtattttagtagattttttttttatattagaaataaatagataaatagataagtgaaaaaggaaggaaggaagaaaaaaaaatatgaattatgttttttttaggttaatgtttaagtttgttttaattatgttttttgatatattttaaggtttatattagttaaggtaaatattttaagggattgagtagatggatgttgtagtttagaaagtgtgtggtaaatttaggatttaagagtggaataaaagatttattttttttataattaagtttttgattaatgttttaggttttttagtatatatttgtaattatttatagaggtatttattgtgttgggatttgttttggaatattaggtattaagttatttggtagtagatggaagtatatttttgttgatatatgttgtaatgaaaggatttgtgtaaatttggttagtaaggtagtagaatgttatgtatttgaagattaataatgtaaataattatgatgttaattttgttatgtttgtgttaattttatttgttgagatgtggaattaaattttgaagtttgtgggttttaaaaatttttagtatatatttgaattaaataagtttttttttattattggaatttagagttttaattaaaaaatgtttttttaggttaaatttatgggaattatgaattaaattttttaataagttaatattataatttgtaaatgaatttattttgtattgtaagatttgtatgtgtaaaggtaataatttgtaaaatggggtatttaaaaaatatgattaagttgttatattgatgttaaagatagtagataggtatgtagttgagataaagttatatggtttttttattttttggattttagttaattattttaatggaatttgttattatgagtaagaaggttggaaagagagggtaaaataatagatggttagtttattttattttgttatttatgtaagatagtgttttgaggagatatagtgtttgtgtgaagttgttaaagatagtattgggggagggtaaatgggggggttaaagagggaattatatgattagttagttaaattatggttatatgtttgtttttgttgtttttttatattgaagtggaataatttgaagattgtatttttgtgataatattttaaaattaggaataattatgtggtatttaaagaagagttgttgtatatttttaatagtgggatatttataaaatgttttatttatttttaatttagtagaattttttttttattatttttattatatattaagatatagttataatagaagtttttgaaaaatataataaaaatttgaaattttttttatagtttttagggttttatatatatatgggaaagaatgatgtttttagatatgagttatttatgtgtaatttttatgttttttgttatttttttgtttaaagtgaatattatttgtttaataggttttttaaagtgatttatgttttaatttttttatttttataggtttttggggaataggtgttatttggttagatg

SEQ ID NO: 2579 - DNA, 2499 bp, Artificial Sequence
  chemically treated genomic DNA (Homo sapiens)
tatttgattaaatagtgtttgttttttaaaaatttatggaaataaaaaaattaaaatatgagttattttgaaaaatttgttaggtaagtaatgtttattttggatagggagatggtaaaaggtatgaggattgtatatgaatgatttatgtttgagagtattatttttttttatgtatatataaagttttggaggttgtgaggaaggttttagatttttattatattttttaaagatttttgttatagttgtgttttaatgtatggtggggatggtgaaagaaggattttattgagttagaaatgagtggggtattttgtggatgttttattattgagaatatgtagtggtttttttttgagtattatgtggttatttttaattttaaaatgttattataaagatatagtttttgagttgttttattttagtgtggagaagtaatggaagtaggtatatggttataatttggttgattggttatatagttttttttttaatttttttatttatttttttttagtgttgtttttggtgattttatataggtgttgtgtttttttagggtgttgttttatgtgggtggtagggtagggtaggttagttatttgttattttgttttttttttttaatttttttgtttatagtagtaggttttgttgaagtgattggttgaggtttagggggtgagggagttatgtgattttattttagttatatgtttatttgttgtttttagtattagtatagtaatttagttatattttttgaatgttttattttatagattgttgtttttatatatataaattttataatgtaaaatggatttatttataaattgtggtattagtttgttaaaggatttagtttataatttttataaatttagtttagaaaagtattttttaattaaaattttaaattttagtggtgaaaaggggtttatttgatttaagtatgtgttaaagatttttaaagtttataagttttaaggtttagttttatattttaatagatggaattaatataagtataataaagttaatattatggttgtttgtattattaatttttaaatgtatggtattttgttattttgttagttaggtttgtatgaatttttttattgtaatatatgttaatagaaatgtgtttttatttgttgttggatagtttgatgtttgatattttgagataagttttagtataatgagtatttttgtgagtaattataggtgtgtgttgaggagtttagggtattaattagaggtttaattatgaaaaaggtggattttttgttttatttttggattttgagtttattatatattttttaaattgtagtatttatttgtttggttttttagaatgtttgttttgattgatatggattttaaagtgtattaaaggatgtgattaaagtaggtttaaatattaatttggaagaagtatggtttatgttttttttttttttttttttttttttttatttatttatttatttgtttatttttgatgtaggaaaaaagtttgttgaaatgttaaaattttaaattagtatttgttaaattatttattatatgtgaattttattgaattaagtattatatagtaattttaagaatgtaaatattaagatttgtagaaattaagatttatgtaaagaaaaaaaagttttaggaaaaatggtttgtgaatatatataaagttttttaggaagataagttgttaaatgaggtaatttttattatgatagattgaatatgttagaatttagtatgttattattgttttgttttaatgtgatattgatagaattaaattaggattatttttaaggattttttagataattatattgaaatttaagaaaagaaattaggattttgtgtgtgtgtgtgtgtgtgtgtgtggagattttgttttttatttttatattgagattataataggttgtataattataagttatgttattatagtatagttatgtaatattttagttagtggtagattatatatatgatggtggttttataagattatagtgttgtgtttttattgaattttttttgtgttagatgtggtttgatatgtagataatttttattgtgttataattgtttatattatttggtatagtaatatgttgtgtatatttgtattttggatgtgtagtaggtatttattatttaggtttgtgtaagttattttatgatgtttataagatgattatagattgtttaatagtatattttttagaatgtatttttattataaagtgatatgattgtattttagtgtgtgttttgattaatgtatatggttaatagttgtataagtttgtggtttgtggtttttttattaatttttgttatatatatatatatataaatatgtttgtatagatggttttagagatgtggtttggttatggatggtatgaatgttgtttagtggtggatttttgatttgttataggtaagaattagata

SEQ ID NO: 2580 - DNA, 2400 bp, Artificial Sequence
  chemically treated genomic DNA (Homo sapiens)
ataaattattttttttaagatttttttttttttatatgggttttagtttttataaattttgatatttatatttttaaaattattgtataatgtttaatttagtagagtttatatatggtaaatagtttagtaagtattaatttaaagttttagtattttagtagattttttttttatattagaaataaatagataaatagataagtgaaaaaggaaggaaggaagaaaaaaaaatatgaattatgttttttttaggttaatgtttaagtttgttttaattatgttttttgatatattttaaggtttatattagttaaggtaaatattttaagggattgagtagatggatgttgtagtttagaaagtgtgtggtaaatttaggatttaagagtggaataaaagatttattttttttataattaagtttttgattaatgttttaggttttttagtatatatttgtaattatttatagaggtatttattgtgttgggatttgttttggaatattaggtattaagttatttggtagtagatggaagtatatttttgttgatatatgttgtaatgaaaggatttgtgtaaatttggttagtaaggtagtagaatgttatgtatttgaagattaataatgtaaataattatgatgttaattttgttatgtttgtgttaattttatttgttgagatgtggaattaaattttgaagtttgtgggttttaaaaatttttagtatatatttgaattaaataagtttttttttattattggaatttagagttttaattaaaaaatgtttttttaggttaaatttatgggaattatgaattaaattttttaataagttaatattataatttgtaaatgaatttattttgtattgtaagatttgtatgtgtaaaggtaataatttgtaaaatggggtatttaaaaaatatgattaagttgttatattgatgttaaagatagtagataggtatgtagttgagataaagttatatggtttttttattttttggattttagttaattattttaatggaatttgttattatgagtaagaaggttggaaagagagggtaaaataatagatggttagtttattttattttgttatttatgtaagatagtgttttgaggagatatagtgtttgtgtgaagttgttaaagatagtattgggggagggtaaatgggggggttaaagagggaattatatgattagttagttaaattatggttatatgtttgtttttgttgtttttttatattgaagtggaataatttgaagattgtatttttgtgataatattttaaaattaggaataattatgtggtatttaaagaagagttgttgtatatttttaatagtgggatatttataaaatgttttatttatttttaatttagtagaattttttttttattatttttattatatattaagatatagttataatagaagtttttgaaaaatataataaaaatttgaaattttttttatagtttttagggttttatatatatatgggaaagaatgatgtttttagatatgagttatttatgtgtaatttttatgttttttgttatttttttgtttaaagtgaatattatttgtttaataggttttttaaagtgatttatgttttaatttttttatttttataggtttttggggaataggtgttatttggttagatgagtaagttttttagtggtgatttgtgagattttgatgtatttattatttaagtagtaagtattatatttaatttgtagttttttattttttatttttttttatttttttttttaagtttttaaagtttattgtattatttttatgtttttgtgtatttagaatttagtttttatttatgagtgagaatatataatgtttggttttttatttttgagttattttgtttagaataatggtttaattattttgaaaaatttatgtgtatttttttttataagtaaaaagtaatttaagtaatataatgatagtaattaatgttgttaaatttttgttaaaaatattattttttgatgaagattttgggtttgagagtagttttttttgttgaatataagtatagaatgtaatgttagggtggtgtgaaagaataattttttttaattttagttggtttatttaatagtattataaggatttgtagagaggaggaaaggggttattttttttattgtgtgatttaatgttatttagtgttgtttttattgagatggttagtgagaaatggttttgtattttgatgtggtgaaaagaattttagaatttgagttatgaggtttaggtttaaagttttgtgtgattgtgggtagattatgttatatttagagttttatgttttttttttgtaaaatgaaatgatattt

SEQ ID NO: 2581 - DNA, 2400 bp, Artificial Sequence
  chemically treated genomic DNA (Homo sapiens)
gagtattattttattttatggaagagaagtatgaagttttgggtatgatatgatttgtttatagttatataaggttttggatttaggttttatggtttaagttttagagttttttttattatgttagagtgtagggttgttttttattagttattttagtggaggtagtgttgaatagtattgaattatatagtagaaaggatggtttttttttttttttttgtaggtttttgtgatattgttaggtaggttagttggagttgagagaagttatttttttatattattttgatattgtattttgtgtttatatttaataaggagagttgtttttagatttagagtttttattagaggatggtatttttagtaaaaatttagtagtattgattattgttattgtattatttgagttattttttatttatgagaaaggatatatataaattttttagaataattgggttattattttaagtgaagtaatttgggaatggaaaattaaatattgtatgtttttatttataagtgggagttaagttttgagtatgtagaggtataagaataatatagtggattttggggatttgggggaaagggtggaaggggatgagggataaaagattataaattgggtatagtgtttattgtttgggtgatgggtgtattaaaattttataaattattattaaagaatttatttatttgattaaatagtgtttgttttttaaaaatttatggaaataaaaaaattaaaatatgagttattttgaaaaatttgttaggtaagtaatgtttattttggatagggagatggtaaaaggtatgaggattgtatatgaatgatttatgtttgagagtattatttttttttatgtatatataaagttttggaggttgtgaggaaggttttagatttttattatattttttaaagatttttgttatagttgtgttttaatgtatggtggggatggtgaaagaaggattttattgagttagaaatgagtggggtattttgtggatgttttattattgagaatatgtagtggtttttttttgagtattatgtggttatttttaattttaaaatgttattataaagatatagtttttgagttgttttattttagtgtggagaagtaatggaagtaggtatatggttataatttggttgattggttatatagttttttttttaatttttttatttatttttttttagtgttgtttttggtgattttatataggtgttgtgtttttttagggtgttgttttatgtgggtggtagggtagggtaggttagttatttgttattttgttttttttttttaatttttttgtttatagtagtaggttttgttgaagtgattggttgaggtttagggggtgagggagttatgtgattttattttagttatatgtttatttgttgtttttagtattagtatagtaatttagttatattttttgaatgttttattttatagattgttgtttttatatatataaattttataatgtaaaatggatttatttataaattgtggtattagtttgttaaaggatttagtttataatttttataaatttagtttagaaaagtattttttaattaaaattttaaattttagtggtgaaaaggggtttatttgatttaagtatgtgttaaagatttttaaagtttataagttttaaggtttagttttatattttaatagatggaattaatataagtataataaagttaatattatggttgtttgtattattaatttttaaatgtatggtattttgttattttgttagttaggtttgtatgaatttttttattgtaatatatgttaatagaaatgtgtttttatttgttgttggatagtttgatgtttgatattttgagataagttttagtataatgagtatttttgtgagtaattataggtgtgtgttgaggagtttagggtattaattagaggtttaattatgaaaaaggtggattttttgttttatttttggattttgagtttattatatattttttaaattgtagtatttatttgtttggttttttagaatgtttgttttgattgatatggattttaaagtgtattaaaggatgtgattaaagtaggtttaaatattaatttggaagaagtatggtttatgttttttttttttttttttttttttttttatttatttatttatttgtttatttttgatgtaggaaaaaagtttgttgaaatgttaaaattttaaattagtatttgttaaattatttattatatgtgaattttattgaattaagtattatatagtaattttaagaatgtaaatattaagatttgtagaaattaagatttatgtaaagaaaaaaaagttttaggaaaaatggtttgt

SEQ ID NO: 2582 - DNA, 2490 bp, Artificial Sequence
  chemically treated genomic DNA (Homo sapiens)
ttagttaattatttatttttttgagttgtttttttatttataaaatgggtataataattttttaaattataaaaatgttttgaggattaaatgagattatgaatataaagtatttagtagaaggttgggtatttattaagtgtttagtggtagttattattattagtattatttaggttaataagaaataagataaattgaggaattaaaagttttaaaattttaaatttttttttttggattttatttttatattttttttattgaatttagagatagtggttttttttttttattattttggtatttttttgtttattattttttataattgttttttttatggaggtgttaaggagtaataaaatgtttaaaaggtaagagaggaggaaggggaagtttttatttaggaaatttatattttagttagttttggtattagatgtgttttttagtagtgtattaatattaggagggtttatatgggaaggtaatagtagatttttagtattttttttaaattaggattagaattggttttattttgattattattatttttttgggttattgtgttttagggtttagattatttttttttagtaaagtttgtttaatatttttaggtgttgagaggttttttttatagggttttagagtatatatgtatattttttttagaagatggtagtgagtttgtattggaatttatttttttttattagtttgattgtttgagggtttgtattattttttttttatttttatatatttaatatttagaaaaggaattttaattttattttagataggtaaattagttattgaatgtaggttgatttttagggattaatttaggtttaggtagttttggtttaaattgggtttgtagttatttttaagtggggagttgaaattttaaagtttgatttttttttttgttgaatagaaggggagatgtgtaagaatgatataattttattttagatattaatttagaggaagaggatgggagttattatattgatttttaaaaggggataagagatttatatttatatttttaagtttattatagattattaattatgatgtaatttgttataatagggggattttttttgaagagatggtgttaaaatttgattatgaggtttttttatgtgaagagagaaaagggggtgtttggggattatttatgagaatttggggagggttttaattgtataaattagttgtgggttatagaatgtttgtttagtttattagtatttgttgtttatagtgattatttatttaatagattggttgtgaataagatgatgggattagtgggtttatgttttagagagttttgtttattattaatatgagttatgttttgtttaggaattattttttttgttgaagaaatattgtgatgtaatatgataaatatgtttttattatgagtgtagatttgtttagaaagatttgtattaaggtggttgtattttgtatgaattatatgttggggaggggtaggtagtattaaaaattagttttatttgagtttttaagttattatggtatatgtgtttgttttattataaattttaaaggtttgtgatgtttggtttttattgtttaagttttttttttttttgtaagggtggaattatttgtttgtaatattagtaattattatgtattttggaattgagtagagagtgtgtttgagtgtgtatgtttagattggagggaattatttttatttttaaagttaaattttattttttttttaatttgaaattatgtattttagtttttggaaagttgggaatggtagttagaaggaaataagttatattaatttggttgatgtgagagaggagtttagttttggaaattttatataaatttagaaagagaatattatgtttttattttttatatgtttattttatttgtttttttgaataagtataaataagatataatagtttagtaggttgttattgaaagagtgagtaatgggtttttaggaaagaggttggtggtggttaaggagtttgtattgatagaattaaaggaggaaagtagtagttatgtgtttattttgatttgtttttaatggggttatgtttttataaagaaaagagttaatattttgattttatttttttatattttttaaaaggtataggaagtttttatttatagttattagtagttttttggataattaaagttgttagtgttatttaggaatttttttggggatttagtttttttttgttttttgtttgaaaatttttttgatttagaaagatttttgggtttgttttatataagtagaaggtttgtttttttagatttgtttttttttagtaaaattgtgaaagaattttattttttttttaaagttgtttttttggttttatattttaattttaataattatagattatagagaagttgatagaatttgtttttataaaataaatataa

SEQ ID NO: 2583 - DNA, 2490 bp, Artificial Sequence
  chemically treated genomic DNA (Homo sapiens)
ttgtgtttgttttatggaaataggttttgttagtttttttatagtttatagttgttaagattaaaatgtgagattagaagagtagttttgaaagagaagtagaatttttttatagttttgttgaggaaggataagtttgaaggaataggttttttgtttatgtaagataaatttaggaatttttttggattagaggagtttttagataaagggtagagagagattagatttttaaaagggtttttaggtaatattagtagttttggttatttaagaggttgttggtgattgtaggtagggattttttgtgttttttgaaaagtgtaggagagtaggattagggtgttggtttttttttttgtgaagatatagttttattaaaagtagattaaggtgagtatatggttgttgttttttttttttggttttattagtataagttttttagttattattagttttttttttagaagtttattatttatttttttagtagtagtttattaaattattgtgttttgtttgtgtttgtttaggagaatagatgaggtggatgtgtgggaggtggggatgtaatgttttttttttgagtttgtgtggagtttttagggttaggttttttttttatattagttaaattgatgtgatttgtttttttttggttgttatttttaattttttagaggttgaggtgtatgattttaaattgaagggggagtagaatttgattttgaaggtaggggtaattttttttaatttaaatatgtatatttgagtatattttttgtttaattttaaggtgtatagtaattgttggtattataaataggtaattttatttttgtaaaggaggaggggatttaaataatgaaagttagatgttataggtttttgaggtttatagtgaagtaggtatatatgttataatgatttgaaggtttaagtgggattagtttttagtgttatttatttttttttagtatgtgatttatgtaaaatgtagttattttaatgtagatttttttagataaatttatatttgtgatggggatgtgtttattatattatattgtagtgtttttttaataagaggaatggtttttgaataggatgtagtttatgttaatgatgagtaaagttttttggggtatgaatttgttgattttattattttgtttatggttagtttgttggatgaatggttattgtaagtagtaggtgttaatgagttgagtaagtattttgtggtttatagttagtttgtgtagttggagttttttttagatttttgtggataatttttagatatttttttttttttttttatatggaaaagttttatgattaaattttggtattatttttttaaagggaatttttttgttgtagtaggttgtattgtggttggtaatttgtggtaagtttgggagtatgaatgtgggttttttgtttttttttgagagttagtgtggtaatttttattttttttttttggattagtatttggaatggagttgtgttgtttttgtatatttttttttttatttaataagagaaagaattagattttaagattttggttttttatttgggaatggttgtgaatttagtttaaattagaattatttgggtttaggttggtttttgagaattaatttgtatttagtgattagtttatttatttgaaataaagttagggttttttttttagatattaggtatatagagatgaaagagagatgatgtaagtttttagataattaggttggtggagaggagtaaattttaatgtgagtttgttattgttttttaaaggagatgtgtatatgtattttgaggttttgtaggaggggttttttagtatttaggggtgttggataggttttgttaaagagggatggtttgggttttgagatatagtgatttagagaagtggtggtggttaggatgggattagttttagttttggtttagggaaaatgttaagaatttgttgttgtttttttatatagatttttttgatgttgatgtattgttaagaaatatatttggtattaggattgattaggatgtaaattttttaagtagaggttttttttttttttttttttgttttttgggtattttattgttttttagtatttttatgaggaggataattgtggaaagtagtggatgaggaggtgttagggtaataagaaggaggaattgttatttttaggtttaatggaaaggatataaaagtgaggtttagaagaaaaagtttgaagttttggggtttttggttttttagtttattttgttttttattagtttagatggtattagtaatagtagttattattaagtatttaatggatgtttagttttttgttgaatgttttatatttatgattttatttaatttttaaaatatttttataatttaggagattattatgtttattttataaatgaggaaatagtttagggaagtaagtaattggttga

SEQ ID NO: 2584 - DNA, 2475 bp, Artificial Sequence
  chemically treated genomic DNA (Homo sapiens)
gttattgtgtttggtttatggataaggttttgatgttggagaaaggagagtgaataaaataattatgatttttgtttttatggggtttatagatagggagtaattagataattgtataaataaataattatagattttggtaaatgttaagatatttatagagggttagaagaaaatatgttaggtagttttaatttttaggttaagagagataggtattttttgttgagttggaagaggaaattaaggtttaggatagggtaggtgtgtttgttgttgtttggtgagttagggttgtattaggattagaagttttatttttgattattgaataaaaggtttagttttaggttgatatttattatgatatatttttttatttttttttttgttattttttgattttattttttttggaaaataagttttgatttgtagttttgatatttgatgtttataaatttttaaattttatttttattatttttttatttttattttatatagagtgtagtttagttaggttggtaagggttgttggttagggttagatgattagaaagtgtagaggaggagagaatttggggtttttaggttgggagtagttagggaagggttaagttggaaaagtagtatttgttaggttggtaagagataaggtttaagtgtaggtattgtgaggaagtgagagtgaggtagaaggatgttttaatgttaggaagtgatgtgtagggatagagggatgggggatgaaggatgaagaatggaggggaggatgaagttgggttatatggttaggaggaagagtagtagggaaggaatgtatagagagttttttgtttttaggttttttttaatttttgtttttttttttttttatttttattttttataattttagtagagggttgaggggaatatagtaaaattttggagattgttttttagggagtagagtattttattaatattttggttagatttatggtttagggaggggtggggtaatttataggagagtgaaggtgttttagtttttaaggatttttgagaggttatgtagtttatgtttttgttttttaatatttaatagaggggaattatattttttttatttttttttagatatgaagagattttttgttttttttagattttttgttttttataatttttggttgtggggaattttttttaaggtatagattggattttttttgttgtagtttttgatttggttttttttattttgttttttgtggttagagaaagtttttttttgggtgattatagtggttttttaggattttttttttaatatttttttattgttagttggttttttttagaaggtaagtttaattttttttattgtagtttttagtattttttttgttgttgtattttatgtttttaaggtagaaatgtatttttttttttattaaataattaatagagataagggagaagaagggagagatttaagaagatggggatgaattaaggagatggagttggaggtggatgtttgatatagaagaaggaagattggggattttttaaggtagggtagggatggggttagtgggttttattggtgttggggttttttagaaaggtgtttttgtttttgtggttttttagtggggttgtgggtgttggtttgtttttgggtagttgtgggaagttggtgatgtttatgtagtttattggtgagtaggtgtttagggtgtttttttggttggttttgttttttgttgttatttttgtttgtgttttttagtagtgtagtgtttgttggaagtggttgtggtgggggagtgggagggtggagggtggggtttgatttttgtgatagttgggagggggtgttttttttagtttttggttgtgttttggtttgatttgtttttgtttgtttagtgttattagtttgtagttggtatataggtgtgtgtagatggatagttaggaaggtagtgtagggttgaggggagagtgtggggtaagtgagattttagtggttttgtattttatgtagtttagggattaaatttttttttttttttagtttgaatatagttagtgttttttttaaattttaggttttttttttgggttttagatttttttattgattgtaaattttttttgattttagattttgtttttgattttaaattttttggattttagatttttttttgaattttgagattttttttttttgattttagattttttttttgattttagattttttttttgattttagattttgtttttatttttaaatttttttgaaaattttagtttatgttttatttttaggtttttttgattgtagatgtttttttggataatagattttttttttgattttagatttttttttgtattttgatatttttgattttttttttaattgtatttttaaattttagtgtgtgttaggatttttgaaagtggattttt

SEQ ID NO: 2585 - DNA, 2475 bp, Artificial Sequence
  chemically treated genomic DNA (Homo sapiens)
ggggatttgtttttaaagattttaatatatattaaagtttgagaatgtggttgaaagaggagttagaagtgttggggtgtgggaagggatttgaggttagaggagggatttgttgtttaaagaggtgtttgtagttaaagaggtttggagatgaagtatgggttggggtttttaaaagggtttgggggtgaagatagagtttgaagttgaaaaagaggtttaaggttggaggaggagtttaaaattggaggaggaggattttggaatttaaggaggggtttggggtttgaggagtttggggttagagataggatttggggttgagagggatttgtggttagtgaaagggtttggggtttgaaaaggaagtttgggatttgaggaggatattagttgtatttaggttggaaggaggaaggggtttggtttttgagttgtgtaaagtgtagagttattgaagttttgtttgttttgtgttttttttttgattttgtgttgtttttttggttgtttatttatatgtatttgtgtgttagttgtaggttgatagtgttgagtagatgggggtgagttagattgggatatggttgagggttgggagaggtgtttttttttggttgttgtgaagattaggttttgttttttgtttttttatttttttgttgtagttatttttggtaggtgttgtgttgttggggggtgtgggtgaggatggtggtggagaatgaggttagttaggagagtgttttgggtgtttatttgttagtggattatatgagtattattagttttttgtggttgtttgaggatgagttggtgtttgtggttttgttgaggggttgtaaggatgaggatgtttttttgggagattttgatattggtgaggtttgttgattttgtttttgttttgttttgggaagtttttggtttttttttttttgtgttaagtatttatttttagttttatttttttaatttatttttatttttttggattttttttttttttttttttgtttttgttaattatttggtgaggaagggggtgtatttttgttttggaggtgtaggatgtgataatggagaggatgttagggattgtagtagaagggattgggtttattttttgggaagaattaattaatgatgaaggaatgttgaaggggagattttaaggaattgttgtgattatttagaagagggttttttttagttatagaggataggataggagaaattaagttagagattgtagtaagagggatttaatttgtgttttaagagaagttttttatagttagggattgtgagaagtagagggtttgggagaagtggagaatttttttatgtttagggaggggtaaagagaatatgatttttttttgttgggtgttgggagatggaggtatggattgtatgattttttaaaagtttttggggattagaatgtttttatttttttgtggattattttatttttttttgagttatggatttggttggggtattagtaaggtattttgttttttaggaagtagtttttagaattttattgtgttttttttagttttttgttggaattgtgagaagtgggggtaagagaaggaggagatagggattggaagagatttgggggtaaagagttttttgtgtattttttttttgttgtttttttttttagttatgtggtttagttttatttttttttttattttttattttttattttttatttttttgtttttgtatgttattttttggtattagagtatttttttattttatttttgtttttttgtagtgtttgtatttgagttttgttttttattagtttggtagatgttgtttttttggtttggtttttttttagttgtttttagtttgaaagttttaaattttttttttttttatattttttggttatttggttttgattagtagtttttgttaatttgattggattgtattttgtatggggtgggggtgaggagataatgaagatggagtttagaggtttatgggtgttaaatgttagggttgtggattaaaatttattttttaaagggagtggaattaggaggtagtagggagaggagtgggaagatgtgttatgatggatattagtttgaagttaggttttttatttagtagttaggagtgagatttttggttttaatatagttttgatttattaagtgataataggtatatttattttgttttgggttttagtttttttttttagtttaatagagaatgtttgttttttttgatttagagattggaattgtttgatatgtttttttttggttttttgtaaatgttttagtatttattaaaatttatgattatttatttgtgtaattatttgattattttttgtttgtaagttttatgagggtagggattatgattgttttgtttatttttttttttttagtattaagattttatttataggttgggtgtggtggt

SEQ ID NO: 2586 - DNA, 2498 bp, Artificial Sequence
  chemically treated genomic DNA (Homo sapiens)
ttttttatagttgggtgtttaggtgattgatagttttttaaatattatgttagtattgaagatatttatttttttattttgtaggttagaagattgaggtttagtgatgttggagggttttatagttagtgagtgaggaagttaaaatgtgaatttgatggttttttttgatttattttatgtttgtgtgtgatagttatggttgtggtgggggtgagagtgggtatagagatgttagtttgggtttgttattgttagaagtgaagatgatattttagtgttgtagattttgtaggaggggattggagttaagttataaatttttttttgttaggagatgggtttttggagtgggtgtggtgtttgattatttggggagatggttgaagttggggatttgggaaggtttttagaagggaggtggtttggggaattaggggtttagtttttttaggatggattggtttgatggtggttttttaagtttgttttgtttttagttattgggtattttgtttattttggaggaggaatgtatgttttttaaggttttagatgttagtttttgggttaagttttatgataattatgtggggaagttatttaatttttagtagttttggtttgataagaagtgtaagtattaggtttattttgaggtggtttattatgtaggtgtggtaggtgtttgttggaattttagtttttggttaggttttttttgttttgttttaggttttttatttgggtttagtatttgatttgtttttttaggtgttttatagtattgtgggttggttggagaaaaataaggattttttgaatgagattgtggtttttattttttagaagttatagaataggtttttggtgattttttatgagaattatgtgggtttttgttttagtgagtatggagggataagatttttattttgataggggtttatagagtgatattttttggagtgattaggttttttgtttttattagttgagttttttaagtttggggtgaaagagaagtgtaagaaggtagtattgttttagatggtgttttagttgtataaggtaaggttttatttgggagatagatttttttttttggtagtttttagttttgttttttattttttgttttgttttttgtgttttgggtgggtggttgttaagatttgtagtgatgtttaatttttttttatgtgaatattatagtaagtttgtgttgttttttgtttttatgttgtttgggtagggtttgtggggaaggggtgggagttttggggttttgggagggatggggatttggtagggaagtgaagattttggtggtggtgatgggagatagtgaagggttttttattattagaatgagagtgaaagagtaaaagtgtagggtatttagggttttgtttttgttttggttttgattattgtggtatttaattttggttttttgttttttttgtgttttttttttatttttttttattgttaggagaattttaataagttgatgattaatttgtgggttatatagttttattttgtttgttgtattgtttttaatgagaataaaattttaggtagttatttagggttggtttggttggggttgggaggtattatgggaaggtgatagggtagaggttgggaggttgagtatatttttttttttattttgtagggtttttattgttgttttttttttggggtttgtgggtgtgtttgttgatttttgattttttttttttttatgtttaggggttatggatgtttttttggtgttatattagttgtgttgtaatggggttttggaggggatttggatttgttgttaagggttttttaataggttgttttatattgatttttggtagtggtgggtgattttttttttttgtttgttgttttaggtggaggtttgaggggttgggtaggatatatatattagagtttaatagatggttttttgtttggagggggaagtagggattgtgaggggtttggttaggtattttagtaagatatgggggtggtttagatttggttggggatttggggagaagtgaataggtttggggtaaatagtggaggtggagtttataggttttgttgataagttggatatggaattttggatgtagaaaagatgaatgatttttagttttgggagtgagtaatttgggagttattagtggtagatttattgagttataaaaatagggttttttgatttggaggagaggtgaagggatattggtttgagttttgttttgtgtgtattaggtttgaaatgtttttagtagatattttagaaaagttatgggggagattgggattattaatttggagtttagggtagtgggtagaaaggatgtagatttgggagttgaatgagaattatgtggatgaggttttatgagatatttggtatatagtaagtatttgggtagtgttgttagtttttttttgtttttttaatgggtaataagtat

SEQ ID NO: 2587 - DNA, 2498 bp, Artificial Sequence
  chemically treated genomic DNA (Homo sapiens)
atgtttgttgtttattgagggaatggggaggagttggtagtattgtttaggtgtttgttatgtgttaggtgttttatgaagttttgtttatatgatttttgtttaatttttaaatttgtattttttttgtttgttgttttgagttttagattgataattttaattttttttatgatttttttaggatgtttgttggaggtattttaaatttgatatatgtaaaatagagtttaaattagtatttttttattttttttttaaattaaaaaattttgtttttgtagtttagtaaatttattattggtagtttttaggttgtttatttttaaaattagaaattatttgttttttttgtatttagaattttatgtttagtttattagtgaggtttgtaggttttatttttattatttgttttaagtttatttatttttttttaagtttttggttaggtttgagttatttttatgttttgttgggatatttggttaggttttttatagtttttgtttttttttttagataggggattgtttgttgggttttgatatgtgtgttttgtttagttttttaggtttttatttggagtagtaggtagggggaaggggttatttattgttgttggaagttggtgtagagtaatttgttggggaatttttggtggtagatttggattttttttaggattttattgtagtgtagttggtgtagtattaagaaggtatttatgatttttggatgtgagaggggaaaaggttagaggttaataggtatatttgtaggttttagagaaaaagtagtagtggagattttgtgaggtgagggggaagatgtatttagttttttggtttttgttttgttatttttttatgatgttttttggttttagttaggttagttttgggtgattatttggggttttgtttttgttggggataatgtagtggatgaagtggggttgtgtggtttgtaggttggttattagtttgttgaggtttttttggtagtggggaagagtgagggaaaggtataaagggggtagagaattagaattggatgttgtagtggttaggattgagatgggagtagggttttaagtgttttgtatttttgtttttttatttttattttggtgatgggagattttttgttgttttttattattattattaaagtttttatttttttgttaaatttttgttttttttagagttttagggtttttattttttttttataaattttgtttaggtagtgtagggatgggaagtagtatagatttgttgtgatgtttatgtggagaggagttaaatattattgtaagttttaatagttgtttgtttaaggtataggggatagggtagggggtgaaggatggggttggaggttgttaagagggagggtttgttttttagatggggttttattttgtgtagttgggatattgtttggaatgatgttgtttttttatgttttttttttattttagatttggggggtttagttaatagagataaggggtttggttattttagggaatgttgttttgtgggtttttgttagagtggagattttgtttttttatatttattggagtaggagtttgtataatttttatagagagttgttaggagtttattttgtgatttttggaagatggggattatggttttatttaggggatttttgtttttttttagttagtttataatgttgtaaggtatttggagagataagttaggtgttgagtttgggtgggagatttggagtagggtgggaggagtttggttgagggttggggttttagtaagtatttattatgtttgtgtagtggattattttgaagtgggtttggtatttgtgttttttgttaggttgaggttgttggaaattgggtgatttttttgtgtggttgttgtagagtttggtttggaagttggtgtttgaggttttggggaatatgtattttttttttaggatggataggatgtttagtggttgggaatagaatgagtttgaaaagttattattaagttagtttattttggaaggattgaatttttggttttttaggttattttttttttgggagtttttttagatttttagttttagttatttttttggatggttagatattatatttattttaagaatttattttttaatagagaaaagtttgtggtttggttttagtttttttttgtaaaatttgtagtattgaggtgttatttttatttttaataatggtaaatttaagttggtatttttgtatttatttttatttttgttatagttatggttgttatatataaatatggggtaagttaaaaaaagttattaagtttatattttggtttttttatttattagttgtggggttttttgatattattaagttttagttttttaatttgtagagtgggaagatgaatgtttttagtgttgatataatatttaaaaagttgttaattatttaaatgtttagttgtagggga

SEQ ID NO: 2588 - DNA, 2282 bp, Artificial Sequence
  chemically treated genomic DNA (Homo sapiens)
ttggttaaatttttggagatataggattttgttgtgttgtttgggttggttttgaatttttggatttaagtgatttgtttgttttggttttttaaagtgttgggattatagggttttaagttaggttttaagaatataagggggaaaaaggttgtttatttatggttgtgtgatggttaggaaaatattttttatttataattgttttttttgtttatagttttttatatatatagattttttagtttttattttattttattttttttgttatttgaggaagtgatatttaaattaaatttaaataaagttatattgtgaaaagttttatttttattttttttttttttagtttaatttttattttatttttattaattattttattagttttttgagtattttttaaattttttatgaaaaagttgtttttaaataaagttaatgttttataggtgttagtaaggtttggggtgggggagggtggaagaagtagtggattaggttttatttaatttggtttattttaaagtagtgttttttgtttatttaaaaataataataattatatgttgggtatttgttataagttagatgtttaatattaattatttttagtttttagtatgtattagaaatgtattaatgttttatataattgttttttttgatttttataataattttaaaaggtaggttattaatttttatttttattttataagtgaggaaattgaggtatagaaaggttatttgtttaagtaagagagaggagtagggttttgaatttaggtttgattttagagttttttttaattgtgatgttttatattagtaaattagatatagtttttgtatttgttggaatttagtttaatgtgggagatgggtgagaaaaaggtagataataaagaaatatgaaattatagattaagaaagtaatgtaaatgaaatgaatttgtggttgtgatagaataataatggggatttattttagaaaggggaaggaaagagtgttaaggaaaggtttgagaaaatgatatttatgaaatgtttgggaattatttgggggttgtaatgatgatttttttttttatgtttaatatatgggataaatttgaggtttatagaggttaaaataaatatgatagggttttttagatgtgtagatgtggtgtaaagaagggaggatttagaaattgggtttagggtttgtatatgttattagtgtttatagtagtttagttttgtttggtttttgataagggatattaagttagttgttttttatggttttgttgtagttgagagtgtttgggtagtttatagggaggttttttggttagttaaaagggttttggtttgtttagtggtggtttggaaaggttttttttttggttttttgttagtttttgtttggtttgttttgttttgttttttttggtttagttttgtatttgtattgtttggattaggttttggttggttagttggttttgttgtagttgtagtagaatgttattaggttgtggttggttgttttatttgttttaagttgttattgtggttgttgattgttttttttggttggttttagatttagttgttattggtgttgttgttatgtttttttgttggataaataggaagtaagtggttttggggttgtggagatttttatggggtggtggaggggttgttgtagtgtttttagtgggttgttggtggaggtgtaagttgtgtggtagggattgtgtgtggtgtggaggttattgggaattgtagttttgtgtggtagtggggtaggtgggaaaagagatgtggttttttttgtattgttggtttttttggtttttgggtttagtattttggtgaaattttttaaggtttatatttttttattttttttgttgatttgggtaggatgtaggtagttggttaagaaatgattttgggttttaggttaggagttaggtttttgagtttgttttttgtttgtttttttttatatgtgatttattgtggatattgattaagttattgtgttttgttattgtgtttgtgtttttgttaggttattttatttatagattttgggagtttgattaattgtagtttttggggttttttttgtgtttgatattaaattatgtttaggggaaagggagggtgtttgggatatagtggtgagtagaatggtttgggattttttattatgaaatgtaggttataggggaagatagtagatttatatataaagaaatgtagttttaaattggata

SEQ ID NO: 2589 - DNA, 2282 bp, Artificial Sequence
  chemically treated genomic DNA (Homo sapiens)
tatttagtttgagattgtgtttttttgtgtatggatttgttgtttttttttgtaatttgtattttgtgataaaggattttaggttgttttgtttattattgtattttagatatttttttttttttttagatatggtttggtgttgggtgtagagaaagttttaggaattatgattgattaggtttttagaatttatagatggagtgatttgatgaggatataggtgtagtggtagagtgtgatgatttggttgatgtttgtggtgagttatgtgtagagagaagtaggtaggaagtggatttgagggtttgatttttgatttgaagtttaggattattttttggttagttgtttgtattttgtttaaattggtgagagaaatgggagaatgtggattttgggagattttgttgaaatgttgggtttgggggttagagaaattggtagtgtaggaaaggttatatttttttttttatttattttgttgttgtgtaggattataatttttagtagtttttatgttgtatatggtttttgttatgtggtttgtgtttttgttgatggtttattgggggtgttgtggtgatttttttgttgttttgtagaaatttttgtggttttgaggttgtttgttttttgtttgtttgatgaggagatatggtggtggtgttggtagtggttgggtttggagttggttgagggagatggttggtagttatagtggtggtttggggtggatggggtggttggttgtggtttggtaatattttgttgtagttgtggtagggttagttgattggttggggtttggtttgggtggtgtaggtatgaggttggattaggaggggtggggtggggtggattaggtgggagttggtggggggttggggaagaggtttttttaggttgttgttggatgggttaaagtttttttggttggttggaaggtttttttgtgagttgtttggatgtttttagttgtagtggggttgtgggaagtagttggtttgatgttttttgttaggggttgagtggggttgggttgttgtggatattgatggtgtgtatgaattttgggtttagtttttggatttttttttttttgtgttatgtttatatgtttgggggattttgttgtgtttgttttagtttttgtgggttttgagtttattttgtgtattgggtgtgggggagggggttattattgtagtttttaaatggtttttgagtattttataaatgttatttttttaggtttttttttgatatttttttttttttttttttaaagtaggtttttattgttattttgttatagttgtgaatttgttttgtttatattatttttttagtttataattttgtatttttttgttgtttgttttttttttgtttgttttttatattaggttgagttttagtgggtgtagagattatatttggtttgttagtgtagagtgttatggttaagagggattttggagttaggtttgggtttaaagttttgttttttttttttgtttgggtaggtgatttttttgtgttttagtttttttatttgtaagatgaagatgagaattagtaatttattttttaagattgttgtggagattaaagggggtaattgtgtaaagtattagtgtatttttggtgtatattaagggttgaaggtagttaatattaagtatttgatttataataggtgtttaatatatgattattgttatttttgagtgagtgaaggatattgttttagggtaaattaggttgaataggatttagtttattattttttttatttttttttattttgaattttgttaatatttgtaaaatattagttttatttaaagatagtttttttataaaaagtttgaaggatatttaagaaattgataaagtggttggtgggagtgaggtgggaattgggttaaagggggagaaaatgggagtgagattttttatagtgtaattttatttaaatttaatttgaatattatttttttaaatgatgaaaaggatagaataaaataaaggttagggggtttgtgtgtatggaggattgtggatgaaaggagtagttgtgagtgagaaatgtttttttggttattatataattatagatgagtagttttttttttttttgtgtttttaagatttgatttaagattttgtaattttagtattttgggaggttgaggtaggtagattgtttgaatttaggaatttgagattagtttaggtaatatggtaaaattttgtgtttttaaaaatttagttgg

SEQ ID NO: 2590 - DNA, 2452 bp, Artificial Sequence
  chemically treated genomic DNA (Homo sapiens)
aaaaatataaaaaaattagttggttgtggtggtgggtgtttgtaattttagttatttgggaggttgaggtggagaattgtttgaatttgggaggtgaaggttgtagtgagttgagattgtgattatattattgtattttagtttgggtgatagagggagattttattttaaaaaaaaaaaaaaaaaaagagtttttagatattgttggtgttttagggattatattttagaattatttttgttttttgataggaagagatgaatagagggaaaagaagtggtgattgattttatttggattattgtaatgttttattgtggttttaggttttttttttattttggttattgagtttttattaggagtaaattaatttttttaaagtttagttttaattatgtttttgtttaaagttttttggattttttgatattatttattattgttgtttattagaaatgtttgtagtgatgaaatgttttatatttgtattgtttagtatggtaattattaattatatgtggttatgagttttatattttgttttattaaatttaaatttaaataattatatttggttagttgttagatagtgtagtgtatttggtttgttatttaaggttttgtttggtattagtttttttttatttttttagggatagttttaatttttagtattttaggttttaggttatatgtagtgttttttgattttattttgtaatttttagtattatggtttgtgttatgttttttttttagtttatattgtttttttgttttgtttttaatgtttaatttatatatgattttttttttgaaattttttttgatatttgttgttttttaattttttttttttttgaattttttaatattttgttttttttttataatttttagtgttttttgttttatattgtagttggttggtgtgggtatttttttttattaaattgtgagtttttggaggatgtgattgttttttgtagagagtttttgttttttattgtaggtttttttaggtatatagaggagtttgataaattttataaatttttgtattggtatattggggatatagagattggtattataatttttttgtttttaagttgtttataggtttttatgagagtttgatttatgtttagagaattattgaagttaatggttattttaggtagggagataaaagttatagagggtttagttggtgaggggagtttggtaggagttgtttaagtagaaggttgtgtttatatatatagatgatttttttgtttagtttggtttagtgtggggagatgggaatatttaggtgttattgtttggttgttttgtgaagttgtggattaattagtgatgtagtggttggtttagttgtttggtttttgtagatggatggatgaagagaggattgaaaagatagtagagtagtgttagtttttggaagtgaagtgttggttgggtggagtgggtatttgggttgggaatgtgagtgtaaggaaatgtttgtgatttgatagtagatagtaggtgaaattttgttgggtttggtttggggggttatgaggtttttataatagtttttgttttaaatggaaaaattgttgaaaagaaaaaaaaaaaaaggaggttaggtgtagtgggttatgtttgttattttagtattgtgggaggttaaggtgagtagaatatttgagtttaggagtttgagattagtttaggtaatatggtaaaattttatttttataaaaaatataaaaattagtagtgtatggtggtgtatatttgtagttttagttatttagggggttgaggtaggaggattattttagtttggggaagttgaggttgtagtgaattatgattatattattgtattttagtatgggtgatagagtgagattttgttttaaaataataataatagtaataataaaatagaggaaaaaaagatagaaatagttttttggttttagattttaattttaagagtattttatattttgaaaatttttagtatatatttatttttgggataaaaatattaaaaaaaggaaattttattgatgttataatataaatatagaaaagtgtatagattataagtttatatatatttgtgtaattattttttagatatgaatagaatatgttagtatttttagaataaatttgtgtgaagtttaatgtgtgtaggattaatgatagaataaatataggttttggagttaggtatgtttggggttgaattttgggtttttgtatttattagtagtgtgattttggatgagtgatttaattttagtttttttttttgtaaaattaaggtggatttataatgtttgttttatagggaagtaggagatttaaaattgaaaatataggtaagttgttaggtatagtgttagtatataagtggggatttagatgttttttgtaatg

SEQ ID NO: 2591 - DNA, 2452 bp, Artificial Sequence
  chemically treated genomic DNA (Homo sapiens)
tattgtagagagtatttgagtttttatttatgtgttggtattgtgtttagtaatttgtttatatttttaattttaaattttttatttttttgtaaggtagatattatagatttattttgattttataggggaggaaattgaagttaaattatttatttaaggttatattgttagtaggtgtaggggtttaggatttaattttaggtatgtttgattttaaggtttgtgtttgttttattattaattttatatatattgggttttatataggtttattttggagatattgatatattttgtttatgtttggggggtagttatataagtatgtgtaaatttatgatttgtgtatttttttgtgtttatgttataatattaataaagttttttttttttaatgtttttgttttagagatgaatatatgttagagatttttaggatgtaaaatatttttaggattagagtttaaagttagaaagttgtttttattttttttttttttgttttgttgttgttgttattattgttttgagatagggttttattttgttgtttatgttggagtgtagtggtgtgattatggtttattgtagttttaatttttttgggttgaggtaatttttttattttagttttttaagtagttgggattataggtgtatattattatgtattgttaatttttatattttttgtagagatagggttttgttatgttgtttaggttggttttaaatttttgagtttaagtgttttatttattttggttttttatagtgttgggataataggtatgatttattgtatttgattttttttttttttttttttttttaatagtttttttatttaaaatagggattgttatgaagattttataattttttaagttagatttagtagaattttatttgttgtttgttgttagattataaatatttttttgtatttatatttttagtttaggtgtttattttatttagttagtattttatttttagaagttggtattgttttgttgtttttttagttttttttttatttatttatttgtagggattagatggttagattagttgttgtattattggttaatttgtaattttataaggtagttaggtagtgatgtttgaatgtttttatttttttatattaggttaggttgggtagagaagttgtttgtgtatgtaaatatagttttttgtttaggtagtttttgttggattttttttgttaattgggttttttgtggtttttatttttttgtttaaaataattattggttttagtggttttttgggtatgaattagatttttgtagaagtttgtgagtagtttgaggatagggaagttatggtattgatttttgtatttttagtgtgttagtataaaggtttgtgggatttgttgaatttttttgtgtatttggagggatttatagtaggaagtaagagttttttatagaaaatagttatattttttaaaagtttatagtttagtaagagaaagtatttatattagttaattgtaatgtaaaatagaaagtattaaaggttgtaagaagaggatagagtgttggggagtttagaggagaaaaagattagagagtagtaggtgttaaaggaggttttgaggaagaggttatatgtgggttgggtattaaaggtagggtagaaggataatgtagattgaggagagagtataatataagttatagtgttgggaattataaggtagaattaggaaatgttgtatatgatttggagtttgggatattgagggttgaggttatttttgaggagatagaaaggagttggtgttaagtagagttttgaatgataaattaagtgtattgtattgtttagtaattggttaaatgtgattatttaaatttaaatttaatggaataaaatgtaaaatttatagttatatgtggttagtggttattatattggatggtgtagatgtagaatattttattattatagatatttttagtggatagtaatggtggatagtgttagaggatttagagagttttgagtagaggtataattagagttgggttttaggaaaattaatttgtttttggtgaagatttagtgattggagtgaaggagaagtttggaattatagtgggatattgtaataatttaggtgagattagttattattttttttttttttgtttatttttttttattaggaaatagggatgattttaaagtgtggtttttggaatattagtaatatttgggaattttttttttttttttttttttgagatggagtttttttttgttgtttaggttggagtgtagtggtgtgattgtaattttagtttattgtaatttttattttttaggtttaagtaattttttgttttagttttttaagtagttgggattataggtatttattattataattggttaatttttttgtattttt

SEQ ID NO: 2592 - DNA, 2498 bp, Artificial Sequence
  chemically treated genomic DNA (Homo sapiens)
tgggtttaatttttagttttttgggattgtttttttttttaaatagttatgggtgttttaaatagattttgggttagagtttgatgattttttgggatggataggggtttatggagatgggtgtttaggagttttgaagtaaagttttgtaatttatttttttttattagagtgagtagtaggaattgggaggtaggggtgaggaatttagagttttggttaaggttaatttaggtagtatttattggaagtagtttagagtattaagagggtaggagtaaaagatttttgttttggtttgttatttttttttttttttttattttttatttgttttttttttattattggtttttgaagatttaaagagttgattgaatttttagttgttaatattgaatttggtttttgggaagatatttttttatttaatggatgaggagattgaggtttggtttggggaaaggtgttttttgatttagatagattttgtttttttatattataagtatttatagaatttaggttggagagtagattttggggaaaatggggagatagagatatagttgagtaagatattaatattttaatgagggagaagtttatttggttagaagagttataaggaaaagttaaaatttaagtgttgagggtagatataaattagtagtatgttgtgagttttatagttaggggtattttgggtgttgtgttaggttattatttattgataagagttggtaatattttagttttttttaaaattgtgtttagttagtggtaggagagtttaggaagtttttagttttttagggagaggttaatatgtgtaagttgggttgtttttaaagttgttatggtatttggaagtgtgtagatggagtttggttggtatttagtaggtgtttatgtttattgaaaaagtaaaggtaaagtttgttgtttgggggaagttttagggtttttatatggttatagggaagttttgttttaggtgggtagttgttttttttttattgtgaatatggaaaggtattggttatgaggggttaatggggttgttgtgtgtataaggtttgttttagggagggtaaaagatattgttttgggatttaggaagttgtttttgaattggtttttttatgatattattttttaggttgtgggattgttaggttgggtggaagtggattttagttaaggggatgtttttagatgttatgtttttaaattggatttgtttagaaaggtaggtagagataggtttgtgtttgggaaagttttgggtaatgatttaggatggtatttaggttttttttgggtaggggatggttataggtttttttggtggtggtgtttattaattttgttttaagaaggagagtttgggtgtggaggttttgggtagttgaaggtagagatttattttttttttggttatttatttttattttagtaatgttttttagaatgttttaaagtttttttaagtttttgtttttaggttagggttttgtagttagttttaaggttttttttaggagtgtgttttttaaataaagttgagagggggtggggggaatgagggagttttagatttattttagagtggtttttagagggtttgggtttttttttttggattgtttagtgggaaggagggttggttggtgttttaggtttgtgggattgtgatagttggtgatttttgtgatttttttttttatttgggtgtttttattttgagatagttgttttttgagtgtagtttttttagtttttgtattaagttgttgggtttgtagtttagtatttttttggtgaggttggagaaggtaagtgaggtgttgagtggtaagtggttgttgtttattgatgatgtggttattgatggtttgtttggggaggtgggtggttgtgggggttgttgtgtggagggtgtgggttgggttggttgttttgtatggatttttgttgggtttttggttgtggatttggtgttgttgtttagtgttagttttaggtttagtaggtgtgttttttttgatgtgtagtttgatatttttgagttgttatttgtgaggttggggggtggtggtggtggttgtggttttgtatttgagtgtggatggtttttggtatggattttggtgtggattttggttatttgtatatttgtattgtgtgttttgggagttattgtgtgtttttttttgtttggttgtgaggagaatgtggtgttgtaggtgattgttgagtttgggtttgggttgtggtggtttttagttagtgattagttggttatgtttttgggttgggttggtgatggtgtgtggtggtttttttttttttttggggtaggtgtgggtgtaggtgtgggttggggattgtagttttggattgggggtttggttgttggtgtttttattgtggttttttttggttttagtgagttgtgtgtatggtttaggtttgtttggttttgatgtttttgg

SEQ ID NO: 2593 - DNA, 2498 bp, Artificial Sequence
  chemically treated genomic DNA (Homo sapiens)
ttagggatgttgaggttgggtgggtttgggttatgtgtgtagtttgttgaggttgagggaggttgtgatggaggtgttggtggttgagtttttggtttggggttgtggtttttagtttgtgtttgtatttgtgtttgttttggagaggaaaaagagttattgtgtgttgttgttggtttggtttaaagatgtggttggttggttgttggttaagggttgttgtggtttaggtttgggtttagtagttgtttgtagtgttgtgttttttttatggttggataagaaggggtgtgtagtggtttttggggtgtgtggtgtgggtgtgtgggtggttggggtttgtattggggtttgtgttaagggttgtttgtgtttgggtgtggggttgtgattgttattgttgttttttagttttatggatagtagtttggaggtgttggattgtgtgttggaggaggtgtgtttgttgggtttggagttggtgttgagtagtgatgttgagtttgtggttgggggtttggtgggggtttgtatggggtagttggtttagtttgtgttttttgtgtagtagtttttgtggttgtttgtttttttggatgagttgttggtggttgtgttgttggtgggtagtagttgtttgttgtttagtgttttgtttgttttttttgattttattgaggagatgttggattgtgggtttagtggtttggtgtgggagttggaggagttgtgtttggagaatgattattttaaggtgggggtgtttgggtagaaagggaggttgtaggggttgttggttgttatagttttgtgggtttgaggtattagttggtttttttttttattgaataatttggagaaaggggtttaagttttttggggattattttgaggtggatttggggtttttttattttttttgtttttttttaattttatttgggaagtgtgtttttgaaaaagattttggaattggttatagggttttaatttgggagtggggatttgagaaagttttggagtgttttgggaggtgttgttgaggtgggggtgggtagttagggaagggatggatttttgtttttagttgtttagaatttttatgtttaggtttttttttttgggatgggattgatagatattgttgttagggaaatttgtggttattttttgtttaggaaaggtttgaatgttattttgagttgttatttagggtttttttgggtgtaggtttgtttttgtttgtttttttgggtgggtttagtttgaaagtatgatatttgggaatatttttttggttggagtttatttttgtttagtttaatggttttatagtttggaggatgatgttgtgggagaattggtttagaggtagttttttaaattttaggatagtgttttttgttttttttggggtagattttgtgtatataatagttttattggttttttgtggttagtgtttttttatgtttgtagtgagaggagggtaattgtttatttggaataggatttttttgtggttatgtggggattttagggttttttttggatagtaggttttgtttttgtttttttagtggatatgagtatttattgggtgttagttgggttttatttgtatgtttttaggtgttatggtagttttagggatagtttagtttgtatgtgttgatttttttttgggaggttggaagttttttgagtttttttgttgttggttgggtatggttttggaggaggttgaaatgttgttgatttttgttagtggatgatggtttggtataatatttagagtgtttttggttgtggagtttatagtatgttgttggtttatgtttgtttttagtatttaggttttaatttttttttgtggtttttttgattaaatgggttttttttttattagagtgttggtgttttgtttaattatgtttttgtttttttattttttttgggatttgttttttagtttgagttttgtaaatgtttgtagtatggaaggataaggtttgtttgaattaagagatatttttttttaagttaggttttagtttttttatttgttaaatgggaggatgtttttttaagggttgggtttggtgttggtaattgggagtttagttggttttttgagtttttagaagttggtggtaaggagagggtaagtggaaggtgaggaggaggagggaggtgatgagttaggataagggttttttgtttttgtttttttggtgttttgagttgtttttagtgagtgttgtttgaattggttttaattgaaattttgagttttttatttttgttttttggtttttgttatttattttggtgaagggggatgggttgtagagttttgttttagggtttttaggtatttatttttatgggtttttgtttattttaggaagttattaggttttgatttaaagtttgtttgaggtatttatgattgtttaaaggggaaaatagttttaggaggttgggggttgagtttg

SEQ ID NO: 2594 - DNA, 2500 bp, Artificial Sequence
  chemically treated genomic DNA (Homo sapiens)
tttttttttattgttatttttattattttggtggggatagaaatagagatatagttttttgtaaagttagatttgaggttggttgagatgtaggttgggtattttgtatattttgttggtgtgttaggttgtgtttttataagtttagattaaaaatggggatattaggagttgttatttgttttagaggtataatggtagtaagagatatttttgaaatagtattttgttttttttttgggagaatgaggagtttgttttttttatttttatgggaatttattatagtttttattatttttgtatttaggtatttttatttttttaaaaggttttgtatttttgattttttaggttttttatagtgggagttttagaatagagtaatttagtttttatgtaagttgtggatttttatttgttttaaaggaaagaaatatttttgtatgttttatatattaggtgttatagtatatttataggttttaggggttaggatgtggatatttttggtggggttatgattttggttattatatagttttattttttggttggtatgtaggattttttgagttttttaaatagtatggtgagtatggtatgattgtaaggagggtttttttttggtgtttttttggtggtttgtagagattataaagagggaaaagattttgttaatgttgttggatgtggttgaaaatgttttttttgttgagtttgagaagtgatagtatgttttgttggttggtgtggttttaggattttattttgtaaatttgattatagatatttggagttttaaagagttagaaaaatttgtaaggttgaatgtagaagtttgaatgtttttattttgagtttttattgattataattatttttgaatagtaattattgtaggaatgaaagaaaatttggggttgattaaatgaagtagtgtaagattttgagtaggggtagatttggttagtagtgtaaaaaaaataaggttttgtgagagtttatattttttttttattttgttgtagtttataggtagttttgtttaatttttaatgtatgtttttatggtttttaggtaaattataggagatggtattggtttttttaggagtgatttagtaatgtttaggttttaaggtagatttgtttatgttgttaggttgggttagtttggaggttgttttggtatgagtatgtaggtagatagatgttgatgttgttttaaagaattgtttttttaggtgttgagggtggtttttttgatgtttattttgtgttattgtttatttttataaggtgtttagttgttgtggtgatgatatttatattaataagtgttttatttatttgttggttttagggaatgtttgttagttgtgtatggtagttaattttagggtatttttgagtttgatgtttttgtatttagagaattagtttttaaattttgtattaatatttgggtttgaaagattttttatttatttaggatttattttgaaagggggagttatagttaatgattttgatttttgttttaaaggttttatatgttttgaagtgaagttttttgaaagttattttttgtgtttgagttttggttttgtagaaagggatgttgaaaaagagaagagtaaatagggttttgtaggttagattttatgtttaggtttatgagttgagtttatttttttatttttttagttaaaagtgtagggtggtgatgtttttagattttaaaattttgtagggaatgttttagaattttttgttttatgagaatttatttattttttatagttattttagtttttaattttttattgtttaggttttaattattgatattattttttatttttttttttttttttgatagggttttattttgttgttttaggttagagtattgtggtgtgattatagttttttatagttttgattttttgggtttaagtgatttttttgttttagttttttaagtagttaggattataggtatggattattatgtttagtttatttaaaattattttgtaggattgggtgtagtggtttatgtttataattttagtattttgggaggttaagattagtagattatttgagattaggagattaagattagtttggttaatattgggaaattttatttttattaaatatataaaaattagttggttgtggtggtttatttttgtaattttagttatttgggaggttgaggtaggagaattgtttgaatttaggaggtggtagagttgagattgtgttattgtattttagtttgggtgatagagtgagattttattttaaaataaaaatttttttgtagagatagggtgttattgtgttgtttaggatggtttttaatttgtggttttaatttttgattttaagtgattttgtttttttggttttttaaagtgttaggtaagattataggtatgtttggtttttgattttttttttttttttttattttatagttaat

SEQ ID NO: 2595 - DNA, 2500 bp, Artificial Sequence
  chemically treated genomic DNA (Homo sapiens)
attgattatggaataagagagagaaagaggaattaagggttaggtatgtttgtaattttatttagtattttgagaagttaaggaagtaggattatttgaggttaggagttgaggttatgagttaaagattattttggataatatagtgatattttgtttttataaaagaatttttattttgagatggagttttattttgttgtttaggttggagtgtagtggtgtgattttaattttgttgttttttgggtttaagtgatttttttgttttagttttttaagtagttgggattataggggtgagttattatagttagttaatttttgtatgtttagtagagatggggttttttaatgttggttagattggttttgattttttgattttaggtgatttgttgattttggttttttaaagtgttggggttataggtatgagttattgtatttagttttataaaataattttaaatgaattgggtatggtggtttatgtttgtaattttagttatttgggaggttgaggtaggaggattatttgagtttaggagattaaagttgtggagaattgtgattatattatagtattttagtttagggtgatagagtaagattttgttaaaaaaagaaagaggaatgaaggataatgttaatgattggggtttgagtaatagaaggttagaaattgagataattataaaaaataaatgaatttttataaaatagagagttttggaatattttttgtagagttttggagtttgaaggtattattattttatgtttttggttgaagaaataaaagaatgaatttagtttatgagtttgggtatgaagtttggtttgtaaaattttgtttgttttttttttttttaatatttttttttgtaaaattagagtttaggtatagaggatgatttttaaagaattttattttgggatatataaaatttttgaaataaaggttaaggttattggttatagtttttttttttagggtgggttttgggtgaatgaagaattttttaggtttagatgttggtatagagtttgagaattgattttttaaatgtaaaaatattaggtttagaagtattttgaggttggttgttatatgtagttggtaagtattttttgaaattggtagatgaatagagtatttattgatataaatattattattgtagtagttgggtgttttatgaaaataaataatgatataggatgagtattagaaaagttgtttttagtatttggaggggtggttttttgaagtggtgttagtatttgtttgtttgtgtgtttatgttaaggtagtttttaagttagtttagtttggtaatatggataggtttgttttaggatttgagtattgttaggttatttttgagaggattgatgttattttttgtggtttgtttgggaattataagagtgtatgttggggattgggtagggttatttgtaagttgtagtaaaataagaagagggtgtaagtttttatagggttttattttttttgtattgttggttaaatttgtttttgtttagaattttatattattttatttagttagttttaaatttttttttatttttgtagtggttgttgtttaaaggtaattatgattaatgagggtttaaaataaaggtatttaaatttttgtatttaattttatagatttttttaattttttaggattttaaatgtttgtggttagatttgtggggtaaaattttagaattatgttagttagtaaagtatgttgttattttttagatttagtagaaagaatatttttaattatatttaatagtattgataagattttttttttttttgtggtttttatggattattagaaagatattagaaagaagttttttttgtagttatgttatatttattatattgtttagagagtttaggagattttgtatgttagttaaagggtggggttgtgtggtagttagaattgtggttttattagagatgtttatattttaatttttgagatttatgaatgtgttatggtatttggtgtatggagtatataaggatgttttttttttttaaaataaataagagtttataatttatataaaagttgagttgttttgttttggggtttttattgtggaaagtttgagagattagggatgtaaagttttttggaaaggtgagggtgtttgagtgtaaggataatgggggttgtgatggatttttatggaagtgagagaggtaagttttttatttttttaggagaaaagtagggtgttattttagagatgttttttgttgttattgtgtttttagggtaaatagtaatttttaatatttttatttttagtttgggtttgtgaaaatatagtttaatatattagtaaaatatgtaaaatatttaatttgtattttagttagttttaggtttgattttgtaaggggttgtgtttttgtttttgtttttattagaatggtaggggtaatagtaaaaaagaa

SEQ ID NO: 2596 - DNA, 2477 bp, Artificial Sequence
  chemically treated genomic DNA (Homo sapiens)
atggagttttttttttagtttttatttgaggattgataaagagaagttaggagagaaggaagttgatttagaagttgttgagaaggagggtatttgagaatagagaggttttgggagttagatttaggtaagagtttatggatttataaagggatatatatatatataatggaatgttgtttagtaagaaatgaataagttgtagatatagatatatataataatatgagtaaattttaaaaaaatttatgtaaaagaaaaataaaagaatgtatgatgattttatttatgtgaaaagtttaagaataagaaaaattgttttatggtgataaaagttagaagtatagtgatttgaggggtaggtattgattgggatagagtttgagggaagtttttgggatgttagaatgttttttatatattgatttgggtaattaaataatagaaattaaaatagtgttattataagggagatgattgtttgaaagaaggtataagaaaaatttgggaggttataattatttttgtattttaattggggttatgtaaaatttattaaattgtgaattttaaatagaagtatttttatgtatataagtgatattttaaaagttaaaaaaaataaaaatatggatatgtgatttattggatgaagagaatgttattaattatttgaaagggaattttagaaaattgggagaaaatgagtttttatttttatattatttttttttattagtattattagatgtttgaatttttaatagttttttaaataagaggttgtttaggtatatattagttttttatttatgaggttttttatttttaatataattaatgtttttttaatagattttatattattatttgtgtaaagttaggagtaagtgtttaatatttgatagtattttttgtttataaagtttgtaattaaattaaggaggaggaagttttgtttttatggagttgagggttgagttgggagatgatattagtgttttttagttaggtattaaagtgttgtgaggataaggatgttaggagttatttatgagatttgggtagtagtggttttgagtttttaaggtttttttttaatatgtagatggtgaagtgatttttttttgtaattttgttatatttttaggtattaatttttagaataattttgttttttttttttttgttgtgagtatttgtaatagtttgattttttagaaatttttatagagagtaaaagtgttttaaatagttggagatggagttgtgtgtatgtattgtttgttttagatagaaattaaatgttttgagaaaaattaaatgttattaagatgtgaagtgagttttgatatgattaaggtgagtgtaatttagtttttaatattttatattatatgttttattttatttgattatttttttaattgtattttttatttattgattttttaggtttgtgggaatgtttttatttatttaattttagttattaatataaatatatttatatatagatagaaatatggttgtgttatttttatttttagatttttgtttgtgttattttttttaattagaatggttttttttttatttgttttttttgttttgttttgttttgttttgagatagagttttattttgttatttaggttggagtgtagtggtgtaattttggtttattgaaatttttaatttttgggtttaagtgatttttttgttttagttttttaagtagttgggattataggtatttgttattatgtttagttaatttttgtatttttagtagagatgtggtttttttatgtttgttaggtaggttttaaattttttattttaggtgatttattttttttagttttttaaagggttgggattataggtttgagttattatgtttagtttttaattatttttaattaaattatgtttatttttttttttaaaattgttttatgatgatttatttttgtgtagtatagggttaggtatagagtagatgtttaatgttgattaaattttttatgatttatgtgtaatattgtttttatataataatggattgaggattaaaaaggattattttggggttagggtttaagttttttttgattttggtttattattagttagatgtgtgattttatttaatttttatggtttttaaatttattttattttgataatgaaagatttaagttataaaagtttttaaattttttttattaagggttatagggattttatgtgtattgaatgattattttaatagtgagtaattggtagtagtttagtttttttatttttttttggtttgggtttatagtttttggatataatttaagtagatatagtattaaattttttagtaggtgttaattagaattagtttttgttggttgggaatggtgatttatttttgtaattttagtatattgggaggttaaggtaggaggattatttgaggttag

SEQ ID NO: 2597 - DNA, 2477 bp, Artificial Sequence
  chemically treated genomic DNA (Homo sapiens)
ttgattttaagtgatttttttgttttggttttttaatgtgttgggattataggaatgagttattgtttttagttaataaagattaattttgattggtatttattggaggatttgatgttatatttatttaggttgtgtttaaggattgtgagtttaagttagggaagaatgagaaggttgggttattgttgattgtttattgttagggtagttatttagtatatatagaatttttgtggtttttggtagagaaaatttagggatttttatgatttgaattttttattgttaaggtaaaataaatttgaggattatgaagattgagtagagttatatatttggttagtggtaagttaaggttaaggaaagtttgaattttggttttaaggtagttttttttgatttttagtttattattgtatgaaaatagtgttgtgtataaattgtagaaagtttaattagtattgaatatttattttgtgtttagttttgtgttatatgaaagtaagttgttatgaagtagttttgaaaagaaaaataggtatggtttagttaaaagtaattgaaggttgggtatggtggtttaagtttgtaattttagttttttgggaggttgaggagggtggattatttgagataaggagtttgagatttgtttggtaaatatggagaaattatgtttttattaaaagtataaaaattagttggatgtggtgataggtgtttgtaattttagttatttgggagattgaggtaggaaaattgtttgaatttaagagttggaggttttagtgagttgagattgtattattgtattttagtttgggtgatagggtgagattttgttttaaaataaaataaaataaaataaaaaaaataagtaaaaggaaagttattttagttgggaaaaatggtatagataaaagtttggaaatgagaatggtataattgtgtttttgtttgtgtatgaatgtgtttgtgttggtggttagggttgggtgggtggaggtatttttatagatttggagggttagtgaatagaaaatgtagttaaaagggtgattaggtggggtgagatgtgtggtgtaaagtgttggaggttaggttatatttattttaattatattaaggtttattttatgttttagtaatgtttggttttttttaaaatgtttgatttttatttagagtagatagtatatgtgtatagttttatttttagttatttgaaatatttttattttttgtaggaatttttagggagttaaattgttataagtgtttatagtagggaaaagaaagatagaattgttttggagattgatgtttgaggatgtggtagaattataggaaggggttattttattatttatatgttgaaggagagttttggaagtttagggttgttgttgtttaggttttatggatggtttttggtatttttgtttttgtagtgttttgatgtttggttggaaggtattgatgttattttttagtttagtttttagttttatgaaggtaagatttttttttttttaatttagttgtaaattttgtgagtagagggtgttgttagatgttaaatatttatttttggttttgtatagatgatggtgtggagtttgttaagagggtattggttgtgttagaagtgaaaagttttatggataagaaattggtgtgtgtttgaataattttttgtttgaaaaattgttaggaatttaagtatttgatggtgttgataagagggaatggtataggagtaaaggtttatttttttttaattttttgaggtttttttttaggtaattagtggtattttttttatttagtgagttatatatttatatttttgttttttttaatttttaaggtattatttatatgtataaaaatatttttgtttaaagtttatagtttaatgagttttatataattttagttaagatatagaaatggttataattttttaaattttttttatgtttttttttaggtagttattttttttatagtaatattattttgatttttgttatttaattatttaaattaatatatagagaatattttaatattttagaaattttttttaggttttgttttggttagtatttgttttttaggttattatgtttttggtttttattattatagagtagttttttttgtttttgaattttttatataagtggggttattatgtatttttttattttttttttgtatgaatttttttgagatttatttatgttgttgtgtgtgtttgtgtttgtagtttgtttattttttgttgagtagtgttttattgtgtatatgtgtatttttttatggatttataagtttttatttaggtttggtttttagggtttttttatttttgaatgtttttttttttaatagtttttgagttagttttttttttttttgatttttttttgttaatttttgagtgaaggttggaaggggagttttat

SEQ ID NO: 2598 - DNA, 2439 bp, Artificial Sequence
  chemically treated genomic DNA (Homo sapiens)
ttttaaatagagatatgtttggtagagttaagaaggaatgtttatttttgtttggggaagttgtagaagtttttatagagaggatgatatttaatatgagttttgaaggatgattgtgagaagaaggtgaaggggtaggtatagaataaagaaaattatagaggtaaaagtattaaatgatgaaagattgtgttgttttatgtttagaggtttggtaagttttttgttgtaagttttttgttgtaaagttgattagaatttaggtttttttttattgaaagtttgatgtttgggggtttaatagttgaaatatttgttttagggtttagaatttaaatgtggtggtaaagtattatttttgaaaagaaggaaaaatgtattgatttttaaaatttaaggtgaaaagggaatgtagatgtttatattttaatatattataaaagatttttggatatttattttttggtttatattttttttgtttttgtattgtagatatattttagtatatataggttgtatagaagataaagtattagttttaggatgaataaatgggaatattgatattttgagaggtttttttagtatggaaatataatgatgtaattttatgtggaaataaaggtgttttatttttatttttatttattttaatatgttggtatatgtttgtttttaagtaattttttttttagatatggggtttaattatttgttttgtagatgatgtgtatattttgatatttgtatggaaataaggtaatttagttttagaaagttaggagggtggttaagattatagtgggaggatggagtaaatttttgggtttatgtttttttagatgaggggggtttatttttttttgaaatatgggtttatttatataagtaaatagattagaatatattataggaaggaatttttatggtatgtgttgttttttgttttgttttgtgaagataaaaggaggaagaaataaaagatttagagagtagagttggtatgaattatgaagttgttttatattaattatttttattgtttttattttttgttgttttttttgatataggttttgggttttttgttgggaaaaggtaggttgaattggagttggttggggagtttattagtattttgttagagttgagggttgtttgttttttaggaggtattttgaattttttttttagttatttttttgtaattaatatgttgtttttgtagttgttttatttattgtttttgtagttattggaggttataggtttttaagaagaattgttggggtttattaatatatatatttttattttataggaagtagtattttatggtttgtatattggttttttgggtttataatatagtagggtttagatttggggagaagtaggtatgagggatgtattgggagtagggaggaaggttttggttaggtgttttggtaatgtgggtaggaaaaggttttggtggtaatgggtgttgtatgaggaggttttatggttagtttaggtaaaggtttaggagttttaattgggaagtagattttgaagttatgttttttaatttagatttaggggttttgaaatgttgtgtttgagatgttttttttttattgatttttgtaatgtttgagttagtttgtagttgttatgtatatggttattagggattaggagaatttgagttttatatgtggtttggttggttttatttttttgggaggttattattatagttgagttataagattttgggattgggatttttatagatttttgggatagtaggttttggggagtgatattgattttaattttgtaggtgtagttttttagaagttagtttttttttgtaaaataaaggtatataaaggattatttttagtttttttaattattagtaggaatttaagagagagtttttttagttttgagagtttttaatagtattattttttttatttaaatttaataaagtaatgttgttttttaaggtttattgattataatttaatggagagttgaggttgttagatattaagatttagtattatagaagggtagagtatggtaggattttaggggaaaagaattagtataattttatataaaatggagtaataatatatttattttagaaaatttgttatgagaattatttagattatttttttaaagtattgtattatttagtttttttttagtgataaataattttgaattttgatgtatgtagatatttgttttttgtttttagttagttttaggttgtgtttgaatttattttttatgttttttattttaggaattagtttgaaggagttgttgttgttaggggtaggtttttttagtgatggatggtagtaggtaatagagtaagtagggatatatgatattttttgaaattttttttgggaattggtatattat

SEQ ID NO: 2599 - DNA, 2439 bp, Artificial Sequence
  chemically treated genomic DNA (Homo sapiens)
atggtgtgttagtttttaggagagattttaggaggtattatgtgtttttgtttgttttgttgtttgttgttatttgttattggaagaatttgtttttggtagtaatagtttttttagattagtttttggaatgagaggtatagggaatagatttaaatatagtttggagttaattgagaataagaaataagtatttgtgtatattaagatttggggttgtttgttattaagaaaaagttaagtaatatagtgttttaaagagatgatttaggtaatttttatagtagattttttgaggtaggtgtattattattttattttgtatgaggttgtgttaattttttttttttgggattttgttatgttttgtttttttataatgttaagttttggtatttggtagttttagttttttattaggttgtggttagtgggttttgaagaatagtattgttttattggatttggataagaaggatgatgttattggagatttttagggttagagggatttttttttgggtttttgttggtgattggaagggttaagagtggttttttatatgtttttattttatagagaggaattggtttttggaaggttatatttgtagggttggagttaatgttattttttagaatttattgttttagaggtttatgaggattttagttttaggattttgtggtttagttgtagtgatgattttttagagggatggggttaattaggttatatgtagaatttaaatttttttggtttttagtggttatatgtatgatagttataagttggtttaggtattataggaattagtaagggaaaagtattttagatatagtgttttagggtttttaggtttgaattgggagatatggttttagggtttgttttttagttgagatttttgggtttttgtttgagttgattataggatttttttatgtaatatttattgttattaaggtttttttttgtttatattgttagagtatttggttaaggtttttttttttatttttagtatattttttgtgtttgtttttttttagatttggattttgttgtgttatgagtttagaggattaatgtgtaaattatggaatgttgttttttgtgaagtgaagatgtgtatgttgataaattttaatagttttttttagaagtttgtagtttttgatggttgtaagggtagtggatggagtaattgtaaaagtagtatattgattgtaaggaagtaattgaagggagagtttaaaatgttttttggaaggtaggtagtttttggttttggtgaggtgttaatgagttttttagttagttttagtttgatttgtttttttttagtaaaagatttagggtttatgttgagaagggtagtaggaagtgggggtgatggagatgattaatgtagagtagttttatggtttatattagttttgttttttaagttttttgtttttttttttttttatttttataaggtaaagtaaagagtagtgtatgttgtgggaatttttttttgtaatgtgttttgatttgtttgtttgtataaatgagtttgtgttttagaagagagtgaattttttttgtttaaagggatataaatttaaggatttgttttatttttttgttgtgattttggttatttttttggttttttaagattgagttattttgtttttatgtagatgttagaatgtatatgttatttgtagggtaggtggttaaattttatgtttagagagggagttgtttgaaagtaagtatgtgttagtgtattgaagtaagtgagggtggaagtaaagtatttttatttttatatgaggttgtattattgtgtttttatgttgagaaggttttttgagatattagtgtttttatttatttattttaaaattggtattttgttttttatataatttgtgtatgttaaagtatgtttgtaatataaaaataaggaagatgtaggttaggagataagtatttagggattttttgtagtgtattaaaatatgaatatttgtattttttttttattttgaattttaaaaattagtatatttttttttttttttagagataatattttattattatgtttaagttttgggttttgaggtaaatattttagttgttgagtttttaagtattggatttttaatgaaaggaaatttgagttttaattaattttgtagtaagaaatttgtaataagaaatttgttaaatttttaagtatgaaatagtatgattttttattatttgatgtttttatttttgtggttttttttgttttatgtttgtttttttattttttttttgtagttattttttaaagtttatgttagatgttattttttttgtgaagatttttatagtttttttaagtagaaatgaatatttttttttggttttgttaaatatatttttatttaaaa

SEQ ID NO: 2600 - DNA, 2500 bp, Artificial Sequence
  chemically treated genomic DNA (Homo sapiens)
atttttttttaaaatttattttggaagaagagatgttttaggaaatataaatagattattgttttgtaattttaggaaaattaaagagaatttaagttttatgaaataagtaattaaagggtgagaaaatatgatagttgtttaagattgggagtgtattagttttttgataatatttttaggtttttttagggttgttttttgggtaattttttaggtattgtttttttattaatattagatttgttgtagtttttgaatatgtgatggtatagtatgtaaaaatgtatatattattagggttggaggatttttatttagttattgttaatgataggataataaaaattaagtttatgtatttattaagtggtaaagttatagtttagattttaatttgattttatatgtataaagaggaaagaagagggatgaagataggatgttgggagggaaaaaggaggagaaaaaagggagagaaaatggaagatggaagtaatagttggggtgtagtaaaaaggggtattggattagttagaaaatttattatgaattaaatttgagtatatgtttttaatttttggggttatatgtttaataaatagaattgttgggttatatagttatttgatgtttaaattttgagaaattgttaattgttttttatattagttgtattatttggtatttttattggtaatgtataaggttttaattttttagttttagtatttattatgttgtatgattttgaaaaagttattttatttatttgaattttattttttttttttttaaagagtaggggttagaattagttattttgtttttgtttatttatatattttttttttttatttaaattttgattttttattgtttatatttgtttttaagagttttttgatagtgtgaagtattgtaatgagtaagttttagttttgttttttagagttagaattattttaatttatatttttaagttatattaatgtatttttatttttatttatattttttagtgtatatttttttttttttgtttatttttttaatttttttgtaagtattattttgttttgtttgttggttgttagtttttttttttgagtttttgtggagttgttagatttttgattatttttttatttttagtttataattgtttttttttggagtttagtgattgttaagtggtttttgtgaaattttattaggataatttttttgtttgtgtttttttttagttgggttgtttttagaaattttagttgtttttttatttataattggtaaattataggttggtttttgagttatttaatattgtatttatttataaatatgtttagatgagttttgaatttgttgaattttgtagtttataagtaagagttaaatttattggagatttaatttatatgtttttttttgtagaaggtgttttttgtttatgtgggatttttattttttttataattttaggaatgatatttgttttttttttattttttttgtttttgtttatgtttattatttattttttttattagattgtgagatttatgagagtaaggagttggagtattttgtttaaagttgtatttttagtgtttggtatattataggtttttagtatatgtttgttgaatttatgaatatgtgttttttttttatagagttaattatggatttgtttatttgtttatttattagatttaaagttattttggggtagattgagatttatttgttatggtaatatttgttaaaaataaaattattttgatatttgttaaaatggtaaggaagatattatttaagattattgtaatggaggagagaaattaggtaaatataataaagatagttggggatttagagttaaggaatagagtgagtggatgaaaaattattaagaggagataagggtagggagatttttgttaaaataatttattagggtttttattgaaggtaggttaggatgattagatagtgttattatttgaatgtttgtggaggttaaaatttgtatgttgaaatgttaattgttaaggtgatggtattaagtgatgaggattttggggagatgaattaggttatgaaggaatgggattagtgtttttataaaagggattttagagagttgttttgttttttttattatatgaggatataattagaaggtgttattttttaatgaagagagattttatgagatatggaattttttagtattttgatttttaattttttagtttttataattgtgagtaataaatttttgttgttaagaattagtttatggtatttttttatagaagtttaattggattgatagatgttaaggggttgggggatttttagtaggttaatttagtagagtttttgttaaaattgggttagataggttatagataagatagttaaaattaaagtttagttgagaagggaatttagaggagtatgattaaaatttggttaaggggagagtttt

SEQ ID NO: 2601 - DNA, 2500 bp, Artificial Sequence
  chemically treated genomic DNA (Homo sapiens)
aagattttttttttgattaaattttagttatgtttttttgaattttttttttaattaggttttgattttggttattttgtttgtggtttgtttagtttagttttagtaagaattttgttaggttagtttattgaggattttttaattttttgatatttgttagtttagttgggtttttataaaaaagtattataaattaatttttagtaatagaaatttattgtttatagttgtagaggttgggaagttgaagattaaggtgttagaagattttatattttgtgagatttttttttattaaaaaatgatattttttagttgtgtttttatgtgatggaagaggtaaggtagttttttggggttttttttataaggatattaattttatttttttatgatttaatttatttttttaaagtttttattgtttaatattattattttggtggttagtgttttaatatatgagttttggtttttataaatatttggatgatagtattatttgattattttggtttgtttttggtaagaattttggtaagttgttttagtaagaatttttttatttttgtttttttttggtaattttttatttatttattttgttttttggttttaaatttttagttgtttttgttatatttgtttaattttttttttttattgtaataattttgaataatgttttttttattattttaataagtgttagagtaattttatttttaataagtgttattatggtaggtaaattttagtttgttttaaagtagttttgggtttaataggtagataggtaggtagatttatgattgattttatggaagaggaatatgtatttatgaatttaataaatatgtattgagggtttgtaatatgttaggtattgaggatatagttttggataagatattttagttttttgtttttatgaattttatagtttgatgagagagatagatgataaatataaatagaaatagaaaaagtaaaaagggggtaggtgttatttttgggattgtagagggaataggggttttgtataaataggagatattttttgtaggagaagatatatgagttgaatttttagtgaatttaatttttgtttgtgggttataagatttgataggtttagagtttatttaagtatgtttgtgaataagtatgatgttggatgatttaggagttagtttatgatttgttgattgtgagtaggaagatagttgaggtttttagaggtagtttagttgagaggagatatagatagggagattattttaataggattttataaagattatttagtagttgttgagttttagggaaaaatagttatgagttgagggtggggaaatagttaagaatttggtaattttgtagaagtttggagagaaaagttgatagttgatagatagaataagatgatgtttgtaaaaaggttaaaagaatagataagagagaaaaaatgtatgttgagagatatggatggaaatggaagtgtattaatataatttggggatatggattaagataattttagttttaaggagtagagttaggatttatttattatagtattttatattgttaggaaatttttggaaatagatgtgggtagtggaaggttaggatttggatggaaagaaagaatgtgtgaataggtagaaataggatagttagttttaatttttattttttagagaaaaagaaagtgaggtttagataaataaaatgatttttttagagttatgtaatatagtgagtgttagagttaagagattagaattttgtatattgttgatgggaatgttaaatggtgtagttaatgtggaaaatagttggtaattttttaaaatttaaatattaagtgattatgtgatttaataattttgtttgttgggtatgtagttttagaaattgaaggtatgtatttagatttgatttatggtaggttttttggttagtttagtgtttttttttattgtattttagttgttgtttttattttttattttttttttttttttttttttttttttttttttttaatattttatttttatttttttttttttttttttatatatgtagggttaggttggggtttaagttatagttttgttatttaataaatatgtgaatttggtttttattgttttgttattgatgatgattagatgagggttttttagttttaatagtatatgtatttttatatattgtgttgttatatgtttaggaattgtagtggatttagtattgatgagaggatagtatttgggaggttgtttagaagataattttgggggaatttgggggtgttgttgagaagttgatatatttttggttttgaataattgttatgtttttttattttttaattgtttgttttgtagagtttaaattttttttaatttttttgggattataaagtagtgatttatttatgttttttggagtatttttttttttagggtgagttttaaaaaaaaat

SEQ ID NO: 2602 - DNA, 2473 bp, Artificial Sequence
  chemically treated genomic DNA (Homo sapiens)
tttaaattaaaggttgatatgtttttgttttatattttatttaatgttggtaatttaatgagggatattaggataaaattgagaatgtgtggtttgtgtttgtgaatttttattatttggttttagttagttttttattttttatatttgttaagataaatttttttaaatttttttttttttggttagaagtgatttttatatttagttttgattatggaaggttgttataggttattttttttgttgggtaagttttttttttttttaagtttatgtttaattgttatattttttttgaggattttttttagtttttttttttatttttattgttatatttaatagagtggagttgttttttttggtattttattgttgatagtttatttttgagttatagtaataatggttatttgattttatttatttgttgatttgtttatttttttattagtttatgattttttttagggtaagatttatttttatttgatttatttttgtattttagattttagttaggtaaataatagggatttagtggagagagagatggataggtgggtaggtgaagatatagatgtatggttgaatatataaattggtaaagttttaaatgaattaataagtggatattttattgagagatttaaatgtagaagggtgttaggatataagaggaatggttgtgagttatgaaaatgggttttatggggtaaattaaaagtttattgaaggtaaatgtattataataagattggtattttttggagtttttgggttgattaattatttttatatgtattatttatttattttttataatgatttggtgaggtaatgagttattattagtttaatgtataaggaagttgaggtttgtggatattagttgaagttttatagttagtgaatggtaggttagggtattagggtttaggtttgtttgttttttttatttattttttgttattataagttttttgatttttagttttttgatttgttttagtgggatttttttgtgtttttgttttagttgtagaggatttattaggtatttagagagaaatgagtggtgttgtgaatatttgattgtgtttatgtggaatttatatatatagtttgtttgaaaatgattgataggatggaaattgataagttattatttgttttgggtattagtgatgattggttaatatgaatattgtgttgatttttgttagatagaagaagatgttatttgttgttaatggggtgttatatgtatatttgtttaaaggaaaatgtttttttggtgattgtttttaatttttattttattttatagttataaaaaagaaaagatttagtagaaaggatgaatttatttaggggtaggatggaaaggtattttttttatttatttttttttttttttattagaataattaaaatttagtgaaaatgttggtgtaagttagaagagggggatttgggttttaagagtagttaggtattttgggttttagattagagttttagaatttagtagttatgtttataaggtagttaaagtttagttagtattattggttttttggttagttatatttgtttttgtttaataatgatgatttgaatgtatatgtataaataataatagataatattattgagtattttattatgaattatggaatgtgttaggtaaagatgttattttatgtaagttataaaattaatttatggggtaggtgtagatttataaattttgatttaagaattttgaatttttaaaagttttgaaaattaaaatatttttttgtaagtttggtatagatttatttggtgttaagatttgagttaaagtgatatatattgattaatagttttttttattttttttttattattaatatttatattttttgttataaaaatattaatatgtttgatttaagggtgttattatagtttttgttgagggatgttattaataaatatggtatatttattatattgtttttttttaaaagttaaataaatttaaatttgagtatatttggttttaaggattgtagataagaaattgagaatttgttaaatttattatatggatgaggaaataggtttagaaaaggtaggaaatttttttgaggttatagagtttaaaagtagtagatgaaggtttatatttaggtagttttgttttagagttggtttggttaattagtgggttttgttatttttgataaatgtttttgttagttggttttagttttatttttttagtgtagtagtttagtttttgtttgtttttgagtaagaagtaagtatgtgtttttttagttgaggtataaggtaatttttagggtatttggattataattataatgttttattaatataaattttaggatatagatttgtgttttaaattaagagttaaatataataataatattagttttaggtaattattagttaa

SEQ ID NO: 2603 - DNA, 2473 bp, Artificial Sequence
  chemically treated genomic DNA (Homo sapiens)
ttgattggtagttatttaagattgatgttattgttgtgtttgatttttgatttgaaatataggtttatattttgagatttatattaataaagtattgtaattatgatttggatattttggggattgttttgtattttgattaagaaggtatatgtttattttttgtttaagaataaatagggattgaattgttgtgttgggaggatggggttgagattagttagtaggggtatttgttaaaggtagtaaagtttattgattaattgggttagttttggagtaaggttgtttagatgtaaatttttatttgttgtttttgagttttgtaattttaggaaagttttttattttttttgagtttgtttttttatttatataatgggtttaataggtttttaattttttgtttgtagtttttggggttaaatgtgtttggatttagatttatttaatttttaaaggaaagtaatatagtaaatgtattatatttattaataatattttttagtagaggttgtggtagtatttttaaattaagtatgttgatatttttgtagtaaaaagtatgaatattaatagtaagaaggagatagaaaaaattattagttaatgtatattattttaatttaaattttagtattaaataagtttgtattaaatttatgaaaaaatgttttggtttttaaagtttttgaggatttagaatttttaaattagggtttgtggatttgtatttgttttataggttgattttatggtttatgtggagtaatgtttttatttagtatattttatagtttatagtaaagtgtttagtaatgttatttgttattatttgtatatgtatgtttaaattattattgttgagtagaggtaagtatagttggttgagagattggtggtattggttggattttggttattttgtgggtataattgttggattttgaggttttgatttgaagtttagagtatttggttgtttttagaatttaggttttttttttttgatttgtattagtatttttattgggttttggttgttttggtaaagaaagaaggaaataaatgagaagaatgtttttttattttatttttaggtggatttattttttttgttgaatttttttttttttatggttataaaatgaggtgaaaattgagaataattattaaaagagtatttttttttaggtaagtgtatgtgtgatattttattaatgataagtgatatttttttttatttagtggaaattaatataatatttatgttaattagttattgttggtgtttgaagtggatgatgatttgttagtttttattttattagttatttttaggtaaattgtgtgtgtggattttatatggatatagttgaatgtttataatattatttatttttttttaagtgtttgatgggttttttataattagagtagagatgtaggagggttttattggggtagattagagggttggagattagaaggtttgtgatgatagaaggtggatggaagaggtaggtagatttaggttttggtgttttggtttgttatttgttggttgtgagattttagttgatgtttataagttttagtttttttgtgtattgagttaatagtaatttattattttattaggttattgtgaggagtaaatgaatgatgtatatgaaagtgattgattagtttggaaattttaggaaatgttagttttgttatgatgtatttgtttttagtggatttttgatttgttttatggagtttatttttataatttgtagttgttttttttatgttttggtatttttttgtatttaagttttttagtgaggtgtttatttattagtttatttggaattttgttagtttgtgtgtttaattgtatatttgtgtttttatttatttatttatttatttttttttttattggatttttgttgtttgtttggttaagatttgggatataaagatgaattagataaggatgaattttgttttaaaggagattataggttaatggagaaatggataggttaatagatgagtggagttaggtggttgttgttgttgtaatttaggagtgggttattgataatgggatgttagaggagataattttgttttgttaagtgtggtagtagaggtggagggaagagttaaaggaagtttttaaaaaggatatgatagttgaatatagatttgaaagggggaagggtttatttagtaaaaggaatagtttgtgatagttttttataattggggttgaatgtggaggttatttttggttaggggagaggggatttgggggaatttgttttggtagatataagggatgggaggttagttggggttaggtggtaggaatttataagtatagattgtgtatttttgattttattttgatgttttttattgggttgttagtattgagtgaagtgtagggtaagaatgtattagtttttggtttgag

SEQ ID NO: 2604 - DNA, 2408 bp, Artificial Sequence
  chemically treated genomic DNA (Homo sapiens)
gttgatttatataggatagggagtgggtttttggttttggttttgtttagtttaggatattttttttagttgagttagtttgggttgggatagatagggttgttttatgtatattttaagatagttttaggttagggtgttgtttagatttgatgatttaggagtgtatttttggatttagttttgttttttaaatattttttatagatttattttgttgttagtattatgtagatattgagaggtataatttttatttttatagattatttattttagtatttataattattatttagttattattttgtggagatatagttgattaggatagagttttaggtttatttttattaaattgtttgttaaaagaaagtgttaaaggttttgggtagttttatagtatattagttattttgtttttattttgtagttttattgagtgggaataatgtatttttaagagtataggaaatatttggatgtttattattttttttttagtttttgggtttaggtttttgtttgtttagagaatagtagttttgagtaaagtttattattttattaattaatttaaatattaaagtgtttagtatttgttaggagagttggggttttttattaagtttaatatattatgttttttttgttgaaagatatttttattttttttagatgttataattgtaggagttgggggtttgtttagaattatagaatgttaggatttaaggagtttttgtttttttgttttatataatttgaatttgagtttggaatagggtagggatttgtttaaggttatatagagtgtttgttatataatttaggatagaaagaggttaggtttttgttttggatattttaggtagttttttatttagttgagattgttattgataaaggagggtgtttgagaaggaatatttgtttttaagataaggttattattattgtaggagaggtttaggaaagttgttttagagttatttttgtattttttttattgggtttttggggagaggtaggtggaatttgatttttatgtatttttttttatttttatagagggagaatgttggatttttggaagggagtggggttaggttataaggaaggtagtggttaggaattatttttttttggggagtggggagaatgttgaatgtttggtatttgtgggggtggaaagttagagaggttaagtgttgtttagagatgattttatgatttgggaattaggagttgttgggttgttggtgttggaatttaagtttttgtatatagtttgtgtttgtggttttggtttggtagagtaggaggaaggttttttatggttgtttaagtgtttatatttaagggtagggtttttgtgtttttatttttattttttgtggtaaattttttaagaatttaagtgataggttttaattaagtatatagtttgtttaggtttttttaatagtttttttttgtagagatggaaataagggtttagaaaagtaaagttatttgtttaaggttatataagtaggaagtagttatattgggttagaatttaggttttattgatttggatatttaattataaatatataaatatatgtatgaatatatatgtatatggggttattagtttgttttaggttttaagggagttttgttaagtaggggggttaatttagttgggagaaagaaagaatggtatattttggttagttgttgattaggttaaagtttttaataggggttgtagttttattaggagatttgttttaggttgagagatttttttttattttttattgtttttaggagttatggaaggttgtttatgtatttagttttttttttagtatgtgaaagtgttaagaggtattttaaaataatttatgggattagtatgtttattggttgttaggaattatttttgttttatattagagaaatgaaggttatgagtgaaagtggggtgtgaagattttgtagttaagttagtagtaaaattaaggttgaaattaagatttatttttagtttagttttttttgtgggtatttgtttatttttaattttttatttttatatttagtttttaaaaaagaaattagtttagtttgaagttattttggggttttgtggtatggtttggatttgattttattttaaagttttgaaaagatggagtttttaaaggttgtatttagatgagtttaggattttttttttatagtaagttaaggggttgggaagaaattttttttagtttttagtggtgataggaggatatagggaattaaatttttttttgagttttggaagttttttttttgttttgttttggttttttttttatttatgatttttgataagagggaaggtaattttaaagtggataagagttatt

SEQ ID NO: 2605 - DNA, 2408 bp, Artificial Sequence
  chemically treated genomic DNA (Homo sapiens)
aatggtttttatttattttggagttgtttttttttttgttagaggttatgggtggagaagggattaaaatagggtagagagggggtttttagagtttaaggagagatttaattttttgtgtttttttattattattgggagttggaagaagtttttttttagttttttgatttgttgtaggagggaaattttgggtttatttaaatgtagtttttgaagattttatttttttagagttttgaaataggattgaatttaggttgtgttgtggagttttggggtgattttagattagattagttttttttttggaaattgagtataaaaatgaagggttaaggatgaataggtgtttataaagagggttgaattgggaataaattttggttttagttttggttttgttgttgatttggttgtaagatttttatgttttatttttgtttatagtttttatttttttaatgtaaaatggaggtaatttttaatagttagtgggtatgttaattttatgggttgttttgaaatattttttagtatttttatatattgaaagagaggttggatgtataaataattttttatggtttttgggggtagtgaggggtgggaaaaggttttttagtttgagataagttttttgatggaattatagtttttgttgaggattttgatttggttaatagttggttaaagtgtattatttttttttttttttggttagattgatttttttatttaatagggtttttttggagtttggggtaggttggtgattttgtgtatatatgtgtttatgtgtgtgtttatgtgtttgtggttaaatgtttaggttagtgaagtttgggttttggtttagtgtggttattttttgtttgtgtggttttggataagtgattttatttttttgagtttttgtttttatttttgtaaaaagggattattaaaaggatttagataggttgtgtgtttggttaaggtttgttatttgggtttttgggggatttgttataggagatggaggtaggagtatagggattttgtttttaggtataggtatttgggtagttatgaggagttttttttttgttttgttaaattaaagttataggtatgggttatgtgtgggggtttgaattttagtattagtagtttggtagtttttgatttttgagttatgaagttatttttgagtagtatttaatttttttggttttttatttttatgggtgttaagtgtttagtattttttttattttttgggagagagtgatttttggttattgttttttttgtggtttgattttgtttttttttgggaatttagtattttttttttgtgggggtggaagagggtgtatgagggttaggttttatttgtttttttttagaagtttagtggggagagtataggagtggttttgaagtagtttttttgggttttttttgtaatgataataattttattttagggatagatgtttttttttagatatttttttttgttaatggtagttttagttgagtgaaggattgtttggggtgtttgaaatagagatttgatttttttttattttgagttatgtagtgaatgttttgtgtgattttgggtaagtttttgttttgttttgggtttagatttaagttgtgtgaaatgggaggataggagttttttgggttttggtattttgtgattttaagtagatttttagtttttgtagttatggtgtttggagaagatgggaatgttttttagtgggaggggtatggtgtattgaatttaatgaaaaattttaatttttttggtaaatattaggtattttagtgtttgaattaattagtagaataatgaattttgtttagagttgttgttttttgggtaaatagaagtttgagtttagaagttggaggaagggtgatgggtatttaaatgttttttgtgtttttgagggtatattgtttttatttggtggagttataggatgggagtagggtaattgatgtattgtagggttgtttgggatttttgatatttttttttggtaagtggtttggtgggagtggatttgagattttgttttgattagttgtgtttttatagggtagtggttgagtgatgattatgggtattggagtggatggtttgtgagggtagggattgtgttttttggtgtttgtatggtgttggtagtagagtagatttgtgggagatgtttggaaggtaagattgaatttaggagtatatttttgagttattaggtttgggtagtgttttgatttgaggttgttttagggtgtgtgtgaggtagttttgtttgttttggtttagattgatttagttgggaaaagtattttggattgggtaagattagaattaggagtttattttttgttttgtgtgaattagt

SEQ ID NO: 2606 - DNA, 2498 bp, Artificial Sequence
  chemically treated genomic DNA (Homo sapiens)
gttgtgtattaaggtagatttataagtgtgagttttgttattttttaattatatgagtttgggagtttattttatttttgaaatttttagtttttttttttgtgattagggttggtagtattttgtagggtgatgaggattaagaggaatgtatttgtgtgtgtaagggatttagtatgtgattaatgaatagtggttgtgattaatttttatttgttttttttttggttagtgggattagtgtttaaaggattagaggtttgggaaaatttgtagaggtagttttgttgttggaaggaagttagtttggggatagggagatggtgttttgtaaattgtaaaggaatataatttataataggttattattttgtttttgagtttagagattttttaataattaattaggtttttttagattgtgaaaaaaagatatagagatagttagagatttgtttaaggttatatagttttgattatttgttttaagtagatagaggtaaagattatttttattttttttgaaggtgtaaatgatagtgattagaaatatttgaaattttatttggggatttgggtttttagggataaaataaataaataaaaatttagaaggtaaaaagaaattatatattaatttatggtttggtgttttggtgtttgaatggttaaattaggtttgggggtgggggtggagtgagggtttaaatgttgtttttaaggttgggttattttgaatataattatttaggagagagttaggtttggtattgtttgtaattagttttttattaagttttagggtagtttatttttatagtaagaattttaggattttagggtgttagttagaaatgggggaagggtttaggagtttttggatgtttttttgttaggagttgatttagtatttttgttattaattttttggatgattgtggataatttttttttttgagttttagttttttaatttgtaaaagataggttttaaagagataagtttttttttgttttagtttagtaattaagttgggtattgttttgattattggtggagatagttaggagggggttggtttttttagggttttagagatagaggtgtattgaagttggagtttgtaatttaggtagtagatttgaaatttttgttggatttgagggttagggaggtttttgggatgtaaataaattttttgtgtttttagagtagagtagagagtttatgttgtagttttattttagttgattagattagttttgggtgttggttttttgtttttttttagttttttttattgatttttaaggaagttattttttagattaggttagtttgttttatagatggttttggtagggtttttttaaggtaaggagtatttttattttgggtagttgggttagttatgtgttatatttgtttttatgtttagaggttagagtgatattgttagtttttgtaggtttggttattgattgttgggttttattaagttattgtttttatatatattagtttttttttgttttttttttttattattttaggtgttatttgattagtagttttttttattgtgttagagaaaattggagtagttgagtttttgggtttggaggatagggggaggggtgagatgtagtttgaaggggtgggggttgttgaataggaaggtttgggttgaaggtgggggttgggggaagtaggaggtaagaataaggttgggaagtgggggagggaggaaggatggttgtagaaaggttaaagttagaaagaattgttgagattagagtgattttttggggagtattgtagttttttgaaaaggataaaaaggtttaaattttaataattgtaatttttagtttatatttttaatatatgtatagatattatttttttaaagttaaattttggttgggttaagaatttttgtttaggtgttaataaagttagaattttataagtttgttaaatagtgatgatgatttttgagtgttataggtgttttatagaggatattggagtttatattaataaagtgatgtattaattgtgtgtgtttttgggtgagtagtagagttaggatgggggttggagttttttgtatttttttttttagttatttagtttttagtagatgggattagagaggttttagtgagatgtaagaatgtgtttaaggttattattgtgttagttaatgataaataagtttaagaagttaggtttatttttttaaggttaaatgagattttaattgttgatatatgtgtttttttttttttttttttagggtattatgtagtgaaaatatatgagaaattggttttttagaatattgtattttttttgtttattaatattttattttttaaagtgttatttgtaattatttagtttttttaagggtagaaattttgtttttttagtataggagggtgattttaggttttggatagtgtttagagtggtttgatatttttggtaa

SEQ ID NO: 2607 - DNA, 2498 bp, Artificial Sequence
  chemically treated genomic DNA (Homo sapiens)
ttgttaagggtattagattattttggatattgtttaggatttggggttatttttttgtgttggaggggtagagtttttatttttaaggaggttgagtgattgtaaatagtattttgaggggtggggtgttggtggatagaaaaggtatagtgttttgaaaagttagttttttgtatgtttttattgtatggtgttttagagagggaggagagagaatatatatgttaatagttggggttttatttaattttagaagaataagtttgattttttgggtttgtttgttattaattaatatagtggtgattttgggtatatttttgtattttattggggtttttttggttttatttgttgaaggttgggtgattgaaaaagagggtatagaaaattttagtttttgttttagttttgttgtttatttagggatatatatagttaatatgttattttgttgatgtgaattttagtgttttttataaaatatttgtggtatttaaaggttattattgttgtttggtaaatttgtaaagttttggttttattagtatttagatgagggtttttaatttggttagagtttggttttggggaggtggtgtttgtgtatatgttgaaaatgtaaattaagagttatagttattggggtttagatttttttattttttttagggggttgtagtattttttaaaaggttattttgattttagtagttttttttggttttgatttttttatagttatttttttttttttttttattttttagttttgtttttgttttttgttttttttaatttttatttttagtttagatttttttatttagtggtttttatttttttaggttgtattttatttttttttttgttttttaggtttgggagtttggttgttttagttttttttggtatagtagaagaggttgttggttaggtgatatttggggtaatggaaaggggaggtagggagaggttggtatgtgtggaaatagtgatttggtgaagtttagtagttagtggttaggtttgtggggattggtggtgttattttagtttttgggtgtgggggtagatgtggtatatggttggtttggttatttagagtggggatattttttgttttggagaagttttgttggagttgtttgtgggatagattgatttggtttggaggatggtttttttgggggttggtgagggaggttgggaagaggtaggaagttagtatttagggttgatttaattagttgagataaggttgtagtgtgggttttttattttgttttgagaatataggaggtttgtttatattttgagagtttttttagtttttggatttagtagggattttggatttgttgtttagattataagttttaattttaatgtatttttgtttttgaggttttgagggagttagtttttttttggttgtttttattggtaattggagtaatgtttagtttggttattgggttgggatagagggaggtttgtttttttgagatttgttttttatagattggaaaattgaggtttagagaagggaattgtttatgattatttagggagttagtaataagggtgttgggttagtttttggtagggagatatttagaggtttttgaattttttttttatttttagttggtattttaggattttggagtttttgttgtgggaatgggttgttttgaggtttggtgaaaagttggttgtaggtagtgttaggtttggtttttttttgagtgattgtgtttagagtaatttgattttgaaggtgatatttgaatttttattttatttttatttttagatttggtttaattatttaggtattagagtattagattatggattggtgtgtagtttttttttattttttagatttttatttatttattttgtttttggggatttaggtttttaagtagaattttaggtgtttttggttattgttatttgtatttttggggaaaataaaaatggtttttatttttgtttgtttaggataggtggttaaagttgtgtgattttgggtaggtttttgattatttttgtattttttttttatagtttgaagggatttgattggttgttgaaaagtttttgggtttagaagtaaaatgataatttattatagattatatttttttatagtttgtaaagtattatttttttgtttttaggttagtttttttttagtaatagaattgtttttgtaagtttttttaggtttttgattttttgagtattgattttattggttaggaggaaggtaggtaggggttaattatagttattatttattgattatgtgttgggttttttgtatatataaatgtattttttttaatttttattattttgtaaggtgttattagttttagttataaaagaggaaattgaggattttagagatgaaataaatttttaagtttatatagttaggaagtggtagaatttatatttgtgaatttgttttgatgtataat

SEQ ID NO: 2608 - DNA, 2452 bp, Artificial Sequence
  chemically treated genomic DNA (Homo sapiens)
tgaatatgtgtgtgtgtgtgagtgtatgtgagtgtgagtttgtaagttttttgagggttaagtatttggttgtttattttatttttttagtatttagtatggggtatagtattaaatatattgaataaatgaataataaaatatataatagttattagatttttttagttgttttttaggatttttggaggatttagttatttttaaattttaggtatagatggatagttgttgggaatttgaaatattttaggtatagttttagattttttattgttgttttattgatgttttattttgtgtattagagtttattttttttttgttgtgtagatgggtaaattgaggtttagagagagtttaaattttatttaaagttatataggtaatgagagatggttttaaagtttgatattatatttagaattttttttattatattaagtgtggttagttttggaggagaaattttttttaagttttattttttgattataaataatatgaaaaatataagagtgatgtttttttattttagggggttgaaaaatgggatttatgaagttattaattatttttttttaattaaattaaaattaaatgtgagtataggtatgttttttttattaaagataattaaatggatagtgtggttatgtaaataaaatgagtttaggatttaaatggaaagtaaattaaataaaaagtttttttgggatgaggggtttgtttatgattgtgttatttgtaaattaggagtttattaattttttttaaatattagtaatttaattaaatttgtttttttttttattttaattttgttgtatatttaaaatagattttattatttataggagttggttatgagtgttgattttataattttatttttttttaaaaaattaaaaattttataaaatttatatttagttgatagaggttttgggggaaattatagtttggaaaatggattagttagagtatttagattttatggaaatgttgggaggttgttttgagggtgggtgttgtgagaaggtttggggagaggtgggttagggttgttaatgggggtagggttgtggaaggagttgtttgtgtggggttttggtgataattgtggggtttagtggtttttgtgggtgttgataggagtttggtggtgagtgatggaggaggtggttgtaaaataggttattgttgggtgtttggggtttattttgtggatggtgttgttgttaagttatttttagaatttgataaggatggatgttttgagtggttttttggggtggggggaattaggaagtagtgaattaattgaaattgtggtgaagttttttttttttgaagagtgagagagtgtggtatgagagtgtgtgtttgtatttatatgtgtttatataagtatttgtatatatgagggatttagttggaaaggggataggtggtttttaaaagtttaagtttatatttttagggttggggggtggggtgggttaatgataatttttttttttatttagtggtaagaaattatattgttaggttgttaaaaagattttttgggatttggggtgggagtttatagttagatggtatatttaagatggtggaattatttataatagtgagatttataaggtgagatttaataatataaaagtgaatatttattgagtatgtgttaggatttagagagtattttaggtttttgataaatgttaatttattgattttttaatgttagattttgagttaggttttagtaatagttttatttaatagataaggaaattgaggtatagagagggtaaaaaagttggttttttgtatttgtgggttttgtattagtgaatgtagttaatttaggattaaaaatatttagaaataaaattgggtttgtattgaatgtgtatagatgttttttttgttattttttaaataatatagtataataattatttgtatagtatttatattgtattaggtattattaatattttagagatgatttaaagtatatgggaggatgtgtataggttattggtaaatgttatgttattttatattgggttttggtatttatgggaggttttggaattaattttttattgagagatattgagggataattgtaatgtgtttaaagttaggaagattataagtagttgagttgggatttgagtttatgtagtatagttttaggtggttttttaattatatataatgttattttttttaagaaagtgtatattgggtaaatatttgttaagagatggaaattttttttttttttttggatggagtgtttttttggaggtggttttgagagtaagagagtagggtaggggttttgggtgaaggtgatagagaaggagggtgataagttataatagtagtggtaatgtggggattggttgttgggggaaatagaaagggttttggg

SEQ ID NO: 2609 - DNA, 2452 bp, Artificial Sequence
  chemically treated genomic DNA (Homo sapiens)
tttagggttttttttgttttttttagtaattagtttttatattgttattgttgttgtgatttgttattttttttttttattatttttatttagagtttttgttttgtttttttatttttaaggttatttttagaaaaatattttatttagggagggagaagaagtttttattttttagtaaatatttgtttaatgtatatttttttaagagaggtggtattgtgtgtggttaaagggttatttggagttgtattgtgtgggtttaaattttagtttggttgtttatgatttttttgattttgggtatattatagttgttttttagtattttttgatgggggattggttttaggattttttatggatattaaaatttaatataaaatagtataatatttgttgataatttatgtatatttttttatatattttaaattatttttagagtattgataatatttaatatagtgtaaatattatgtaagtagttgttatattatattgtttggagaatgataagaaaaatgtttgtatatatttagtatagatttaattttgtttttgaatgtttttgattttgggttggttgtatttattgatgtagaatttatggatatagagggttaatttttttattttttttgtgttttagtttttttatttgttaagtgaggttattattgggatttagtttaaagtttggtgttggggagttagtgagttagtatttgttaagaatttagaatattttttgggttttggtatgtgtttagtaagtatttatttttatgttgttaagttttattttgtaagttttattattatggatagttttattattttgagtgtattatttaattgtgaatttttgttttaaattttaaaaagtttttttggtaatttaatagtatagttttttattattaagtgggggggaaggttgttattagtttattttattttttaattttaggaatatgagtttgggtttttaaaagttatttgttttttttttagttgagttttttgtatgtatgagtgtttgtgtgggtatatatgaatgtaaatatatatttttatattatgtttttttattttttaggaagaaaggattttattatggttttagttaatttattgttttttggttttttttattttagggagttgtttggagtatttgtttttgttgaattttaaaggtagtttagtaatagtattatttgtagagtgaattttgggtgtttgatggtaatttattttataattgttttttttattatttattgttaggtttttgttagtatttataggaattgttgggttttgtggttgttgttaaggttttatataaatagttttttttgtggttttgtttttattggtaattttggtttatttttttttgaatttttttatgatatttatttttaaagtaattttttagtatttttataaaatttgggtattttgattaatttgttttttgaattataattttttttgaggtttttgttagttggatgtggattttgtaggatttttaattttttaaaaaaagatagaattatggggttagtatttatgattaatttttgtaggtggtgagatttattttagatatatggtaggattaaagtggggaggagagtagatttaattaagttgttaatatttaaagaaaattgatgaatttttggtttatgagtagtatagttgtgaatagattttttattttggggaggttttttatttgatttgttttttgtttaaattttggatttattttatttgtgtagttgtattgtttgtttaattgtttttaataaggaaaatgtatttatgtttatatttaattttgatttaattaggaggaagtaattaatggttttataaattttattttttagttttttgggatgagaaaatattgtttttgtgttttttatgttgtttatgattaagggatggggtttgagggggattttttttttagggttggttatatttgatgtggtagaaagaattttgaatgtggtgttaggttttggggttgttttttattatttgtgtgattttaggtggggtttagattttttttgggttttagtttgtttatttatatgatggggagagagtaagttttgatgtataagatgagatattaatgagatagtagtaaaaggtttagaattgtgtttggagtgttttaggtttttagtgattgtttatttgtatttgggatttaagagtggttgaattttttagaaattttagaagataattgggggagtttgatgattgttgtatattttattatttatttatttaatatgtttggtgttgtgttttgtgttgggtgttggggagatggaataaatagttagatgtttggtttttaaggagtttgtaagtttatatttatgtgtatttatatatatatatatattta

SEQ ID NO: 2610 - DNA, 2489 bp, Artificial Sequence
  chemically treated genomic DNA (Homo sapiens)
atttttttttttttagttatgtataatatatttatataaaaattttatattttaatgggattttataaatatatatatggtattatattgggtgtattatttttttttttttttaaatagagttttgttttgttatttaggttggagtgtagtggtgttattttagtttattgtaatttttattttttgggtttaagtgattttttttttttagttttttaagtagttgggattataggtgtatgttattatgtttggttaattttttgtatttttaatagagatagggttttattatgttggttaggttggtttttaatttttgattttaagttatttgtttattttggttttttaaagtgttgggattatagatgtaagttattgtgtttagttggatgtatgattttttaatttgtgttttttatattttaggatgttttggaattatttttatgtgttagtataaaaatttatttttttggtttgggatgtggtttatgtttgtaatttttgtattttgggagtttgaggtaggggggttatttgaggttgggagtttaagattggtttgattaagatggagaaattttgtttttattaaaaatataaaattagttaggtgtggtggtgtatgtttgtaattttagttatttagaaggttgaggtaggagaattgtttgaatttgggaggaagaggttgtagtgagttgagattgtattattatattttagtttgggtaataagagtaaaatattgttttaaaaaaaaaaaaaaaaaaaaaatttattttttttttttgtattgttgggtaggattttattgaatggatatattatattttatttagttatgattttattaagggaattttaggtgttttttagttttttattaggatgatggatatttttatataaggttttttgtaggtgttattttgggttagaaagtaaaaattttttgagatggggattgtattaggttttggtttttagttttattgtattttatttgtgttaaggttatgggaatttttttattgtttttgttagtagatgttatttagtatttattttaagatatttatattttgatttggaagagattagaagtattttgtagtttgtgtggataagttttttttttgatttatagtttttttatttttgtatttaggagagggatggtagtgttgagggttgtgggatttttttttttggaggtttttttatttttgtggtttttgtgtggtttagtttttttttgagttggtttaaggggtaatttgatttaggttagttggtggagtatgaggtagtgtttagttgagtgttatggtattttattaagtttgaaatgtgattgttattgttgttatattttagtgtttttaataatttttttataaatgagaaaaatagagtttttttaaatgttttttttttgatattaaggaaagtgtatggaattttgtttagaggtttgagtttgggtgattttaggagtggttttagagtttgaggaaaggtttggggggtggagggggtgtttttttagttttaggtaaagtagtgagttgggggttatttgttgttttttttgtgtttgggtttgtaaagttagtggttgttgtttaaattttattttttttaatatgttaggattgtttattttaggttatttatttatatggttatggtttagaggttttagatttatatgtttagtggggttaaggatttaggtaatgtaaattgaagtaagttttgtagagatggtgggaaattgtaaatggatgttttggttgaaggaggtagttgaaaatttggagagagaataagaataagaagagaaagggaagaggaggtagagagaaaagagagaggatattttttaagtttatatattgtttattgttttaaaaaaatttaaatatgtaatgagttaagtaggtatgtttttaggttagtttgtaggtttttttttaattgaatttattaatatagtagataagttgttggtttggtttttttatttttttagagtagtattgtttagtagagatttttgtgatgataaaatatttgtagtgtttattgtaataattattggttatatgtagtttttgagtatttgaagtaggattaaagaattgaatttttaatgttatttaattttattgaattttaatataattataattagttataggtaattaattgttattatattagataatatggttttagatttttttaatgtggagggtattattgtgtttgattattgtaaaaaagattatttttttttggggagagggggtagattatatttgagattattaagtattaattagagttttgggtaaatggaaagaaaggaaatttgaaatattgagtagtaaaagtttaggtgtaattagatgtttgttggtttaagagtggttatttagtgtttttttatttttttattttttagtgagttt

SEQ ID NO: 2611 - DNA, 2489 bp, Artificial Sequence
  chemically treated genomic DNA (Homo sapiens)
aaatttattgggaagtgggggagtggaaggatattgagtgattatttttgagttagtagatatttggttatatttaagtttttattgtttagtattttgaattttttttttttttatttatttaggattttgattaatgtttggtggttttaggtataatttattttttttttttaagaaggagtgattttttttgtagtagttaagtatgatgatattttttatattgaaagaatttagagttatgttgtttaatatggtagtaattagttgtttgtggttagttatagttatattgaaatttagtaaagttaaataatattaaaggtttagttttttagttttattttaagtgtttaagagttatatgtagttagtggttattgtagtgaatgttgtagatattttattattgtagaaatttttattggatagtgttgttttagaggggtgagggagttaggttggtagtttgtttattgtgttgataagtttagttagggaagagtttgtaaattggtttggagatatatttatttagtttattgtatgtttaaatttttttgaagtaatgggtaatatgtaaatttgggggatgtttttttttttttttttttgtttttttttttttttttttttttgtttttgttttttttttagatttttagttattttttttagttagggtatttatttatagttttttattatttttatggggtttgttttagtttatgttatttggatttttgattttattaggtatgtgagtttgagatttttgagttatggttatataaatggatggtttagaatgagtaattttgatatgttaaggaaaatgggatttaaatggtaattgttgattttatagatttaggtgtagaggaaatagtagatagtttttagtttattgttttgtttgaaattggaaaaatattttttttgttttttaggtttttttttaagttttggagttatttttggggttatttgggtttaggtttttgggtagggttttatgtgttttttttgatgttagaggaaaggtatttggggaggttttgttttttttatttgtaaggggattgttgggggtgttaaagtgtgataatagtagtgattatattttggatttaataaaatattgtgatgtttagttagatgttattttatattttattagttgatttggattaagttattttttgagttagtttggaggggagttggattgtgtagaggttatgaggatgggggagtttttagggaagagaattttatgatttttagtgttgttattttttttttaggtatgagggtgaggggattgtaagttagaggggagatttgtttatatgaattgtagggtgtttttggttttttttgggttaaagtatgagtattttggggtgggtgttgaatggtatttgttggtagagatggtggaagggtttttgtggttttgatataggtgaagtgtagtggggttgaggattgggatttggtgtaatttttgttttgagggatttttattttttgatttagagtaatatttgtaaagagttttgtgtaaaaatgtttattattttggtgagaaattggaaaatatttaaagtttttttgatgaggttgtagttaaataaaatgtggtatatttatttagtggaattttatttagtagtgtagaaaaaggaggtggattttttttttttttttttttttgagatagtgttttgtttttgttgtttaggttggagtgtaatggtgtagttttggtttattgtaattttttttttttaggtttaagtaatttttttgttttagttttttgagtagttgggattataggtatgtattattatgtttggttaattttgtatttttagtagagatggggtttttttattttggttaggttggttttgaatttttgattttagatgatttttttgttttggatttttaaagtgtggggattataggtgtgagttatgttttaagttaaggaggtgaatttttatgttagtatatggaaatggttttaagatattttggagtgtgaaaaatgtaggttaaagaattatatatttggttgggtgtggtggtttatatttgtaattttagtattttgggaggttaaggtgggtagatagtttgaggttaggagttggagattagtttggttaatatagtgaaattttgtttttattaaaaatataaaaagttagttaggtatggtggtatatatttgtaattttagttatttgggaggttgagaaaggaggattgtttgagtttaggaggtggaggttatagtgagttgagatggtgttattgtattttagtttgggtgatagagtaagattttgtttaaaaaaaaaaaagagtgatatatttagtatgatgttatgtatatatttataaaattttattaaaatatgagatttttatatggatatattgtatataattggaaaaagaaagat

SEQ ID NO: 2612 - DNA, 2458 bp, Artificial Sequence
  chemically treated genomic DNA (Homo sapiens)
gtgtgtgtaaagtaatatggaaaaatgtggaggtgggaaagatagagatagagagatagaagagatagagagatataagagatagagagatagagagatgttggtttgaggttttggggatttatttttatttgaaattattttttttttttttttttgagatggagttttattttgttttttaggttggagtgtagtggtatgattttagtttattgtaatttttgttttttgagtttaagtgatttttttgttttagttttttgagtagttgggattataggtgtttaatattatgtttagttaattttttaatttttagtagagattaggttttattatgttggttaggttggttttgaatttttgatttgaggtgatttgtttgttttagttttttaaagtgttagaattataggtgtgagttattgtgtttagtttaatgttttaatttttagtagagatggggtgttattatgttgtttatgttggtttggaatttttgggtttaagtgatttttttgttttggttttttaaggtgttgggaatatatgtatgagttattatgtttattatatttttattgtattttattaatatgtttatgtatgtttagatatataaatattttttattgtgttattattgtttataggatttagtatggttatatgttgtaggggggtttgtagtttaggagtaataggttatgttatagagtttaggtgtgtagtaggttatgttatttaggtgtgtaatgtattttatgatgtttgtataatgatagaattatttaatgatatgttttttagtatgtatttttattgttatgtgatatatgattgtatattgtttggaattggtatatagtaagtgtttattaagggttatatttttattatttattaatgggtttgttttttgttatagttaattttttgttgttaatatttggtttaatggagtttttttgtttttttggagaggattattagttttttatattttttttgtattttgttttgtggtttagtaggttggttattttttttgtaggtagttttatggtggaggttttatgtggttgtttttttatttgtttgagttaagtgtttttggggaatgatttggagtttgatgggaggaggagatttttttgtttttttttttagttttaaatttaattgaaattgttttgtaataattgtatttgtggtttgtgaaagttgtgttttgtggtgattagggattgagattagttggtgaaaaatttggtataggggtatatatggtattattggggatattaagtaagttatggataatgggggagatagagggtttttgtaattagaaattattgggaattttggttatttttttttgttgtagatatgtttttgttatgttgggttggtgtaggaatatgttgttttttttagtattagttttttttttttttagtaatataggtggtaatgtggtagagtgtttaaagtgtttttgtagttagattgtttgggtttgaattttggatttgttattttttagttgtgggattataaaggattttgttttttgtggttgttggtaatgaaatgatagtgtatttttatttattgttatgtatgtggatgaattgataggtatgtgaagggtgaaataggatttgatttgttttaggggttttttaagaggtagttagtaggatagaaagtatttgttgtttttggaggatttttttttttttatgatgggttatttggttggaaatattaatagggtttttttaaggatattagtaatttttggtatatgtttattttatattatttttatttatatattatattaaaggtaattgataaatagttttttaagagtttaaatgttttagagttgatttgttgaattatgtaatattattttattaaatatttatttattttgatttggtaatttgtttttatattttggaattagtatataaatatatttatgtatttgtataaatatataatatatatatatatatatatgtatgaatatatatatataagtataaatatattatatatatatatatgaatatataatatatatatatatatgagtgaatatatgatatataaaaatatatatatgtattaatatatggtatatatatgtatatgtatagatatataatatttatatatatataatgtatgaatatataggtatatatgtatatatatatgatgtaggaaaatatagtaaaagtatatatatatatatatatgaatatataatatatatatatatataggatataaaattttaaaaaagatagaaatgtattttgtttttttatttgttttttttttatagttaatttttaattggatttttgtttttgtagtttttttagagtttagatttttttaaatggttagagggtttttttgagtttaagag

SEQ ID NO: 2613 - DNA, 2458 bp, Artificial Sequence
  chemically treated genomic DNA (Homo sapiens)
tttttggatttagaagggttttttggttatttggggaagtttgggttttgggaaggttgtggaggtagaagtttagttggaagttggttgtgagaaggaaataggtgaagaagtaagatgtatttttgttttttttgggattttatattttgtgtatatgtgtatgttgtgtatttgtgtatgtgtgtatatgtgtttttattgtatttttttgtattgtgtatatgtatatatgtatttgtatatttatgtattgtgtatatgtgaatgttgtatatttatgtatgtgtgtatgtgtgttatatattaatgtatatgtgtatttttatatgttatgtatttatttgtgtgtatatgtgtgttgtatatttatgtatgtatatgtagtgtatttgtgtttgtgtatatgtatttatgtatgtgtgtatatgtatgtgttgtatatttatgtaggtgtgtagatgtgtttgtgtgttggttttaaaatatgaggataaattgttaaattaaagtgaataaatatttaatgaaatggtgttgtatgatttagtgagttagttttggaatatttggatttttagagagttgtttgttgattatttttaatgtagtgtgtgggtggaaatggtgtgggatgaatatgtattgaaagttgttgatgtttttaaagaagttttgttggtatttttagttagatggtttgttgtgggggagagaaagttttttgaaagtagtgggtgttttttgttttgttggttgttttttgggaggtttttaggatagattaggttttgttttattttttgtatgtttgttagtttatttatgtgtatagtagtgggtgggggtgtattgttgttttattgttaataattataggggataaagttttttgtggttttatagttaggaggtggtagatttaggatttaaatttagatagtttgattgtagagatgttttgggtattttgttatattattatttgtgttattgggaaaagggagaattgatgttgggaggaatagtgtgtttttatgttggtttggtatggtggggatatgtttgtagtagggagaggtggttgaggtttttagtggtttttggttgtaggagttttttgttttttttattgtttgtggtttgtttagtatttttagtgatgttgtgtgtgtttttgtgttaggttttttattagttaattttagtttttggttgttatgagatatagtttttatagattataaatgtaattattataaggtaattttagttagatttggggttgggagagaaaatagaagggttttttttttttattaggttttgaattgttttttaggagtatttaatttagataaatggggaagtagttgtgtggagtttttattgtagagttgtttgtaggggaagtggttgatttgttgggttatgaagtagggtgtaggaaggatatggggagttagtgattttttttaagggggtagggggattttattaaattagatgttaatagtaagaagttggttataataggggatgggtttattggtggataatgaaaatataatttttagtaggtatttgttatgtgttagttttaagtaatgtatagttgtgtgttatgtaataatggggatatatgttgagaaatgtgttgttaggtgattttgttattgtgtgaatattatggagtgtattatatgtttggatggtatagtttattatatatttaggttttgtggtgtgatttattatttttaggttataaatttttttatagtatgtgattatattgaattttgtaggtggtggtaatataatgggaagtatttgtgtatttaaatatatgtgaatatgttaatagagtatagtaaaaatatggtgggtatggtggtttatgtgtgtatttttagtattttgggaggttaaggtgggaggattatttgagtttaggagttttagattagtgtgagtaatatagtgatattttatttttattaaaaattaaaatattaggttgggtatggtggtttatgtttgtaattttggtattttgggaggttgaggtgggtagattattttaggttaggagtttaaggttagtttggttaatatggtgaaatttggtttttattaaaaattaaaaaattagttgggtgtggtgttggatatttgtagttttagttatttgagaggttgaggtgggagaattgtttgaatttaggaggtagaggttgtagtgagttgagattatgttattgtattttagtttgggagatagagtgagattttattttaaaaaaaaaaaaaaaaagtggttttaggtaagagtggatttttagggttttaaattagtatttttttatttttttattttttgtatttttttattttttttgtttttttgtttttattttttttatttttgtatttttttatattgttttatatatat

SEQ ID NO: 2614 - DNA, 2422 bp, Artificial Sequence
  chemically treated genomic DNA (Homo sapiens)
ttattggaaagagaagttttagtattttaatggagttttgtttttagtataggtaaggataggttttaggtttagagttgttagtttgagtttaataatttagtttatttttgtggtatttatttttaattttgtgtttaatttaaggtgattaattttatatagtttgttagaattatttaggttttaaaattgaaagtttataggtgaatggaggtaagggtggttggttatttttgttttaatttatgggtattagatattggttttttattaatggtagtttttttttaaaataaatatttgaatttaaaaaggggttggatgtagtggtttatgtttgtaattttagtattttgggaggttgaggtgggtagattatttgaggttaggggtttgagattagtttggttaatatggtgaaattttatttttattaaaaatataaaaattagttgggtgtggtggtgtatgtttgtaattttggttatttgggaagttgaggtaggagaattgtttgaatttgggaggtggaggttgtagtgaattaagattgtgtaattgtagtttagtttgggtgatagagtaagattttgtattaaaataataatagtaaaaataaaataaaataattttaaaaatttaaaaagagagttatttgagggaaaatattaagaaattaatagtatttttggtgaaaagaaatggtaaaaatattgtgaatattgtgttatgtgagtgagtgatggtgttgagaaatgtataatgtttgtaagtttggaaatttaagtttagtttttgggttggtggtttattggttgtttgattttaaataggttgtttgttttttttgagtttttatattattttaagtttataaggttaattatttttagaggtggggagaggttagagggtaggtaggttttgttgtgggtaggtaggttttgtttatttttatttttttaagggtgaggttttaaggtatgagttgtttttagtgtaaaagttggtattaatagtagtaatttataaatttttggagaggtttggtattttttatttagtgattgttgagtttgattgatggggttatgttggtaaattagttattatttagtagagatattttttagagatgttaattgtttagtgtttatgtgtttttatttttttttggtataggtggttggttgttgattttttgttattattgtttgataatagtgtttgatttgtttatatagattagggtttttgtatgtatgttgttagtatttaattattagttagtatggtgtatgaagtatggtttattaatgtttttgaggggagtaaataggtgttggtagaaatttatttttgtggataaatttgtggatatgtgtatttttatatgtgtttatttagtttttaagtataggaatgagttagtgttatgtgtgtatatgtattttgtgaattatttatatgttggttaagaagtagttttagatatatatgtataggatggagtatatgtatgtatataataggtaatgttatatggggttgtgttaggattatattatagaatatttgtaaggtgttttgaatagtgtttggtatgtggttaattattttttagtaaattagattttttattatttttttttagtgtttttttatttattgaggtataatttatatataataaaatgtataagttttaagtgtttagtgtagtgttttttgataaatagatatatttgtgtatttattaatttagttaaggtttagaatatttttattatttaggaagtttttttgggtttttttttagttaatatttttaaaagtaattattgttttgattttttttgttatagttgaattttgtttgtttttgagttttatataaatggaattatatggtgtgttttttttggtaatgtttattgtggatgtttagatgtgtgtatagttatttatatttatatatatgtgtatggatatttagttagatttatttagaaatggggatttttgagttgtaaattttttggttttagtttgtagtttagttaagtttttttgggtttagaggattaaaggagatggggagagtttttgatgttgggtttagttattgtggggggttttttttatattttttttagttttttttattgagtgattttagataagaattgaaaatttgtttttttttgtgaaatgaaatgaataataataatatatagtttataatttttttgtattgagtatttattatgtagtaggtattgttttaaggattgtgtaagtttgagtttattttgtttttttagtaattttataatttaggtattattattatttgttttatgggaaaggaatttgaggtatagagaggtttagtagtttgtttgaggttatataggaa

SEQ ID NO: 2615 - DNA, 2422 bp, Artificial Sequence
  chemically treated genomic DNA (Homo sapiens)
tttttgtgtgattttagataagttgttgggtttttttgtgttttaggttttttttttataagataggtaatgatgatatttggattatagggttgttgggaggatagagtggatttgaatttgtgtagtttttagaatagtgtttattgtataataagtgtttaatataggggagttatgagttgtatgttattattatttattttattttataggagaaaatagatttttagtttttgtttgaggttatttagtaagggaagttgaagaaaatgtggaaggagttttttatggtggttggatttagtattaggggttttttttattttttttagttttttgaatttagagaggtttagttgaattgtaagttgaggttaagggatttatagtttagaaatttttatttttgaatgagtttgattgagtatttatgtatatgtgtgtaagtgtgagtggttgtgtatatatttgagtatttataataggtattgttaagaaggatatattatatgattttatttatatgaggtttaagaataagtaaaatttaattataataagagaaattagaatagtgattgtttttggaggtattgattggaagggaatttgagagaattttttggatgatggaaatattttggattttaattgagttggtgggtatataagtgtatttatttattaaaaggtattgtattaaatatttaaaatttgtgtattttattatgtgtaagttatattttaataaataaaggagtattgggaaaaaataataagagatttaatttattgaggagtaattaattatatgttgggtgttgtttaagatgttttataggtgttttgtaatgtaattttaatataattttatgtagtattgtttgttatgtatatgtatgtattttattttgtgtgtatgtgtttgaggttgttttttagttggtgtatgagtagtttatagaatgtatatgtatatgtgatattgatttatttttatatttgggggttaagtgggtatgtatgagggtgtatgtgtttatagatttgtttatgggaatagatttttgttagtatttgtttgttttttttaagagtattaatgaattgtgttttatgtgttgtgttggttggtagttagatgttaatagtatgtatgtaggggttttggtttgtgtagataaattaagtattgttattagataataatggtaggggattgatagttagttgtttgtgttagggaggggtggggatgtatgagtattgggtaattagtatttttaaagggtgtttttgttgaatggtggttaatttgttgatatggttttattagttaaatttagtagttattgagtggggaatgttgggtttttttaaagatttgtgagttgttgttgttggtgttagtttttgtattgggagtaatttatattttaagattttatttttaagaggataagggtgaatagagtttgtttgtttataatagagtttgtttgttttttgatttttttttatttttgaggatggttggttttgtgagtttgggatgatgtggaggtttggagagggtaagtaatttgtttagagttaaatggttagtgggttattaatttaggaattgagtttgggtttttagatttgtaggtattgtatattttttaatattattatttatttatatgatatagtatttataatatttttgttatttttttttattaaaggtattattagttttttggtatttttttttaagtgattttttttttaaatttttaaaattattttgttttatttttattattattattttgatgtggagttttgttttgttgtttaggttggattgtagttgtatgattttggtttattgtaatttttgttttttaggtttaagtgatttttttgttttagttttttgaatagttgggattataggtgtgtattattatgtttggttaatttttgtatttttagtagagatggggttttgttatgttggttaggttggttttaaatttttggttttaaatgatttgtttgttttggttttttaaagtgttgggattataggtgtgagttattgtgtttggtttttttttaaatttaaatgtttattttaaaaggaagttgttattaatggaaaattagtatttgatatttataagttgaagtaggggtgattaattatttttgtttttatttatttgtgaatttttagttttaaaatttagatggttttggtaaattgtatggagttaattattttaaattgaatatagggttaaaaatgaatattataaaaataaattaggttattaaatttgaattggtagttttgagtttggagtttgtttttatttgtgttgaaggtggagttttattagaatgttggagtttttttttttggtag

SEQ ID NO: 2616 - DNA, 2465 bp, Artificial Sequence
  chemically treated genomic DNA (Homo sapiens)
ttttgttaatagggtttttaaagaaattatgggatgtttggttgaatttgaattttagataaataataaattttttaagtataagtatattttttaattattagtagtttggtatatattattttaggtttttttttgtgaagatatgtatttttttttgagatggagttttgttttgttgtttaggttagagtgtagtggtgtaattttggtttattgtagtttttgttttttaggtttaagtgatttttttgttttagttttggagtagttgtgattataggtatatgttattatgtttggttaatttttgtattttgagtagagatggggttttgttatgttggttaggttggttttaaatttttgattttaggtgatttgtttgttttatatattttttttggtatggtttgtatttgatattgtttgtagtttgttttttttttttggggtattattggggttattgtgtttattagagtaggttgtgaggttgtggattttatttggattaggatttttgttttgttgtttgttaattgtgtgattttgagtaggttattttatttttttgagtttttgtgtttttatttgtataatgtggaggatatgggtagttttgttattttttgtatttgttgattttgttttttttgaaagttgtatagaatggagaggttgtggtggttttaattagttttttgtgatgggtgttaggattgttgtttgtttattgtttttttaaaggaggtagtggaagggggttgagtaggaattgggtatataattttaagatttagtttgttttaaaaaaaaaaaaaaaatgaagggtgtttgtttttttggaaattatttgttaatttttaggatattgttttttttttaggtgaaggaggtggaggagattattgagggtatgttttttaggttggaagagttttgtagtttggttgatttggtgagtggttgtttggaaggtgtgggtttaggtttaggttagattttaggtttttgttggagttttttgtggaagttattttggtggtgagttagtaattaggaggaatggggtagtggttagtgttgagaggaaagttatgtgtaaatattttttttttttttttttttttgtttttttttttttatttaattttaagtgttttttgaggtggttattttgattttgttttttttttgagatggtttttattttgtagaggagttaggagtggattataaggtggtatttttgggtattgatgtagggagttgtttagtggggatgttagattatatttaattttttttagttttgtattgttttttgtgtaaatatggagatagttaggaaatggttttaggtttgtgaggtttaggaggagttttttgtttaggttatagtttgtggtggagttgggtattgagtttttttttgaatttttttgttttttttgtttttattttttattttgtttggttggtttaaatttattagtttggttgaggaggaagatggaagataatggtttagaagataaagttttttatgttagagtttttagaaattgtttttagaggttgggtgtagtggtttatatttgtaattttagtattttgggaggttaaagtgggtagattatttgaggttaggagtttaagattagtttgattaatatggtgaaattttgtttttattaaaaatataaaaattagttgggtgtggtggtaggtgtttgtaattttagttatttaggaggttgaggtaggagaattgtttgaatttggaaggtggaggttgtagtgagttgagattgtgttattgtattttagtttgggtgatagattaagattgtgttttaaaaaaaaaagaaaagaaaaagaaattgtttttagattttagtgtttttaggattgttgttagttaggtgtggagtttttaggagtgttgatagaattttttagaagtttttaagtttattagaggtaaattagtaatttgggtttgaggtgtttgtttggaggtttaaagggtagagttttatattgtgattaggttttgtgtttttttagagtggaggaagtttggttatttgggtttagtggtgtgtgtttatgtttttgagaagtattgtgtttggattttgagagtgtttgtgagaatttaagggagtaatagtaatagtagttttagatgtttattgaatgtttttttttgtgtttggtataaagttattttagatagtaggtattgagttatttttatttatttagtggattttggtttagtttttagggttatagtagaaattttaagaggatttatatggtttttttttttgagttaatttttatgtttagatgtgggtttaggtgggagttaggtaataagataggtttttaatagtttggattgttttttttttattattatgtattggattttttttttttttttttgtttt

SEQ ID NO: 2617 - DNA, 2465 bp, Artificial Sequence
  chemically treated genomic DNA (Homo sapiens)
aagatagaaagagaaagaaagagtttaatgtgtggtggtaaagaaaggataatttaggttgttaaaagtttgttttgttatttagtttttatttggatttatatttgaatgtaaaaattgatttaagagaagaaattatataggtttttttgggatttttgttgtgattttagaggttgggttgaggtttgttgaataggtagggatgatttagtgtttgttgtttagggtggttttgtgttgggtataaagaaaggtgtttaatgaatatttggggttgttgttattgttatttttttgggtttttataaatatttttagggtttggatatggtgttttttagggatataaatgtatattattgggtttaggtggttaggttttttttattttggggagatatagggtttggttataatatggagttttattttttgggtttttaggtagatattttaagtttaggttattggtttgtttttaataagtttgggagtttttagaaaattttattagtatttttgggggttttatatttggttggtagtaattttaggaatattgggatttagaagtaatttttttttttttttttttttttttgagatataattttgatttattatttaggttggagtgtagtggtgtaattttagtttattgtaatttttattttttgggtttaagtaatttttttgttttagttttttgagtagttaagattataggtgtttgttattatatttggttaatttttgtatttttggtagaggtagggttttattatgttggttaggttggttttgaatttttgattttaagtgatttgtttgttttggttttttaaagtgttgggattataggtgtgagttattgtatttagtttttagaggtgatttttagagattttggtgtgggaggttttgttttttgggttattgttttttatttttttttttagttaggttagtagatttgggttaattagatagagtaggaggtaaaagtagagagaatagaaggatttaggaaggaatttgatgtttaattttattatgggttgtggtttgggtaagaggttttttttaggttttgtaggtttgaagttattttttggttgtttttatgtttgtataggggatggtgtagagttgaggaaagttaaatatagtttagtgtttttgttgaatggttttttgtattggtgtttgagagtgttattttgtggtttatttttggtttttttgtggaataaaaattattttgagggaaggatgagattaagatggttgttttaggaagtatttggggttgagtgagagagagagagtgagagagagagagaggagggagtgtttgtatgtggttttttttttagtgttggttgttgttttattttttttggttgttaatttattattaaaatggtttttgtagaaaattttagtaagggtttgaagtttggtttgggtttaaatttatgttttttaggtagttatttattaggttagttaggttgtaaaatttttttagtttgaggagtatgtttttgatggttttttttattttttttgtttgaaaaagagatgatattttggagattagtaagtggtttttagggagataaatattttttattttttttttttttttaaagtaaattaagttttaggattatgtgtttggtttttgtttgatttttttttattgttttttttgaaagagtaataaataggtagtagttttggtgtttattatggaggattggttaaagttattatggtttttttattttatgtagtttttaaaagagataagattaataaatataggaaataataaagttatttgtattttttatgttgtatagatgaggatatggaggtttagagaggtggggtaatttgtttaagattatatagttaataaatagtggggtaaggattttaatttagatggagtttataattttatagtttgttttaataaatatagtggttttggtgatattttggagaggaaaagtaagttgtagatggtgttagatataaattatattaaaaaaaatgtgtgaggtgggtggattatttgaggttaggagtttgagattagtttgattaatatggtagaattttgtttttatttaaaatataaaaattagttgggtatggtggtgtgtgtttgtagttatagttattttgaggttgaggtaggagaattgtttgaatttaggaggtggaggttgtagtgagttaagattgtattattgtattttagtttgggtaatagagtgagattttgttttaaaaaaaagtatatgtttttatagagaaaggtttggaatgatatgtgttagattgttaatagttaagagatgtgtttatatttaaaaaatttgttgtttatttgaaatttaaatttaattgggtattttatagtttttttggaaattttattaataggg

SEQ ID NO: 2618 - DNA, 2474 bp, Artificial Sequence
  chemically treated genomic DNA (Homo sapiens)
gataggagaggaatttattttgttaagaaggattttttttttagataagaaattaatatggttttgttttttgaattttgtgtgaagttaattaggtttttagagtgtaggtagaagggtagttgatgttttttgagtatttattatgtgtttgatatttttagttttttgatttttttttattgttaatatattattaattttattttagagatgggaaaattgagttttaaggtatatagtgtgaggttaatttaggttttaggttgagtttgttgggtgatttaaaatttagtttttgaagtgggaattatataaaggtttttggtattaggaataatttttgatggtggaagtgtttagatataatgagtgttttaattaaaaatttatttttttgtggttttttttaaatggatgtaaatggaatgaattgtaggatttttggatttaaaagtttgttttttaatgtaggggattaagtttaggtaaatatttagatttttgaaaatgagattattttttttatttttatggtagttttggagttgtaatttggattgtatttttggagagtagttttgtgttttagtaaagttgtgggtaagtgatgggttttagtttggggggttattgatattagggatatgagttatagagggtaaaggtttggagagttttagttatgttttagttttgtttggagtttgatattttttagagggaagttttatttagagatttttatattaggtttattgttttagagaatattatgttgggtataattaaatttagggagagaaataggtgggaagagtaggtgtttgttttaagatggttttgattgttttagggtataaatttatggaaaaatatttaatttagaaaaaaaaaaattattttaagtatatgtatttatatttattaaataaagtttaaaatataatttttggggatttttaagtaataaaatgatttatgttaggatatgatgatttagtgggaaagagggaattttattatttatgtgttttttttaaaaaattaatttgttttttggataggtgatgggagtttttgttattagattgttttaagaaaattgtttagtaaaataaaataaaaaattttttttaaataatttaagttttaaagttgagtaatttgatgtaggttagtttttaatttatgtttttgtaggatatatagagttagggagttagttggttaagtttgggggtttgaattaagaaggatttattagttgaaaaattttaaaattttgtgttatgtgaaggaattttttaaaatattggattttatttaggtgtagtgagttgtttaaagttatggtaattttttttttgttgttatattatttttatttttgtgtttttagatttttttttgttttgtaatgttttgttgggatttttgattttgtttgaggttttgtggttaagggttagggtttttattgaagttaggaatagtttggattttttagtgtgaattttgtttgaagggttatatattttttaaattttagagaatatttaaatggttttttagtaattattgagaatgataaataggaaagattttgattgttttgtttggtttttttgttttttttgatatgattagaaaaaattatttgagttgatgataaatgttgttttgggattttatttttgttattagttgtgggttgatttggggtgtatgatttgatatttgtgagttttagttattttatttgtaaaatggggataatgttgtttgttttttagggttggagtgataattaaaagagatgtatttatttaataatataaatgagtatttgttatgtgttggggattattttggatgttgaggatatagtagtaaatgttgagattttgttgttaaggaattaagagtttagtatgagagattaggtgataaatgaatagatagataaggtaggtgattttaatagtgttaagtgtttttaagaaaatagagttgggtagtggtatagaaggtgataaggtgtttgggaagtgggataattttagaatgatggttaaggaggattttgtggaggaagtgatttttgagttgagattgggaggaataggaggttgtaggtttgaaaagaaatggtggaggaggttggatgtagtggtttgtgtttgtaattttaatattttgggaggttaaggtaggtagattatgaggttaggagattgagattattttggttaatatggtgaaattttgtttttattaaataaattataaaaaattagttaggtgttgtggtaggtgtttatagttttagttatttaggaggttggggtaggagaatggtgtgaatttgggaggtggagtttgtagtgagttgagattgtgtatttgtgttatgttattttagtttgggtgatagagtaaaattttgttttaaaaaaaaagaaaagaaaaga

SEQ ID NO: 2619 - DNA, 2474 bp, Artificial Sequence
  chemically treated genomic DNA (Homo sapiens)
tttttttttttttttttttttgagatggagttttgttttgttgtttaggttggagtggtgtggtgtgagtgtgtgattttggtttattgtaagttttgttttttaggtttatgttatttttttgttttagttttttgagtagttgggattataggtatttgttatgatgtttggttaattttttgtagtttgtttagtagagatggggttttattatgttagttaggatggttttaattttttgattttgtaatttgtttgttttggttttttaaagtgttgggattataggtgtgagttattgtgtttggttttttttattatttttttttaagtttgtggttttttattttttttagttttagtttaaaggttattttttttatggggttttttttgattgttattttgaagttgttttgttttttagatattttgttattttttgtgttattgtttggttttgtttttttgggggtatttagtgttgttgaaattatttattttgtttgtttgtttatttattatttggttttttatgttggatttttagttttttgatagtagagttttagtgtttgttgttgtatttttagtatttagagtggtttttggtatatagtaggtgtttatttgtgttgttgaatgaatgtattttttttagttgttattttagttttgagaagtgggtagtattatttttattttatagatgaggtaattgaggtttatagatgttaagttatgtattttaggttagtttataattggtgatagaggtggaattttaaggtagtatttgttgttaatttgagtaattttttttagttatgttagagaggatagagaaattaaatagaataattagggttttttttatttattatttttagtaattgttgaaaagttatttggatgttttttgaaatttaaaaaatgtgtaattttttaggtaaagtttatgttgggaagtttaggttgtttttgattttagtgggaattttggtttttggttatagggttttaggtggagttgggggttttagtaaaatattgtaaaataggaaaaaatttaaggatataaaaataaaagtgatgtggtagtgggaaaggggttgttatggttttgagtgatttgttgtgtttgggtgggatttaatgttttggaaggtttttttatatgatatagagttttggaattttttggttggtaaattttttttaatttaggtttttaggtttggttaattagttttttggttttgtgtgttttgtgggggtgtaggttggaaattggtttgtattagattatttagttttgaaatttaaattgtttgaagagaattttttgttttgttttgttggatgatttttttggaatggtttgatggtagaggtttttattatttgtttagaggataaattgattttttagaaaggatgtgtgggtggtggaatttttttttttttattgagttattatattttgatatgagttattttattatttggaggtttttaaaggttgtattttgagttttgtttaataaatataaatgtatatgtttaaaataatttttttttttttaaattaagtatttttttgtgaatttgtgttttggaataattggaattattttagagtagatatttgttttttttatttgtttttttttttgggtttggttgtatttggtgtgatgttttttgaaataatagatttggtatgggagtttttagatggggtttttttttgggaaatgttagattttagatagggttggggtatgattaaggttttttggatttttgttttttgtgatttatgtttttggtgttagtggttttttgggttggagtttattatttatttatagttttgttgggatatgaagttgttttttaaagatgtgatttagattgtaattttgaagttgttgtggagatagagaaaatggttttgtttttagggatttaaatatttgtttaaatttggttttttgtattgaagaataggtttttaagtttaagaattttgtagtttattttgtttgtatttatttgaaggaggttatagagaaatgagtttttagttagaatatttattgtgtttaagtatttttattattagaaattgtttttggtattaaaggtttttgtgtaatttttattttaaaggttggattttgaattatttagtagatttggtttgaagtttggattggttttatattatgtattttgggatttagtttttttatttttgagatggggttggtggtgtattagtaatagaaggagattaaggaattgaaagtattaggtatatagtaggtgtttagaaaatattagttgtttttttatttgtattttgggagtttggttgattttatatagggtttagagggtagagttatgttggttttttgtttgggagaagagttttttttggtgaggtgaattttttttttgtt

SEQ ID NO: 2620 - DNA, 2463 bp, Artificial Sequence
  chemically treated genomic DNA (Homo sapiens)
tttgtttaattaatttttttgtgattttaattatttttttgtttgttttttttagtagattgggtattttttgaaagtaagaattgattttatttttttttttatttagagtatatagtttatatttagtatttgttgattgaatgggtattgttgtttattttggttgttgtgatagttttggaaggttttaggtagggtggtaggggttagaatttattttattttttgtagtttaatggggttttgtagagggttttaagtgatgttgtaaagttttatattgagaaatgttatttttattttggttttgagaggggataggggtttggttataagttgggattagtatttaggttattaataagttttaataagttttttaaagtttaatttttattaaattaggtattttttgaggttttgtttttgtttaaggtaagtgtagtaatgtgtttgttttatgattttaataattttgggtttaaagttaaggtgtatttgggttaattattttttttttttttgtagtaagaaaaataataatttattaaaagataaatgtaaaaagaagatgtatgtgagaatgagtttatgtggatgtgtaagtatttgttttagagatatagttatggggttgttttagggttagtgtatgaatttaatatgattttatttttgtataagatttttttgtattttttattttaatattatttggttgaaatttttggtttagttttagattatttttgtttaatttttgtaaataaggttatatttgggtatttatggtttattttatgtttttttttatgatagatgtttgtttgagtttagtttttgtagttattgttttttattaaagtagattttttttttttttttgtttatggaggagtgagggggaattgttgagaggaggggtagattggttagggagggggtgattgagaataggaagaagatggggtgagatttgagaggtatgttttggatataataaataagtttgttgttttgtttagaaagggatttgggatttttaattttattagagttttaaaagtattagtttaaagttaaagttagatatatgtaaagttgtagtttttgggggaatttagagtttaaaaataatattttttttgatttaaaaattataagggaatatttatggtatattttttgattaaaaaaggaaagtgaaaaataaggtttttttttttttttttttaattattataaaattaatttgtgtttattttattaagttatgatttttgttggttttaagtgagtttaatttatgttggttatagatatgaggggttgggaagtttgggtatgttttagtgaattgaattggttttttttgaatggttgttattttttttttttgttttttttagtataggaaagttattaaggagttgtttatgttagtatatttattatttagatttttagggtattgtttatttgagaggttagatatagtggggtttattaaagttttaaagtagtagtaataattttttaattgttgtttttgagatagatgaagtatttattatgtgataggtattgtgtttgggattggggatgaagtaatgatgaaggagatgaaagatgaatgtgtggtaggggggtggatgagtaggtgggtgaaggggttggaagggaggaggaaaggaagagagaatatatattaggttatggaaaaaaagaaataaatagaggttaggtatggtggtttatgtttgtaattttagtattttgggaggttgaggtaggtagattatttgaggttagattattggttaatatggtgaaattttatttttattaaaaatataaaaattagttaggtatggtggtatgtatttgtagttttagttgtttaggaggttgaggtatgagaattgtttgaatttagggggtggagtttgtagtgagttaagattgagttattgtattttagtttaggtaatagagtgagattttattttaaaataaatatttaagtagaaagatagatgatggtaggagagaaaggggatttattttggtaggagaattaggggaagttgttttgaggaggtgataattgagttgatagttgaatgaagtagagaaagtagttatgtggatagttgggaggagtgaaaggtatgtgtaaaggttttgaggtaggagtttatttggagtgtttgaggaatagtatagaggttattagtaggtgggaatggagtgagggagtgagtgagtgaggaagagaggtaggtagggattgggtgatatggtttggtttatggtgaggagtataaggttattttgtatttatattttgggaggggagatataggagggtttagaatgggggtggtgtagattaaggtatattttgaatagattttttggtagttgtgtggggagtagatgaatgaagggtgtaagtgg

SEQ ID NO: 2621 - DNA, 2463 bp, Artificial Sequence
  chemically treated genomic DNA (Homo sapiens)
ttatttgtattttttatttatttgttttttatatagttgttagaggatttgtttagagtgtattttggtttatattatttttattttgagtttttttgtgtttttttttttggagtatagatgtagagtagttttgtgttttttattgtggattaggttgtgttatttggtttttgtttgttttttttttttatttatttatttttttattttatttttatttgttaatggtttttgtgttattttttaaatattttaggtaggtttttgttttagggtttttgtatgtgttttttattttttttagttatttatatggttattttttttgttttatttagttgttagtttaattgttatttttttaaagtagttttttttgatttttttattaaaatagatttttttttttttttgttattatttgtttttttatttaggtgtttgttttgagatgaagttttattttgttgtttaggttggaatgtagtggtttaattttggtttattgtaagttttattttttgggtttaaataatttttatgttttagttttttgagtagttgggattataggtgtatgttattatgtttggttaatttttgtatttttagtaaggatggggttttgttatgttggttagtgatttggttttaagtgatttgtttgttttggttttttaaagtgttgggattataggtgtgagttattatgtttggtttttgtttgtttttttttttttatagtttgatatatgtttttttttttttttttttttttttttaatttttttatttatttatttatttatttttttgttatatatttattttttattttttttattgttgttttatttttagttttaagtatagtgtttgttatatagtaggtattttatttattttaagaatagtggttgagaggttgttgttgttgttttgaggttttggtgagttttgttgtgtttggttttttagatgaatagtgttttgggagtttgggtgatggatgtgttggtgtaggtggttttttggtggtttttttgtgttaaaggaagtagaggaaggaaatgataattatttagaaaggattggtttagtttattaggatatgtttaagttttttggttttttgtgtttgtggttaatatgaattgggtttgtttgaggttaatagaagttgtgatttgatggaataggtataagttagttttatgatgattaagaaggaaaaaaagaaaattttattttttattttttttttttaattaagaagtatgttgtgggtgtttttttgtggtttttgagttaaagagagtattgtttttgagttttgagtttttttgggggttgtagttttgtgtgtatttaattttaattttgaattaatgtttttagggttttggtgggattgggggttttgggtttttttttgaataaggtagtaggtttgtttattgtgtttaaagtgtgttttttagattttattttattttttttttgtttttaattgttttttttttggttaatttgtttttttttttagtagtttttttttatttttttgtgagtaaaggagggggaaggatttgttttggtggaaggtggtggttgtagaggttgggtttaggtgaatgtttattatggggggaggtgtggaataagttatgagtatttaaatgtggttttgtttgtagggattgaataagggtggtttggggttggattgggggttttagttaagtaatattggggtgaaaaatgtagaaaagttttgtgtaaaaatgggattatattaagtttatgtattggttttaaagtaattttgtgattatgtttttagagtaagtgtttatatatttatgtggatttgtttttatgtgtattttttttttgtatttattttttggtggattgttattttttttgttgtgggagggagaagaatgattggtttaagtgtattttgattttggatttgaagttgttgaagttgtgaggtagatatattgttgtgtttgttttgggtagagatagagttttggagggtgtttggtttggtagaagttagattttgggaagtttgttgggatttgttagtaatttgggtgttagttttagtttgtaattaagtttttgtttttttttagggttaggatgggagtgatattttttagtgtggggttttgtagtattatttgaagttttttgtagaattttattaagttgtggagaatggagtggattttagtttttgttattttgtttggggttttttagggttgttgtggtagttaggataggtagtaatgtttatttagttaatagatgttgaatgtgagttgtgtattttggatagagggagaaatgagattaatttttgtttttagggagtgtttagtttgttgggagaaatagatgggaaaataattgaggttataaggggattggttgaataaa

SEQ ID NO: 2622 - DNA, 2493 bp, Artificial Sequence
  chemically treated genomic DNA (Homo sapiens)
tgaagttatttttttttgttttttggtttttagaggtttttaaatatgttgaatttatatagggttttgttgttgtagtttaattttagttgtgggagttttgggtagttttgtatttgttttaataaaaagtggggaagttgtgtagttttgttaatgaatgttttgggtttgttatttttttgaaggaaaagataatttgtattttgattattttttagaaaggattgggaagaaatattttaataatgtaattttttaaatgaaatattttattttgaaattaatttttaatttaaagttgtaaaggtattatagagagttttggtatatttttttattgagttttagttttttaagtagtaaaattattaaataattatagatgttaaaattggggaaaagatttagttttagattttatttatttttaaataagtttggtgtatttatttaaattttattgatttttgaaagagggaggtgtatatatatttatattttggggattatttttttgatatttaaaataatatgggtagtttaattttagtattttaagattaagtatttaaaaattgaaatttggattaatatattaatgtaaatttttatttggttaatataataaaaataagagttattatttgttttatatttattaggtgatagtttttgtgtatgggtgatatgatttttatttttttagaatttgttgaggaagagatttttttgtagtttttataaaatgaggatataaatgtagagatgttaagtaatttgtttaaggttatatagttaatgtgttgttatagtggaaatagatatataggtttaggttgtgtttaaagagaattattgtggatgttgttttaattttttttgttaagttatatttattgttgttattgagaatttttgttatatggtagtgaagtttttaattttttattttatatattatttagaattagttgtaaagtgttaggagatttggttaggtagttttaagtattagtgagggttggaagtttttattgtgaagttttttatagaaagttgtggttggtagtttttgtttttgtatgggaataaattaatattggtattttaaatataggaaaggaaggaaattggaaatatagtttatatttggttagttttttgaaatattgtattatgttattgatattaattaatgaaaagtagggttgtgtgagaggttttggtttggaaatgtattaatatatgtttaatatgtttgtataggaattggattatatgtattttggttttaaaataataaagtaattattttaaagttggtgtttttggagttgttattaatttaatttattttatgtggattagtataggttttgtgtggttttttataatgttttttgatataaatgttgaaaaggtggtattgtatatgtttgtttgagttttgtataagtaagtgttaaattttatgtattttaatatttttttaaattataaatattttattttggagtggaaaaaaatatatagtagtagttttagtattttttggtattgttattttagtttgagtttgagtaattttttttttgttggggaagtttaaatgaattatttgttttatattaagaaatattaagttatattttttgttaattattatttgttagatgttatttgttgtaaaatttggaatttaattttagtttgaatatatagttaatattaaatggtttattaatagttgtggttgtatatgggattatttgtagtgaataaatgttttttttttataaattgttttagggattggaaagaaaagtatgtgaagttttggaataaataaagtattgtgttttgagttgtttagtatatgatttttgtatgttgtgagaataggtttaaaatgatttaagagtaagtgtttattttgtaattttgtaagaatgtttttgagaaaggattttagatgatgtaggtaaattttattgtttttgatttgtaatagaaagaattagtttgttttttgaaggattagtatttttagttattgtttttatatatatgtttatttgtatttggaatttagggtttaagtaatagatattatgggtgttttttttttgtttttggtgatgttatttttttagtttaattttatgttgatttgggatttattaagttggagtaatttgagtgtgtaaagttaaatgtgttattatttttattataaattaatagtttttatgtaaatattggtagttttttattttatgaaggtgagagaaggtaaaatggtattggtgtatttgatttaaattaattaaaagtagagggttgtgtaatttaatatattgattttattagtgggatttaaattttttataataagtgtatatagttgtagtgtttttttattattatgttgtaaaggttaatttgtatattttttttgataataatatgataggttttatatatttttgt

SEQ ID NO: 2623 - DNA, 2493 bp, Artificial Sequence
  chemically treated genomic DNA (Homo sapiens)
gtagggatgtgtgggatttgttatgttattgttagaaggaatgtgtggattagtttttatagtgtagtggtgggagagtattgtagttgtgtatatttattataaaagatttaagttttattggtaaaattaatatattgaattgtataattttttgtttttaattagtttaaattaaatgtgttggtgttattttgtttttttttgtttttatggggtgaggaattattaatatttatatagaaattgttaatttgtggtgaaaatgataatatatttagttttatatatttaaattgttttaatttgatggattttagattaatgtggagttgagttgaggagatgatgttattaggagtggggaggagatatttgtgatgtttgttgtttggattttggattttagatgtaggtggatatgtgtgtagaggtagtgattggggatgttggttttttaagaagtgagttggttttttttattgtaggttaaaaataatgagatttatttatattatttaaaatttttttttggaagtatttttataaaattgtgaagtgggtatttgtttttgggttattttgagtttgtttttatagtatgtaagggttatgtattgggtagtttaaggtatggtgttttatttattttagagttttatatgtttttttttttaatttttgaaatagtttatagaggaagggtgtttgtttattgtaaatgattttatgtatgattgtggttattagtgagttgtttggtattagttgtgtgtttaagttgggattgaattttgggttttgtagtaaatggtatttgataaataataattgataaaaaatgtgatttggtattttttaatatggaatagatagtttatttaagtttttttggtaaaaaaaaaattgtttaaatttaaattgaaatagtaatgttagggaatattaggattgttgttgtgtatttttttttgttttaaagtagagtgtttatgatttggggggatattagagtgtatgaagtttgatatttatttatgtgaaatttaggtaagtatgtgtaatattgtttttttaatatttgtgttggaaggtattgtggggagttgtgtaaagtttgtgttgatttgtgtggagtggattgaattaatgataattttgagagtattagttttagggtaattgttttattgttttggagttagggtgtatataatttggtttttgtgtaaatatgttgaatgtgtgttaatgtatttttaaattagagttttttatataattttgttttttattaattgatgttggtagtatggtatagtattttaaagggttggttaagtataaattgtgtttttaatttttttttttttttgtgtttggaatgttaatgttaatttgtttttatgtaggagtgggggttgttaattgtggttttttataaagggttttatagtgaaggtttttagtttttgttgatgtttggggttgtttggttaagttttttgatattttgtagttaattttgggtgatatatggggtgggggattgggggttttattgttgtgtaatggaagtttttggtgatagtagtgggtgtgatttggtaagggagattggaatggtatttatagtgattttttttagatatagtttaaatttatgtgtttgtttttattatgatagtatattagttgtgtgattttgggtaagttatttaatatttttgtatttgtgtttttattttataaaggttataagagaattttttttttaatagattttaaagaaatagaaattatattatttatgtgtagaggttgttatttagtaggtgtaaaataaatggtagtttttgtttttattgtgttggttagatgaagatttatgttggtatattagtttaaattttagtttttaagtatttaattttaaaatattgagattaaattgtttatgttattttaaatgttaagaaaatggtttttagagtgtgaatatgtgtgtgttttttttttttagagattaatggaatttgaatgaatgtattaaatttatttgaggatgaatagagtttaaggttgaattttttttttaattttagtatttatggttatttaatgattttattatttgggaaattggaatttagtgagagggtatattggaattttttgtagtgtttttgtaattttgaattaaaaattaattttaaaataaaatgttttatttaaaaaattgtattattgaagtatttttttttaattttttttggaagatggttaaagtataaattgtttttttttttaagggagtgataagtttaaagtatttattaatagaattgtataatttttttattttttattggagtaggtgtaaggttgtttaaggtttttgtagttggggttaggttgtaataataaagttttgtgtggatttagtatgtttagaagtttttagagattagaggatgaaagagaatggtttta

SEQ ID NO: 2624 - DNA, 2396 bp, Artificial Sequence
  chemically treated genomic DNA (Homo sapiens)
tgggtgggggttggggagttaggggtttagttgggaggggggtagggtgatttttttttattttgtagtttttgttttagaagggaatttggaagtttgttttttttttgatttgaatatgtagtgggtttggaagttaattgaattttttaagtttattgggttgtgtagttgtttaagaaggaggggggttttgagaattgtttttattatttattgtagagtttgaaggagttaaagtgggattattttttggttgttggtaggatgatgtttatttggtttttgtattggtttttgttgggtgggtgatgggtgattggggggtttgggagattttttatttttatagtttgttagttttttattgtggtaataatgatttagttgttatggtaatgaggttaattaatgtatttatttggtagaattaaaattttggatgtatttaattagttttgatatttttatttttaagaagttaatttttggtgttttatttgtttaggtatgtaggtatgttataaaataaaatattgttataaaaggaggagttgtaagaagaaatgggggaagttgtggggaggagttgggaggggggggtttttgtttattttttagagagaagaaaatttggaatgttatttttttttttttgatgatggtataaaattagtatagttaagtaaatgtgttataaatataaagatgttgttaggaggtaaagtgtttttatttaaggagaggaagaatggttgaggggttttagaaagggggttgggtggttaaatggttggagggggtgttgtttgtaatttttttaagtattgtaattagagggaaaagttattttttttgagaatgtgtatttgtagaatgtttagatagttataaagaggataattaaaaaaagaaaaaagttgtaagttgtagttattttttttgttagggtatttatttggttgtaatttttagttaattgtttgagtaggtgaaaaattataaaagtaagaaaagttagtgtgggttaggaggaggttggggagtttgggttgaaaatagtttatgagtaagtgttttgaaattttgttttaaataagttggtaaatgaatttaattttgttagatttttttttttttatgtagattaaatattttgttggtgtgttgtttagatatagataataaaggattttttatagtgtatagagatgtgttgataaagtagttatttaaagatgtagtattgtttttttggtttaaaatgatttgttagatggatttaaatgaaaatgttaagttattggtttggtttggggtttgttggtggattggttggggggagggggttggttgttttagagaattagaaattattatttgtgattgggttgttttttaggttgtttttaaaataggattgtatgtggttgtttagtaaataattttggttttttttgttttgggaaggtgtttgttaagatgtttttaatatttagtagtagtaattttgttgtagtattgtttatttaaagggggtgtgtggtaaaaaaaggttatatgaaaatgtatgggggagaatttgtttttatttgttttgggtggattagaattaagaggagaggaatttggttttatttttaattttgtattttagttttttttatataaagggttattataaaatgagttattttttttttttaggaaagaaagatagggttggaggtgggttggttgtaagggtgtggtttggggatatatttagggtgatatttaaatattttttaaattggggagtgggtttttatgtagttaaggttttaagggaggaagaatagtatttaggagtttttagagttttaatataagttgtgtgttgattttttttttaggttatattttggggtagttggataggggtggtttttttaaatgggggaattagtttttttttttgggattgttagtttttaatttagagaaagatttgttgtttgttagatgtttagtgagggtttatttattttagtgatttttttttgatggggtgttggttaagtggttattttttttttatgtttgttttgtttatggtagtttttatatgagattggtttgtttttttttttttgttttttttttttgtttttttttttttttttttttttttttaaatgttgtaaagtttagatgttggaattagataaagtttatttttattatttttaggttgtgtggtttaagggaagttatttttttgagttttagtttattttgttgtgaaatggggttttaattatttgttttaaagagttgttgtgaggattaaatgtttttgtgtattaaatttattaattagttattaatatggtatttattggttttttttaata

SEQ ID NO: 2625 - DNA, 2396 bp, Artificial Sequence
  chemically treated genomic DNA (Homo sapiens)
tgttgaaagaggttggtggatgttgtgttagtggttggttagtgggtttaatgtataagggtatttaatttttataatagttttttaggataggtggttgagattttattttatagtagggtaaattgaggtttagggaggtgattttttttggattatatagtttgaaggtggtggagatgggttttgtttggttttagtgtttgggttttataatatttgagagagaaaaaggaaggaagggaggataggaaggaaagatagaggaaggagagtagattagttttatatagaagttgttatgagtagggtaggtatggaaaggaagtgattgtttggttggtattttattagagaaaggttgttggagtgaatgagtttttattgggtatttggtaggtagtaggtttttttttagattggaagttgatagttttaggggaagaaattagtttttttatttaggagaattatttttgtttggttgttttggagtgtaatttgaaggagaggttagtgtatggtttgtgttgaggttttgggagtttttggatgttgtttttttttttttggaattttggttgtatggaggtttattttttagtttagagggtgtttgggtgttattttgagtgtgtttttgggttatatttttgtagttagtttatttttaattttgttttttttttttgggaagggagggtgatttattttatagtgattttttgtatgagaagggttaaaatgtaaagttggaggtgagattagatttttttttttttggttttggtttatttggagtaggtggaaataagtttttttttatgtatttttatgtaatttttttttgttatatgttttttttaagtgaatagtgttataataaaattgttgttattaggtgttagagatattttagtaggtgtttttttagaataagaagagttagaattatttgttgggtggttatgtatagttttattttaagagtgatttggagggtagtttaattatagatgatggtttttagttttttggagtagttagttttttttttttagttagtttattagtagattttaaattagattgataatttagtatttttatttaagtttatttgataaattgttttaggttgagaaagtaatattgtatttttaaatggttattttgttagtgtgtttttgtgtgttgtaaaaagttttttgttatttgtgtttagatagtatgttagtggaatatttggtttgtgtgaggggagagagatttgataaggttgaatttatttattggtttatttaaagtgggattttaaaatatttgtttataaattgtttttggtttagattttttggtttttttttagtttatattggttttttttgtttttataattttttatttgtttgggtagttagttggaggttgtagttgggtgggtattttggtgaggagagtgattgtggtttgtagtttttttttttttttaattgttttttttatgattgtttagatgttttgtagatgtatgtttttgggggaaatggtttttttttttggttatagtatttgggagggttgtagatggtattttttttaattgtttgattatttagttttttttttaaaattttttagttattttttttttttttaaatgaaggtattttgttttttggtagtatttttgtgtttataatatatttatttgattgtgttaattttatattattattgaaaaaggaaaagtgatattttaggtttttttttttttgaggggtgggtagagattttttttttttagtttttttttataattttttttatttttttttatagtttttttttttgtggtaatgttttgttttgtggtatgtttatatgtttagataaataaaatattagaggttggttttttaaggatgaaaatattagggttagttgaatgtgtttgaggttttagttttgttaaatagatgtattaattaattttattgttatagtgattaggttattgttattgtagtgaaaaattggtaagttatgggggtggagggttttttgggttttttaattatttattatttgtttaataggaattggtgtagaggttaaataggtattgttttgttagtaattagaaagtggttttattttggtttttttagattttgtagtgggtggtgggggtggtttttagagttttttttttttttaggtagttatatagtttagtggatttgggaaatttagttgatttttaggtttgttatatgtttaggttaggagggaagtaggtttttgagtttttttttggagtgagggttgtggggtggagagaagttattttgttttttttttagttagatttttaattttttgatttttatttg

SEQ ID NO: 2626 - DNA, 2500 bp, Artificial Sequence
  chemically treated genomic DNA (Homo sapiens)
ggttttttgtttgtggggattttgttaggttgtttagagtagttttttagtgttatttttttttttattttttttttttttggggtttagttgtttttagttttagtgttgttttttttaagttggatgtaatttagtttttgttttttatttgttattttatttgtgtagttaatattttatgtatgttttttatagtgtagaaggaaaatataattttaatttgattttatttagtgatgttaaatattgtatgtgaatatttttatttagaagtttatttaatgtagatttattaaaaagtaggagttttaaatgtttgtattgtgtaagtatttttagtatattgttatataggtgtttaagagtgttttaagagatatttggaaaattggttggggattgtttttgttggtttgggaatgtattattatttttttttagtttatataaaggggtgaagttttgatgtttggaaatttgttttttaaagtgtttttaggaattgataatatttggataatgaggggtgtttgtattttttttgatttaaattgttggtagagggggatatttttgtatgattgggtaaggttaaatatagaattaaattaggaagaatagggtttgatatgatgaatttttgttttgttttgttattgataagagatagaataaatgtttttaaagaattttgtattatgaatgtttgatggtaattttgttttagggttttgttgtttgttgttaggtagtaggtatattatttagggttgtggggaaggtgttttgtagttatattgtagtaggaggttggttatatttatgggttttattaagttaggatgtagagtttggtttgttttatggtataggtttgggttgtttggagtttataatgaattagagttatagttgattatttttaaggttggtgtttatgttgggtgtttgagaagatgatgaatttgtagtgttgaagtgttgtttggttttttaggaattagttgtagttgggattttttgtagttttttttgtagtaagttggggtagttatgagttttgtttgtttaatgtggggttaggtgggtatgtttgttgtgtttggtagttttgatatttttagattttgttggaagatgtttgtggtttgaaagtttattttgtagttgttttattttgggatgtagtttttgtattggtaggattaatgtaaatagaatttgtttggtttattttttgttgggttttaataggtttgtaatgttattgtttgttagggagagttatttggtgatattgttaattaaaattatgattttgggggtaagaaaaaattttaaaatgttgaagttattttttttaatagaaattttattttgaaggtgtttatggaggttaggttgattagaaaaatttataagttataaataagtttaaatagttttatttaatttatttaatttggtgtttggagtttttatggggagaggtgtttggtattaatatagggtgggggtggttatttttatttttagtttttgggttttagagttgagaggagggagagaattgaatttttttggaagaatgtggaattgttgagtagatgttttggaatttgttgatttaggtatttgggagtatagtttgattggttatttttgtgttaagttatttatagtttaatggttatttttaattggaaatttattttaaagtggtggtagtgatgggggagtggttgtatttgtaatttattattttatatagagaattttttttttttatttttttttggttaaagttgttgttttgaatgtgggtgggttttggagtttaagattgagttggttgtttggagaaaaattggagggatttgaaaaggtttgagggagggtgttttttgagttgggggtggtagaaaatattttaaatgtgtaggtttaagttttttgtagtgaagggaataggattttggttttggtagatttaatttagtttttgggtttttgggttaatttgtgaaattatttttttttttaggattgggagagaatggttttaaataagtgtaatttaatttttttgattgtggttttttttaatgaaaaattaaaatttatttttttttttgttagttttttattgaaagttataagaaatgaggttggggtggagggtttggagttgttatggaagtatgatgtttagaatttattatgggatggatggttattggtgttatggattgtggtgtagatattgttttttgtgttaggatgtggtttggttttgtatttttttgtttttgaagttgtgtttgtttgtgatttgggagtggtatgaatttatagaatttagtttattttgtaggaagtgggagagttttttgggtattttggtgttgaggaagtatagtttaaagaggaaatttttttgaaatttatatagatttttttttagaatgttttggaaggaagtataattttaagagga

SEQ ID NO: 2627 - DNA, 2500 bp, Artificial Sequence
  chemically treated genomic DNA (Homo sapiens)
tttttttgaagttgtgtttttttttagaatattttggaaggaggtttgtgtggattttaaggaaattttttttttaagttgtgtttttttagtattagagtatttggggagtttttttattttttgtagggtgggttgggttttgtgggtttgtgttatttttagattataggtaggtatagttttaaaggtaaaggggtgtaggattaggttatattttggtataggagataatgtttatattatagtttgtgatattaatgattatttattttatagtgggttttaggtattatgtttttatagtaattttaggttttttattttagttttattttttgtgatttttaatgggaaattagtaggagagagaataaattttggttttttattaaagaggattataattaagggaattaaattgtatttatttaaggttgtttttttttagttttgaggggagaggtaattttataaattagtttaagaatttagagattgagttaggtttgttgaagttagagttttattttttttattgtagaaggtttgggtttgtatatttaagatgttttttgttatttttaatttagaggatatttttttttgggtttttttaaatttttttaatttttttttaagtagttagtttagttttgggttttaagatttatttatgtttaaagtagtaattttggttagaaaaaaatgaaagaagggaattttttgtgtgaaataatggattatagatatagttatttttttgttattgttattattttaaaatgaatttttaattgaaaatagttattggattatagatagtttggtgtagagatggttggttaggttgtatttttagatgtttgggttagtaaattttaaagtatttatttagtagttttatatttttttaagaaagtttagttttttttttttttttagttttgggatttaggggttagagatgagggtggttatttttattttgtgttgatgttaggtatttttttttatgaggattttaggtattgagttaagtaaattaaataaaattatttgagtttatttatggtttgtgggtttttttggttagtttgatttttgtgagtatttttaaaataagatttttattagggaagatgattttagtgttttaaaatttttttttgtttttagagttatggttttaattaatagtattattgagtggttttttttggtagatagtggtgttgtaggtttgttgaggtttggtgaggaatgagttaagtagattttgtttgtgttaattttgttagtgtagaagttgtattttagggtagagtgattataaaatgagtttttaggttatgagtattttttagtagaatttgggggtgttaaggttgttagatatagtaggtatgtttgtttgattttatgttggataggtagggtttatggttattttagtttgttgtggggaaggttgtagagaattttagttgtagttggtttttgagaggttaggtagtattttggtattgtagatttattgtttttttaggtatttagtgtgagtgttagttttgaaaataattagttgtggttttaatttattataagttttgagtagtttgagtttgtgttatgagatgggttgagttttgtattttggtttggtggagtttgtagatatgattagttttttgttgtagtgtggttgtaagatgttttttttatggttttgggtagtgtatttgttgtttgatagtgagtagtaaagttttgagataggattgttattaagtgtttatggtgtagggttttttgggggtatttattttgttttttgttaatggtaaggtgaggtagggatttattatgttagattttgttttttttgatttgattttgtgtttgattttgtttaattatataaaaatatttttttttattagtagtttaggttaaggaaagtatagatattttttattatttaaatattgttaatttttggaaatattttggagagtaaatttttagatattagggttttatttttttatgtgaattgggaaaaaataataatatatttttaggttaataaaaataatttttaattaattttttaaatattttttaagatatttttaaatatttatatagtaatgtgttaaggatgtttgtataatgtaaatatttaggatttttgttttttgatgagtttatattggatgaatttttggatggggatgtttatatgtagtatttaatattattgaatggagttagattagaattatgttttttttttatattgtaagggatgtgtataaaatgttaattgtataaatgaggtaataggtaaaagatagaagttaggttatatttagtttgggaggggtaatattggagttagaaatggttagattttaaggaaagggagggtggggaggagagtgatattgaggagttgttttgaataatttggtaggatttttatgggtagagagtt

SEQ ID NO: 2628 - DNA, 2495 bp, Artificial Sequence
  chemically treated genomic DNA (Homo sapiens)
ggttttgttgggtattaattagttgtttgtgtgtggttttgttttttgttattttgttttgatgttttttttttgttgatattattttgttttgatttttgtgtgttttaagtgaattttgaaatttggtagtgttagttatttgattttattttttttaaaattgttttggtttttttaggttatttgtatttttttatgaattttagaatttatttgttatgtaaaaaaaaaaaatttgttagaattttgattgggattgttaaaattatttttaaaaattattgaagttgattttgaaatgtagtatgtaagggtttgggtgtgtaatttgtatgtgagttttagtgtataaaagaaagtgagagttagtaagttgggttagaggggataaaggagagagtggtggtgtatgtgtttaggtttttgttggtttttgagagtttttttttttttagagtgattatagggtgggtaggaggttttttaggatttttggagggtgtgtttttttattaataatgataaagggtgtgatgtagattttttaattttattatatgtgaaaagagtgtttattgttgaaaggattaaataagataagatgttgagtagttgagttgtaaatgtttgtggattgaagtttaaagttagtttatatagatttatttatttgtttattttttgttgtggttttttgtgttttagttattattattgttttatggtgtatggttgatgtgttgttttgtaaagggttaggtgttattttttagtatgtattattttttattggttttgtttttggggtttatgatatatattatttggttatttttattttggagtattataggttaaattagttagtaatttgtggaattaatttatgagtggtgtttatttttggataatggtttagtggaggggttggtttgtagtttatatttattatggttttgttgaatggtgtttgttagattttgtataattgaatttagtttagttttatgaaggttttgtataagttagttttttttttttgttatttgatggaataatagatttataggagaatttatttgtaattttaagttttgagttaaagatgttttaagggatgaatgtgggtgatttgtggaatattgtgatgtatttatgagatagattgtatgtttattgtggtgtttaaagaaattagattgggttgtattagaggtggtgttgtaatttggttgttttttgggaaagaatgtaagtttttagtgtgtgaagtatgaggggttgtagaggaaattgttttggtggttttggttttgggagtaagtatttgttttttgtttatttaagtatattagtgagttttataaatatttaagtggtttatgagatgttttatttttaggttttgttttattttttttgttgttatatagaggttattagaaattatggttttttgggtttgatagttaggtagataggattaggttaggttgtagttgttaatttttgtgttggtaatttttagattttttgtataatgttattgtttagttatttttttttgggttgtttgtttttatggggtttttgtaattaaaaaaaataataatttatttttattttttttttttaatatgttttattaataattgtgtaaatttgtttattttttaggattttattatgatgtaaagtagataaaataattaatttgttttttttttttttggtatatgggtgttttgtagtttttattttttttaatttttgttttatgtttatgagtatgaagttgaattaatttatgttttgttgaagttggattgtgagattgtgtaggtagatgtggttttttttttgagtttgtaaagtagtagaatttatgataatgggttttgtagtaatagggattgattgtgttatgttgtttttgtttatttttatagtgtttaggagtttgtatgttattattgggattattttatagaaaatagaggtttttaggggtaatgtaatttgttttaggataggtagttataaggtagagaaaggagggttggatttgtatttgtgaaattatagttttggggtatggtttttgagatttatagttggggttgaagatttttaggggggttttgttgggtttattgttttttagagtggtttagtttggttgtagggtgttgtttttagtttggtgtattgtggttggaggaggtggaggatggaaagtaagatttaaagatagggagtgtaaggggatagtgatatttgaggattttgaggaggaagtaggagaattatttggaatggttagtttgggttgagtttgggttaatatttgggttgagtttagtttatagagtggtttttgggtttttgtatttgtaggaggttagagttgtttttatttttaaatgttagatgaggtgttagtatttggataggagatgttttgtagttagtttatagatatgagggtgttg

SEQ ID NO: 2629 - DNA, 2495 bp, Artificial Sequence
  chemically treated genomic DNA (Homo sapiens)
tgatatttttatgtttgtgagttgattgtaggatgttttttgtttaggtgttggtattttatttaatatttgaaggtaaaagtagttttggttttttgtaggtgtaaggatttgggagttgttttgtgggttgggtttaatttaggtgttggtttaggtttggtttaggttggttattttggatgatttttttattttttttttggagtttttaagtattattgtttttttgtattttttgtttttgaattttattttttattttttattttttttggttgtagtgtattaagttggaagtagtattttgtagttgggttggattattttggagagtagtgagtttagtagagtttttttagggatttttagttttagttatgagttttagaagttatgttttagggttgtggttttataggtgtaggtttaatttttttttttttgttttgtggttgtttgttttggggtaggttatgttgtttttgggagtttttgttttttgtaaaatggttttagtaatggtatgtaaatttttgagtgttgtaaggatggatagagatagtatggtgtagttagtttttgttattatggaatttattgttatgaattttgttgttttgtaggtttagaagaaaagttatgtttgtttatataattttataatttggttttagtaaagtatgagttaatttaattttatatttgtgaatgtgaagtgggggttggaaggaatgaaggttgtaggatatttatgtattaagaaaaagaaagataaattggttgttttatttattttatattatgatggagttttaaaaagtaaataaatttatatagttattaataagatatattaaaagaaaggagtgagaataagttgttgttttttttaattgtaggggttttatgaaggtaggtagtttagggaggaatgattggatggtgatattgtgtagggggtttggaagttgttagtgtaggggttagtagttgtagtttggtttggttttgtttgtttggttgttaaatttagaagattgtggtttttggtggtttttgtgtgatagtggaggaggtggggtgaggtttggaagtgaagtattttgtgagttatttaagtgtttatgaagtttgttaatgtgtttaaatgaatgagaagtaggtatttgtttttaggattagagttattaaagtaattttttttgtagttttttatattttgtatattggaagtttgtatttttttttagaggatagttggattatagtattgtttttaatgtaatttgatttggtttttttgagtgttgtggtgaatgtgtaatttattttataaatgtattgtagtgttttataaattatttatgtttattttttgagatgtttttaatttggggtttagagttgtaaatgaatttttttatggatttattattttattaaatagtggagagaggggattagtttgtgtagagtttttatagagttgggttaaatttgattatgtaaagtttaatgagtattatttagtaaaattatggtgggtgtgagttgtaggttagtttttttattgggttattatttaggggtaaatattatttgtgggttagttttatgagttattggttgatttgatttgtgatattttaaggtggaagtaattaaataatatgtattatgagttttaagaatgaagttagtggagagtggtatatgttagagggtaatgtttggttttttgtaggatagtatgttagttatgtgttatgggatgatggtggtggttgggatataggaggttatggtaggaaatgggtaggtgggtgggtttatgtaagttggttttagattttaatttataagtatttgtagtttaattatttagtgttttattttatttaatttttttagtaataaatattttttttatatgtagtaaggttaaggagtttatattatattttttattattattaataaagggatatattttttagggattttagggaattttttatttattttgtggttattttagggaaaggaaagtttttagggattgatgggagtttgggtatatgtgttattatttttttttttattttttttagtttggtttgttggtttttatttttttttgtgtattagaatttatgtataagttgtatatttaaatttttgtatgttgtattttagagttaattttagtgatttttgagagtgattttgataattttagttaaaattttagtaggttttttttttttatatgataagtggattttaaaatttataggaaaatgtaaatgatttagaagagttaaagtaattttggaaggagtaaagttgaatggttgatgttattagattttaagatttatttgaaatgtataggaattaagatagggtggtgttgatagaaggaaggtgttagagtagggtgataggaggtagggttatatatagatggttgattgatatttgataaaatt

SEQ ID NO: 2630 - DNA, 2500 bp, Artificial Sequence
  chemically treated genomic DNA (Homo sapiens)
ttgttgtgtttgtgatattttgtttggatagtggtagtaggttttttattggtttttagtttttattgatattgatttttattatagaagttagagtatgttttgaaattgtttaggtttttttttatagttttgtttagagtaatagtttttttagatttatagagttttattttattttttttatttttattttttattgtttgtttttttttaggttttttagttttattggtttttttgtaggtttttaagtataataggtttgagggttattgtgttgattgttttttttgtttggaattggtatggttggtttttttattttttttaagtatttgtttaatgttatttttttagtgaggtttattttgattattttatttgtaattgtaatttttttatttttataattttttattttttttatttttttttgtttttttatgttatttattattttttaatatatttattatggtgtatagtattaattgaataaaatttagtaggggagataggtaataaataagaaaataaaagtatgagtataggaaagtttattttagtagtgagtgttttgatggaaataatattttagggatgggatagagattgtagggtaggttgttttataatggttttagaggagattattgagtagagatttaaatttgtgtttagaggtgttttgaggagtggagttgtggttgggggtgggaaggaaggttattttaggttgtaggaattgtaagggtaaaggttttgaggtgggagttaggtttatgggtagatgtttgaggatatttttggtttttagggttttttagaagttttagttttttgggtttggttgtgtatttttgtgatttttattgtaggtttttttttttatttattagtgtagagtttgggggttgttggtgggttttaggttagggaagtagaaatgggtaatttttagaggtagaaattagttgattttggtggtttggtgggtggttaataaagtttggttggtttttgtgggttgtgtaggagtttattttagggaggtatttagagatatttttggtttggttttgttgggaaagtgggttgagtagggagagggggattagagaggaagagatggatagagttttttggatggtgggttgggtttgaggtttgtggattgtttgaggggggtttttgggtttgaggttgtttgtattgattagtgttgtggtttgggtagtttattgtttttttgggttttagttttttgttttggtagattttgaggtggttttggagattttgggtttggtgaatattgggtggggaggggtgttaattttagttttttgggtggggttttttggtttttgtggttatgttgtagtttaggtggaggtgtgggattttgagttgggattgtttttttgggttttggtgtgattggtggtgggaggtgagagtgggtttggtgggttttgggaggaggtggttttagggaaggtgtggttgtggggaagtggtggtgaatagttttgatgtgaggatggggaaattaaggtggtagttagggagattttgattgaggtgatttttgtttagggtgataattgggttggggttttttgtagtggttattggtttggtggttttgtatttttagtttgttttttttttaataaaagaatttaggaagatggtggggtgggtgggaggtttggtgtgtggtggtttggtttttttattggtggagaggagggagtgtttttttttagatgtgggggaggggaggggttatggttttatgggttgtttattttttttttgtgttttagtgttgggtttaggatttttagtgaggttatttttttggtaaatatttgtgattttttttttttttttgggttttttttattggaatggtgtttttttttatttaggggtttggtttgtttttttttataatttttagtattattggtttttatgttattttttattttattaattatttttttattaatttattagtatttattttgtttgtttatagtgtgtttttttttgtgggaatgtaggttttaggagggtgggagattttgatttgtttattgatgtatttttattaatttaatagattttttttgagggtttttttgagttttgtatggtgttgggtattggggtttttttgggaatttagttgagttttattttagatattttggggttgggaatagtgttgtaaatatatatgatattgttgtgggatgaaggaaataaattagaaatgggggggtttattggttaggtgattttaggttaggttattttggtggttagggttattttagatgatatggtgattatggaaggttttttagattaggtgattttagttaaagttaggaagtgttagaagggaaaagttaggaattatgagggtatgtgtagttttgatttggatttaggtagggagttggggtttgaagagtaaagg

SEQ ID NO: 2631 - DNA, 2500 bp, Artificial Sequence
  chemically treated genomic DNA (Homo sapiens)
tttttattttttagattttagttttttgtttgagtttaggttagagttatatatgtttttatggtttttagttttttttttttagtattttttggttttaattgaagttatttaatttgggaggttttttatgattattatattatttaaggtggttttgattattaaggtggtttgatttaaggttatttgattagtagatttttttatttttggtttgttttttttattttatgatgatgttatatgtgtttatagtattgtttttagttttagaatgtttagggtggggtttagttaagtttttaggagaattttaatatttagtattgtgtagggtttagagaggtttttaggagggatttgttgaattaatggggatatattagtggataaattgaagttttttgtttttttggagtttatatttttatagggggaaatatattgtaggtaaataaaataaatattaataaattaatgaaagaataattagtgaaataagagataatataaggattggtaatgttaagggttatggagaaaaataagttaggtttttggatggggagagatgttattttagtagggggggtttaggaagggggaagagattatagatgtttgttagaggagtggttttattgggggttttgggtttagtattggggtatagggagggggtgggtagtttgtggggttatgatttttttttttttttgtgtttggggaagggtgtttttttttttttattagtaggggggttaggttattgtatattgggttttttgtttgttttattgtttttttggatttttttgttggaggagaggtgggttgggggtgtgggattgttgggttagtggttattgtggggagttttaatttggttgttgttttaaatagaggttattttggttagggtttttttggttgttgttttggtttttttgtttttgtgttggggttgtttgttgttatttttttgtggttatattttttttggggttatttttttttggagtttgttgggtttatttttattttttgttgttgattgtattgaagtttaagagggtgattttagtttgagattttgtgtttttgtttgggttgtaatgtggttgtgggagttgggagattttgtttgggaggttggagttaatgtttttttttgtttagtatttgttaggtttgggatttttgaggttgttttgaggtttgttagggtgggaaattgaggtttgagagggtggtgaattgtttgagttatagtattggttggtgtgggtggttttgaatttagaggttttttttggatggtttgtgggttttggatttagtttattgtttggaaaattttgtttatttttttttttttggtttttttttttttgtttggtttatttttttggtagagttaaattagggatgtttttgggtatttttttagggtgggtttttatatagtttgtgagggttagttaagttttgttggttatttattgggttattggggttggttgatttttgtttttggaaattatttatttttgtttttttggtttgaaatttattggtagtttttaggttttgtattagtgggtggaggaggaggtttgtggtgaaggttgtaggaatgtataattaaatttaagagattggaatttttggaaggttttggaagttggaggtgtttttaaatatttgtttatgaatttggtttttgttttagagtttttgtttttgtagtttttgtagtttagaatggtttttttttttatttttaattgtagttttattttttaggatgtttttggatatagatttgagtttttgtttagtggttttttttgggattattgtaaagtaatttgttttgtagtttttgttttatttttggggtgttatttttattagagtatttattgttagagtaaatttttttatgtttatgtttttatttttttgtttattgtttgttttttttattaaattttatttagttaatattgtatattataataaatgtgttagaagataataagtggtatggaaaaatagaggagggtaagggagatgggaaattgtgggagtagggaggttgtaattgtaaatagagtggttagggtaggttttattgagaaagtaatattggataaatatttgaaggaaatgagggagttagttatgttaattttaggtagagggaatagttagtgtagtggtttttaggtttgttgtgtttgaggatttgtaagaaggttagtgaggttgggaggtttggggaggggtagatagtaggaggtgggggtagaaggggtgggatggggttttgtaaatttgggagggttgttattttagatagggttgtgaggagggatttgagtgattttaaggtatattttggtttttgtggtgagaattaatgttagtggaggttggagattagtgaggagtttgttgttattatttaggtgagatgttataaatgtggtaa

SEQ ID NO: 2632 - DNA, 2433 bp, Artificial Sequence
  chemically treated genomic DNA (Homo sapiens)
atttttagtttagaagggttttgattttagaattgggatgtaagggtggggagtttgagtttttattagtattttgtttttgtatattttttgtttgttttttagttgttataattttgttttgtagtaggtttttttattaatattggatttttgatggggaaggggttagtttggtggttttagaggttattgggttagaatatgtgttttggattttatgtgtgtggaaaatgaatttgtatttgtgatgtggttggtgggggtggatggtagtgagggttggatagtgaatttttattttgtggaggagttggggttggagtttgtatgtgggtttgtgatggttttgttttttgggggtgtttttttagggattttagttttggttggtgggttttgtaggtttgggtttgattgtgtttgttaggttgtttggaggttttggtgagtttggtggaggtggtggtttttttttgtttgatggttatgtttgtgtggattggttgttttttgatggtggggtggggtgggatgggttggggtagagtttgtggttaggtgaggtgttttgttttttggtggttttaggtgtggttgtgggattttggattgtggtggggttggggttagggttggggttggggttggggtgttatggttgagttttagttgaattgtttggatgaggtgtatgtgaatgagaaggtgattgaggtgtaggttgttttttattattgtgagtggtggtgggttgtgttggaggtgttgttgggtggtggtgagtaggtttattgtgagtggtttaaggaggagtagttgtgggattttttttttagtttggagtgttaggttttgtgggttgtttggagtttttatgaggatgttgtttttgttgttaatgtttggggtaagagtaaggttaaggttaaggtttttgtgttggtgttggttgagtttggtgagtttttggtttattggtttgattgttttgatattgaggtgttttttttggatttgggttggatggatattggtttttattgtggtgtgagttgggttatgttttttatttatttgtttaaggatgagaaggtgttgtattttaagtaggtggttaggtagatgatttaataggtttagaaggtaggtttttgtttttgtttttatattgttgggattttggttttagttttttggattgggttttattttttaggtagggtttggggtaggttgttttgagtattttttggaaaatgggttttaatttgtttttattttttggggttgtagtgaggtttgtagagtgaatggttgggaatgtgtttggtaaattataaggtgttggatagatgttagttgttggtattttagtgtttagaggtattggttttgttttgtatttttgaaatttttttgtttagtttttttttttagggaagattgggggttgaggttttgtggttaaaatgtattatttaaaggttttgatgataatttatgtgttgtttagaatatattttgagttgtttttttatgtgattgttaaaataattttagggagtgggtggtggtgatttttttggttttatttttgttatgttgttttttggattatttttttttttttatagttaaagttgagttggtgtttttatagttatagttttttttgggttgggtattaggttttagttgtttggaatgaatgggggatggggtatattgaggatttattgtgtgtttggttttgtgttgggtgttttggtatagtaggttatttgatttggtagtttaggaaagggtttttatttagtatatgtgttttgtttgagagttggaaggaggggttgtttttagggtggttggtgaggttagtttattgtggaataggtggaagattttaatttttatgtttttgggtgggagttttgggtagtttttagattaaatgtaggatgttttattatatttgaatttttaataaataatatataattttttagtattagtttattttaaatatgatatgagatgtattgatattgaaaaattttttgttgtgtatttgaaatttaaattgaatgggaatgttttgtatttttatttgttaattttggttgttttatattgagatttgttaagaaatagtagtagtttttggtgtttaatttagaataatataataggagtggtttgggtttattatttaaattttatttagtgagtgaggttggagttttggttttttttgaggttgaagaggtttgaggagggaaaatagagttagaaagattagtgtttaggtttatttttttggaaggggtgatttaggtagttggggtgatttagatagttggttatattggttattagaaggaagggttaattttttattgtgtatatttttattttttttttttataattt

SEQ ID NO: 2633 - DNA, 2433 bp, Artificial Sequence
  chemically treated genomic DNA (Homo sapiens)
gaattatagagagggagggtagaaatgtgtgtagtggaaagttaatttttttttttggtagttaatgtagttaattatttagattattttaattatttaaattattttttttaggaagatgagtttgagtattggtttttttagttttattttttttttttaggtttttttagttttgaggggaattaggattttaattttatttattgagtggaatttgagtggtgaatttaagttatttttgttgtattattttgaattgggtattaaaagttgttgttgttttttaataaattttagtgtagggtagttagagttagtaaataaaagtataaaatgtttttatttaatttgaattttagatatataatgaagaattttttagtattagtatgttttatgttatgtttgggataagttgatattaaaaagttatgtgttgtttattgaaagtttaaatgtagtggggtattttatatttgatttggaagttgtttaggatttttatttaaaggtataaagattaaagttttttatttgttttatagtggattggttttattagttattttggaaatagtttttttttttaatttttaagtaggatatatatgttaagtaggagtttttttttgagttgttgagttaggtgatttgttgtgttaaggtgtttagtatagggttaggtatatagtaggtttttaatatattttgttttttatttattttaggtagttggggtttagtatttggtttaggagaggttgtgattgtgagggtgttagtttagttttgattatgggaggagaggggtggtttaaggagtagtatggtagaggtgggattgggaaggttattgttatttattttttgaagttgttttgatgattatatgagaaagtggtttgggatatgttttgggtagtatgtaggttattattaagatttttgagtggtgtattttaattatagggttttggtttttagttttttttggggaggaaggttggatagggaagttttagaagtatagagtagagttagtgtttttgaatgttggaatattgatggttgatatttgtttagtattttgtaatttgttaaatatgtttttagttatttgttttataggttttattgtagttttaggaagtaggggtgggttggggtttattttttagagggtgtttagggtggtttgttttgggttttgtttgggaggtggggtttggtttaggggattggggttgaggttttagtggtgtgggggtgaaggtgggggtttattttttgggtttgttggattatttgtttgattatttgtttgaggtgtggtgtttttttgtttttgggtgggtgggtgaagagtgtgatttggtttatgttgtggtagaaattagtgtttgtttagtttaggtttagaggaggtattttggtgttggaatggttgggttagtaggttagggatttgttggatttagttggtgttggtgtgggggttttggttttggttttgtttttgttttgggtgttggtggtggggatggtgtttttgtaggggttttaggtggtttgtagggtttggtgttttgggttggagaggaagttttgtagttgtttttttttgagttgtttgtggtaggtttgtttgttgttgtttagtagtgtttttagtgtggtttgttgttgtttgtagtagtagaaggtggtttgtgttttggttatttttttgtttatgtgtgttttgtttaggtagtttagttgggatttggttatggtgttttggttttggttttggttttggttttggttttgttgtggtttgaggttttatagttgtatttggagttgttgaggggtggggtgttttatttggttgtgagttttgttttggtttgttttgttttgttttgttgttggggagtggttaatttgtgtgggtgtggttgttgggtggggaggggttgttgtttttgttgggtttgttgggatttttgggtggtttggtggatgtggttgggtttgggtttgtagggtttattagttggggttagagtttttgaggggatgtttttagggggtggggttgttgtagatttatgtgtgggttttggttttgatttttttgtggggtaaaggtttgttgtttggtttttgttgttatttgtttttgttggttgtgttgtgggtatgagtttattttttgtgtatgtggagtttggagtatgtgttttggtttagtggtttttggggttgttgagttgattttttttttgttgagggtttggtgttggtgggggggtttgttgtaggatgggattgtgatggttgaggagtgggtagggggtgtgtaaaagtgaaatgttaatgagagtttgagttttttatttttgtgttttagttttgagattagagtttttttgggttgggagt

SEQ ID NO: 2634 - DNA, 2339 bp, Artificial Sequence
  chemically treated genomic DNA (Homo sapiens)
ataggtgaataaaaaaattaaatagtgtggggaaaaaatagatttgtatataaatttttatagtagtgttatttataatttttaaagtataaatagtttaagtgtttgtatgttgatgaatggataagtaaattgtggaagttttatgtaatgtagtgttgtttagttatggggagatgtgaagttttgatatttgatatagttaatgtgttgtaaattattgtattaggtgtgggaagttaggtataagaggattggtatggtatgattttatttataggaaatgtttagaatgggtagttttatatatttaaagttaattagtgttgttaggggttgggggaagaggaaggaggagggattgttgatgggaatgggtgttttttggaggtgattgaaagattttaaaattgattgtgatgatggttatatagttttgagaatgtattaaaaattagtgaattgtgtgttttagatgggtgaatttttttgtgttaatgatattttagtaaggttggaaggatatagatttggttagtgaggagggtttgggttttgttaaagtgggtagagtttgtggggtttattggtttagttttagtttttttgtgtagttttggggtttggttttttttgttgtattttataagttgttttttttttttagttggggttttaggtttgtttttttttgggttgagtattatttttgttagaggaaggttaaagtatttggattttaatattttaaggatttttgtaggttttttttgggatttattttttagtgagtgttgttgtgtgtatttttgggtttgagggttgggtattttttaggtatgtaaggggttttttgtgtagggttgtgagtaatgtgggggtagttggttgtagtttttagttttggggtttgttggtatttttattagtttttagtttgggtattttatttaaggaatttggtttttagagtttggggtattgattaatatttatataggtagtagagagttgttgaattttgaatgtgaggtagggaagaaagttgaagtatttgttatttataaattaaaatgaatttattttttttttaaggatagttgttgtaataggttgtagttaataggttttatggtgtgatttttgtgtaggaagttattgtttatattgggtgtggaagtatttgtaatttttaggggatttgttgttttatagaatttgatggaaagtttgaggaaggttgagttttgggggttataggttggatgttggagttgttttatgggtggtgtttgagggagttttgggaggagttgttagtttaggtagtgggtggagatgggttttgttttttgtttttattagttttgtttagtttttgggttatttattatagttttgttagagtaggtagatgtgtagatgttaaggtagatgtgtagatgttaagttgtatttgtttattaaatttatgtttttgttataatgtagttgttgagtaaatgttttttatggattaaaaatataagtagagatggttgggtgtggtggtttatgtttgtaattttagtattttgggaggttgaggtgggtgggttatgaggttaggagattgagattattttggttaatatggtgaaattttgtttttattaaaaatattaaaaaattagttaggtgtggtgggggtgtttgtagttttagttatttgggaggttgaggtaggagaatggtgtgaatttgggaggtggaggttgtagtgagttaagattatattattgtattttagtttgggtgatggagtgagattttgttttaaaaaaaaaaaaaaaaaaaaaaaaatatatatatatatatatatatatatatgtagagatatgaatgttgatttttatgatgtttatttatttatgaaattaatggtttatttgttagaaatttagtttttgggttgatattaaatttaattgttggttttttttgttgaatggaggggttgggagaagttgtttttagttggtagttttagatttgtgtttatttggtaggtttttatttaggtggggataggttattaggtgggagttattggggtattgttggggtttaggatatttgtaggatgagtgaaggaggaggagagggaggaagatagagaggattattttggttattttgattttgttttttggttatgtttgggtttttagaggtaggagttggggggttgtagggttgggggttataatgattttttagttgttgttattttttttggtaatgaattttaaagtttttatttttttattgtgggtgttagatataggtttggtgtaggt

SEQ ID NO: 2635 - DNA, 2339 bp, Artificial Sequence
  chemically treated genomic DNA (Homo sapiens)
atttgtattaggtttgtgtttggtatttgtggtggggaggtgggggttttggggtttattgttagggagggtgatagtagttggagagttgttgtggtttttagttttgtagttttttagtttttgtttttgagaatttaggtatggttaggaggtaaggttagagtggttgaggtggttttttttgttttttttttttttttttttttttatttattttgtaagtgttttgagttttagtagtgttttagtgatttttgtttggtggtttgtttttatttgggtgggggtttgttaggtagatataggtttgaggttgttagttggaggtggttttttttagtttttttatttagtaggaaaagttaatagttgggtttggtgttaatttagggattgaatttttggtaggtaagttattggttttatgaataaataagtattataagaattggtatttatgtttttatatatatatatatatatatatatatatatttttttttttttttttttttttttgaggtggagttttgttttgttgtttaggttggagtgtagtggtgtgattttggtttattgtaatttttgttttttgggtttatgttatttttttgttttagttttttgagtagttgggattataggtgtttttattatgtttggttaattttttggtatttttagtagagatggggttttattgtgttagttaggatggttttgattttttgattttgtgatttgtttgttttggttttttaaagtgttgggattataggtgtgagttattgtgtttggttatttttgtttatatttttaatttatggagagtatttatttgataattatgttgtagtgaggatgtgagtttagtgagtaagtgtggtttggtatttgtatgtttgttttggtatttgtatgtttgtttgttttggtggggttgtggtgggtgatttgggagttgggtggagttggtgaaggtagaaggtagagtttgtttttatttattgtttgggttgatggttttttttagggtttttttgggtattatttatggagtagttttggtatttggtttgtgatttttgaagtttggttttttttgagttttttgttgggttttgtggagtagtaggttttttgggggttataaatgtttttatatttggtgtgagtagtggttttttgtgtagaaattatattatgggatttgttggttgtggtttattatagtggttgtttttagaggaagagtaaatttattttgatttatagatagtagatgttttaatttttttttttgttttgtgtttagggtttagtagttttttgttgtttgtgtgaatattaattagtgttttggattttgggagttgggttttttgggtggggtgtttaggttgggggttggtggggatgttagtaggttttggggttggagattgtggttggttgtttttatgttgtttatagttttgtatggagagttttttgtatatttgggagatgtttagtttttaggtttaggggtgtgtatggtagtgtttattgagaagtggattttggaagaggtttgtaagggtttttggggtgttggggtttaggtgttttgatttttttttggtaaaggtgatgtttagtttagagaggagtaggtttggggttttggttggggagagggggtagtttgtggggtgtggtagaagaagttaggttttagggttgtatagagaggttggggttgagttaatggattttatagattttgtttattttagtaaggtttaggttttttttgttgattaggtttgtgtttttttagttttattgagatattattggtatgagaaaatttatttatttaaggtatataatttattggtttttagtatatttttagagttgtgtaattattattatagttaattttggaattttttaattatttttaaaggatatttgtttttattagtagtttttttttttttttttttttttagtttttggtaatattgattggttttgagtgtgtggagttgtttgttttggatattttttgtgagtggaattatattgtattggtttttttgtatttgattttttatatttggtgtaatggtttatagtgtgttggttgtattaggtgttagagttttatgtttttttgtggttgaatgatattgtgttgtatggggtttttatagtttgtttgtttatttattagtgtatgagtatttgggttgtttatattttggggattgtgaatagtgttgttgtgaagatttatgtataagtttgttttttttttatattgtttaatttttttatttatttgt

SEQ ID NO: 2636 - DNA, 2444 bp, Artificial Sequence
  chemically treated genomic DNA (Homo sapiens)
atttttatttgaaaaagttttgattagtttatttttttgaattaattagaagatataaagtagagtttatttttttggaaatgggttttttatttttttttttttttttttttttttagtttggaaattttttttttttatttttgtttgttttaggttttattggttatgattgttttttattgttgggttttagtttttttttttttttataaattttttttttttttagatgaaaagattaatattgaaaaggtaagttgatgtgttttggtttgtatagagttttggaagtagagttgggatttgaattttgggtttttgattttttgtttagggttttttattttggtagagtaggagattaattttttttttttttttttttttaaatgaagtttttatatatagttatttatatatgtataagtagtttttaaggttagagaagttaattttaaattttagagttgtggaggttttatagattatatggagttttagttagtgattaaatttgaggtaatagtatttggaggtttagttttagtattgaggggagttggagggaaaaattaagttaagagtaaaatttttttgttttgaaaataatagtggtataatataatatttttggattgtgggaaataaaatggagagggatatgattagaaggaaatttttagaattttattaattttatgttttttaaattggtataattggtgataattttagagttatttgttattgtattaaagtttgatagagaaggatgatttataggagtagttttgttgtgtttgaggattgtttgatatttgaaatgagttttggattagtttttggttgaagtttatttaggttttttttgtgaaggttaagttattagagttaattattatttttgttttattttgtttaaatattgttgttggggttgataattgtatttagtgaatatttgtattggaatttggagtatttatttttttttatttgtagtttgaggaattttgattttttggtgatttttagaagtttttggatgtagttgtttgtgaggtggatttgtttgttgttggttttggggttggatgatatgtttggagttttagggaggttgtgaggagtttgttttttggttaggaagtgattgttgtttgtgttgtggtttttaaggataatttttgggtggtaattatttttttttatttaggagattaatttttttgttgaggttttatttaaggttgtagtatttatttattgaggtttttaagaaatttgtttgttttaggaaattttttattgagatttgttttgtattgttatttggtggtaagatataaaaatatattttttatggtgggattagattgtgtgtttgttttgtttttattttgttttttttttggtggtggggtagagggatggtggaaagggaattaagagttagtttttagaagtgtaggtatttgggattgagattggagtggggttatatttttttttttgtttttagtattagttatagttttgttattgtgtttttagttttttttttttttgtagatattggttatttgtgaaattaattgtattttttttttgtattgttttttaggatatttggaattagtgtatagtttattgttagtaattggatagaattgtatggtaggaatttagaagaggagtttaatttttgagtttatatttttttttttgggttttatttttttattttattttatatttagttttttgatgatgtttaggatatttttttagttattttaatttttttttttgtaagggataggagggataaagtaaggttatatatttagaaagagtttgtttattttttgtaagttttagtttttttttttataaagtgggtataagaatttttgttttggagggttttgtgtgtgttttaggagatgttggattaatattagtgtttattttattttttatttttttattttttaggttttttgttagttatgtgatgtaggttaggatgtaaaggagattaatagtatagattattttttttttagtgttatttgtgttttgtaggtttagtgggtgtttttattagagttttgtattttgagtttagtttttatttgttttttggaagatgttggttttagaattttttgttttttttttgtaggtattgtggtatttatagttgatttgtagagagtttagatgtattttataaataaggaatgtattgttttgtaggatggttgtggtgtggttgtgtgggggtgggtaggttggagtagataggaattatgagaggtagggaggattgtataggggttgttgattaggtggaagatgatgggagttttagaaggtgttgtgggatagggttagggagagggttttatgtggttaggatttggatgtagattgtt

SEQ ID NO: 2637 - DNA, 2444 bp, Artificial Sequence
  chemically treated genomic DNA (Homo sapiens)
aataatttgtatttagattttggttgtatagagttttttttttgattttgttttatgatattttttgaggtttttattattttttatttggttagtaatttttgtatagttttttttgttttttgtggtttttgtttattttagtttgtttatttttatatagttatgttatagttgttttgtagaatagtatattttttatttatgagatgtatttgggttttttgtaaattagttgtgaatgttataatgtttgtaggagggaggtagagaattttggagttaatattttttagaaggtaggtagggattgggtttagggtataaggttttagtaggggtatttattgggtttgtagagtataaatggtattggggaaaaagtgatttgtgttgttgattttttttgtattttagtttgtattatataattggtagagagtttggaggatggggaggtgggaaatagggtggatattaatattaatttagtattttttgaaatatatataaaattttttaaggtagggatttttgtgtttattttataggggaggaaattgagatttgtagaaggtaggtaagttttttttgaatgtataattttgttttgttttttttgttttttataaagaggagagttaaggtggttggaaggatgttttgaatattattagaaaattaaatataaaataaggtaggaaaatgaggtttaggggaaggaatgtggatttagagattaagttttttttttaaatttttgttatgtgattttatttagttgttaatagtgaattgtatgttggttttaggtgttttggaagataatgtaaagagggaatataattagttttataagtggttaatgtttgtaaagaggaaagaaattagaggtatagtgatagagttatggttggtattgaaaatagagaaggaggtgtagttttattttaattttaattttagatatttatatttttgggaattagtttttggttttttttttattatttttttattttattattggggagagggtggggtgggggtggagtaggtgtgtaatttgattttattgtggagggtgtgtttttatattttattattaggtggtagtgtggggtaggttttagtaggaggttttttaggataggtaggttttttaggaattttagtgagtgagtgttatagttttaggtggaattttaataaagaaattgattttttgggtggaggaagatggttgttgtttaggggttgtttttaagggttgtgatgtagatagtggttattttttggttgaggggtaggttttttgtggtttttttgggattttgggtgtgttgtttagttttgaggttggtgatgggtagatttgttttatggatagttgtgtttagaggtttttggaaattattaaaggattagaattttttaggttgtaggtggagggaggtagatgttttggattttagtatagatgtttattggatatagttattaattttgatgatggtatttgaatagggtggggtaagagtggtggttgattttgatagtttagtttttgtgaaaggggtttaggtggattttagttaagaattgatttgaagtttattttaagtgttaaataatttttaagtatagtaaggttgtttttgtgggttatttttttttgttaaattttgatgtgatgataggtgattttgagattgttattagttgtattaatttgaggaatgtggaattagtagaattttagaagtttttttttaattatgtttttttttattttattttttatagtttaggagtattgtgttatgttattattatttttagaatgggaagattttatttttggtttaatttttttttttaattttttttagtgttaaggttgagtttttagatgttgttattttagatttaattattagttgaaattttatataatttgtagagtttttatagttttaaaatttggaattaatttttttggttttaagagttgtttgtatatatgtggatagttatgtataaaagttttatttaaaaaaaaagaaagagaagaaattgattttttgttttgttagaatgaagagttttggatagagaattaggagtttagaatttaaattttagttttgtttttagggttttgtgtaaattggagtatattaatttgtttttttagtgttggtttttttatttgagaaagggggagatttatggagggaggaggagattgagatttagtaatggaggatgattatggttaatgaagtttgggataggtagaagtggagagaaagaatttttaaattagaggagaaaaaaaaaaagagggggtaaagggtttatttttaggaaggtgagttttgttttgtgttttttggttggtttgggggagtaaattagttaggatttttttaaatggaaat

SEQ ID NO: 2638 - DNA, 2414 bp, Artificial Sequence
  chemically treated genomic DNA (Homo sapiens)
ttagttttattttggttatttgtaggattttgagttgtagaggattaatttagttggtgtgtagggggtgtggtttgtgttttattgtaggtattttttttgttttttttgtagtattgatgataggttggttgtgttgggtattgagaatgtattggttttgtttttgtagggtttatagattagggagggaggaagattataaataaatgaagtgagtaaggtattgtgtatgtattttattagtgtttatagagtttatgttttgagttaggtattagtttagtaaataaatattgttaatgtgttttagatatttgttttattttttagttttaatttttgttatttatgaagttttataataggtttagggggtggtttttttgtaattttattttataggagaggaaatagaggtttagagaggttaagttttttgttatgttgttaggtagtgatggagtttgtatttataattggtatgttgttttttgttggatgttaggggggtttttaggggttgaagtttatgtggtttttgttttttggagtttaggttagtggggtttggaagaagaggggtagggtttttttatttgttatagtgaattttaggtgggtgagattagggaaggttttttggaggaggtgatgtttgagttgggatttgaaggttaggaaggaattaattaggtttagagggagagagaatttattttttttatttatgttatttattttttgatattttttttaggaagttttttttgtttttttttagatggagtttttatattatagttgtattatttttgtttgtgtttgagtttttattagattgtggaatttttaaaaggtagtgtagggggttggtttttttgtgtttttagtattatttagttttgggtatgggaattagaggttgagggatggtaggttgtgtgggttgaggtgggagggtggtatagttgaggggtttgtttgttatattggttttaggtgtatagggtgagatatttaggaattttgttgtttaggagaattttaggttaatgatttgttggtttttgattagtttttgatgttgttttgtgttaggtagtgtgttaggtagatgattttttttttgattttaggagaggttggagtaagtgtgtttttagttaggatgtgtaaatggtatgtagtggaggaagttagggagtatgaattgttgggatttagttgtttgttttggaagagggtattttttttttttgtttatgttaattttatttttagtttgtatttagaattttattgttgtttattggttgggtagatagaggttgttttgtttggttgttaatatgaaatggtattttgtttgaggtgtttttttttttttgtttttttttgtttttaaatttagagtaaaggtagtatgagttatgatttattgatatggtgagggataagtatgttttgttagggaggggttttgtgtggtttgaattggggattgtagtaaatgattgtgtagtggggatttaagtttttgatggtgttagaaaaatataataataatagaaataaatattaaatttataaaagtttagtgtagaaggtttagagtttaagagtgtttatgtatgtaggttggttagttgggggattttgggtaagatatttttgaggataaagatatttttttttaattttagtttttttatttgtaaaatggataggataatatttatatttattttataggattattgtgttgataaataagtgagtattatatgtttagtatttattaaggtttagatgtaataaatggtaagttgtattgttattatttagatgtttatgaaagtttttgtgtttgttattagttaattatggtgatttgaaatgagttttggaaatttaggatggtaaggaatgggtttagtttgtgttttggtgtattattaagatttttataaatggtatgggaaaattatttttgaagatttatgattataagttagtttttaaataagtttatagggataattgatatttttagttttgtgtgtaaaaattttaggttgagaatttagatgaaaatggttttttttagattttttataaataaatgtaaatttttttggagtaattaaggtgatattttaattataggagtattttatagttgagagttattaaatatatgaggaaatagggtattatgagtaagaattagtataaattttatttagttgaattagatttatagagtttttagatagtagaattattagatgaggaatgtaaaataagtttgtttattataattaaagatataaaaaagaggagagtttaaaatatgagttgggaataagagattttaaaaatggattaggtatggtggtttatgttagtaa

SEQ ID NO: 2639 - DNA, 2414 bp, Artificial Sequence
  chemically treated genomic DNA (Homo sapiens)
ttattggtgtgagttattatgtttggtttatttttagaattttttgtttttaatttatattttgaattttttttttttttgtgtttttaattgtagtaaatagatttattttatattttttatttgataattttgttatttggggattttgtggatttgatttagttaggtgaggtttgtgttggtttttatttatggtgttttgtttttttgtgtgtttagtgatttttagttgtaagatgtttttgtggttggaatgttattttaattgttttagggggatttgtatttgtttgtgagaagtttagagaaagttatttttatttaaatttttagtttgaggtttttgtatatagaattggaagtgttaattgtttttatgaatttgtttgagggttggtttgtggttataaatttttaggggtaatttttttatgttatttatgaaagttttggtaatatattagggtataaattagatttattttttgttattttaggtttttaaggtttattttaggttattatggttagttggtgatagatatagaggtttttatgagtatttgaatgatggtagtatggtttattatttattgtatttgaattttagtgggtgttgggtatatgatatttatttatttgttagtataataattttatgaagtaggtataagtattattttgtttattttatagatgaagaaattgaagttaaaaagggatatttttatttttaaggatattttgtttaagattttttagttggttggtttgtgtatatgggtgtttttggattttgggttttttgtattgagtttttgtgggtttggtgtttatttttgttattgttatatttttttggtattattaggggtttgagtttttgttgtgtgattgtttgttgtagtttttggtttagattgtataaagtttttttttggtggagtatgtttgttttttattgtgttgatgagttgtgatttatgttatttttgttttgaatttagaggtagggaaaggtgagggaggaggaatattttgagtaaaatgttattttgtgttggtagttaggtaaggtagtttttgtttgtttaattgatagatagtggtggagttttgggtataagttaaggataaagttaatatgggtaggggggaaaaatgtttttttttagaatagatagttgggttttagtaatttatgttttttggttttttttattgtatgttatttgtatgttttggttggagatatgtttattttagttttttttggggttaaagagggggttatttgtttggtgtgttgtttgatatagagtaatattaggggttaattaggggttggtaggttattggtttaaaatttttttgagtagtagggtttttgagtgttttattttgtgtatttggagttagtgtgataaatgggttttttggttatgttgtttttttattttagtttatatagtttgttgttttttagtttttgatttttgtgtttggggttgggtggtgttggggatatagaggagttagttttttgtattgttttttgggagttttatagtttggtgggaatttgggtatagatagagatagtgtagttgtagtgtgggagttttgtttggaagagggtaaggagggttttttggagggggtgttaaagaataggtagtatgagtagaaggagtagattttttttttttttgaatttggttaatttttttttgatttttagattttggtttaaatattattttttttaggaagttttttttgattttatttatttggaatttattgtaatagatggaagggttttgtttttttttttttaggttttattagtttgagttttaggaggtagggattatatgagttttagtttttggagatttttttagtatttagtaggaggtagtatattgattatgggtgtaggttttgttattgtttaatagtatggtaaggagtttagtttttttgggtttttgtttttttttttgtaagatggggttataagagggttattttttaggtttattgtgagattttatgggtaatagaggttgaggttggaggataaggtaagtgtttgaaatatgttagtgatgtttatttattagattagtgtttggtttagagtatgggttttgtagatattggtagaatatatgtatggtgttttgtttattttatttatttatgatttttttttttttttggtttgtgggttttgtgagagtagggttggtgtatttttggtgtttagtatagttggtttgttattagtgttgtgggagggataggaggggtatttgtagtgaggtataggttatgttttttgtatgttgattgggttaattttttatggtttagggttttgtaggtgattaaggtggagttgg

SEQ ID NO: 2640 - DNA, 3544 bp, Artificial Sequence
  chemically treated genomic DNA (Homo sapiens)
tttagtaattttttttatatgtttttttattaggtttaagatgaaagtttttgttttagtgttttttttttttttttttttattttttttttttttatttatgaagattttagggttttgtgagggttggagttttttatgtatttttatattaagatagttgttaggatttgtttaataggaagtttttttttattagagtttagttttattttagggaatttattttttttttggaaaaaggaaaattgaagttagatgttttttgggattgttatttgaggtgggtgtggttattaggatgtttagagagtttagtgtggtgaggaaagtgatgaatttaggagttttggtttgggtttagttattttttattatttatttgatttttattaagttttttgatttttttaggttttagttttgatattaataagatgaattaatagttgggtatggtttgtgtttgtaattttagtattttgggaggttgatgtgggtgtatttgtttgagtttaggagttttagattagtttgggtaatatggtaaaattttattttgttaggtgtggtggtttatgtttgtaattttagtattttgggatgttaaggtgggtggattatttgaggttgtgagtttgaaattagtttggttaatatggtgaaattttattttttttaaaaatataaaaattagttgagtgtggtggtgtatatttgtaattttagttatttgggaggttgaggtaggagaattatttgaatttgggaggtggaggttataatgtgttaagattatgttattttattttagtttgggtaatatagaatgttttaaaaataataaataaataaatataagaattatttgttttgggaagtgtagttttttttagtttatttaggttaggagtaaagttagtttattaatttttgttagtgtttttttttttagaaattttttttttaataaaagatgagattttttttttttttttaaaaggatgatttgtgttttgtgttttgtttgtttgttttgtttataaaattgatgaaagttttattgtaaggtaaagttaatgttttttttttattttttaagaatttagaaatggaaatataattttgtatttagagagttaaaatagaaaataagtaatagatttaagtggagatatgtagattatataagagattggattttttaggatttagttttgttgttaaatttattaagggtattaatatatttaaggaaaaggttgggtatggtggtttgtaatttttgggaggttgaggtgggtggattatttgaggttaggagtgtaagattagtttagttaatatggtaaaattttgtttttattaataatataaaaattagttgggtgtggtggtgtatgtttgtaattttagttattttagaggttgaggtaggaggtttttttgaatttaggaggtggaggttgtagtaaattaagatggtgttattgtattttagtttgggtaataagagtgaaattttgttttaaaaaaaaaaaaaatatatttaaggaaaaaggtgggttagtttaggatgttaagtaaagggagagttgagatttataaattggaataatttgaataatgagtggattagttgaggttaggagtttaagattaatttggttaatatggtgaaattttatttattgaaaatataaaaaattagttaggtatggtggtgtgtatttgtagttttagttatttgggaggttgaggtatgagaattgtttgaatttgggaggtggaggttgtagtgaggtaagattatattattatattttagtttgggtgatagaaattttgttaaaaaaaaaaaagaagaagaagaaagaaaagaaaagaggagaattttttgatgaagtataagtgtttggtttgaatgataatagtattttgatttttttgtttatatatttattttttatgaatttgtttagtgtgtattgattttgtggagttttattatttttgggtttataaatagtaaattttggagtgtataaaagtttatagaatatgttaataaaattaaaatattgttattatgtgggtttttttataagtttaattgttagtttttaaggtatttgtgtatttgattaatatgtaaatgaatgagtagatttttttggatataatgtggagaagattttattaaaggttattttttttaagttattgataatttttaattagtttaaatttgtttgagtttattatataaaatatttaaggattttgtttatttttataatattttattttttttagtttaataaaaatatttttaggaaagttttttttaataaatttattgaaataaaattttagtagtatttgagtatttagggttgttttttttgaaagattttttttttattaatatggagtttggtgttagtttattttagagtatttaattttagttattttttgtttttggttaaaatgtaagatttaaaaattagatttttttgatgatgttttttttttttggattttttttatttttttttattttattttttttaaatttttttttttaaaattaaatttttttttttttttttttttttttttttttttttttttgagatggagttttgttttgttatttaggttgaagagtaatggtggtatttttgtttattgtaagtttttttttttgggtttaagtgatttttttgttttagttttttgagtagttgattataggtgtgtattattatgttagttaattttttttttttttgagatagttttattttgttatttaggttagagtgtaatgatataatttttgtttattgtaatttttattttttaggtttaagtaatttttttgttttagttttttaagtagttagaagtataggtatgtgttattgtgtttagttaatttttgtatttttagtagagatagggttttattatgttggttaggatggttttgattttgattttgtgatttgtttgttttagttttttgagtgttgagattataggtatgagttattttgtttggttaatagttaatttttgtatttttagtagagatggaattttgttatgttgattaggttggttttaaatttttggttttaagtgatttattagttttagttttttaaagtgttgggattataggtatgagttaatgtatttggttttttttttttttttaatttttttatattttttttttttgtgtgtaaaataagtttttttattttaaaaagaaatttgtggtttttgtggttttttttagttattttgatgtttttttttttaaattatatttagagtttttaattagttaaatttggttttaatttattatttgtattttatttttttttttttttttttttttttttttttttttttgtgtgtgtgtgttttttgagataatatttaattttgttatttaggttggagtgtagtggtgtgattttggtttagtgtaatttttgttttttaggtttaagtgtttttttgt

SEQ ID NO: 2641 - DNA, 3544 bp, Artificial Sequence
  chemically treated genomic DNA (Homo sapiens)
gtaggagaatatttgaatttgggaagtagagattgtattgagttaagattgtattattgtattttagtttgggtgatagagttagatgttgttttaaaaaatatatatatataaaaaaaaaaagaaagaaaggaaaagagaaagaaaaatgaaatataggtgatgaattggagttaggtttggttgattaaaggttttgagtgtgatttgagaaaaagaatattgagatagttggagggaattataggggttataggtttttttttaggatggagagatttgttttgtatatagaaggaagaagtgtggagaggttaaaaagagaggggaggttaggtgtattggtttatgtttataattttagtattttgggaggttaaggttggtggattatttgaggttaggagtttgaaattagtttggttaatatggtgaaattttatttttattaaaaatataaaaattagttgttggttgggtgaggtggtttatgtttgtaattttagtatttgggaggttgaggtaggtggattatgaggttgagattgagattattttggttaatatggtgaaattttgtttttattaaaaatataaaaattagttgggtgtgatggtgtatgtttgtatttttagttatttgggaggttgaggtaggagaattgtttgaatttgggaggtggaggttgtagtgagtagagattgtgttattgtattttagtttgagtgatagagtgagattgttttaaaaaaaaaaaaaattagttggtatggtggtgtgtatttgtaattagttatttgggaggttgaggtgggagaattatttgaatttagggggaggagtttgtagtgagtagagatattgttattgttttttagtttggatgatagagtgagattttgttttaaaaaaaaaaaaaaaaaaaaaagaaaaaagaaaaaaaaatttgattttaaggaaggaagtttggagagagtgaaatggaaaggagtagaaagagtttaaaagaagggagtattattaaaaaaatttgatttttgggttttgtattttggttagaagtaaaggataattgaggttaggtattttgagatggattgatattaggttttgtgttggtaggggagggattttttgaggagagtagttttaggtgtttaaatattgttagagttttattttagtgagtttattggagagaatttttttgaggatgtttttgttgggttgagggagatggggtattgtgggagtgggtaggatttttgggtgttttatgtggtgagtttagatgggtttgagttggttaaaggttattagtggtttggggaaagtgatttttggtagagttttttttatattgtatttaagagagtttgtttgtttatttatatattgattggatatataaatgttttggggattgatagttaagtttgtggaaaggtttatatggtggtagtattttagttttgttagtatattttgtaggtttttatatgttttgaagtttattgtttgtagatttagaagtgataggattttgtaggattaatatatattgaataaatttataagggatagatgtgtaaataagaaagttagaatgttgttattatttggattagatatttatgttttattaggaaatttttttttttttttttttttttttttttttttttttttttttgatagaatttttgttgtttaggttggagtgtagtggtatgattttgttttattgtaatttttattttttaggtttaagtgatttttgtgttttagttttttgagtagttgggattatagatgtatattattatgtttggttaattttttgtatttttagtaaatggggttttattatgttggttaggttagttttgaatttttgattttagttgatttatttgttatttaagttattttagtttgtgggttttaattttttttttgtttggtattttggattgatttatttttttttttagatatgttttttttttttttgaggtagagttttgtttttgttgtttaggttggagtgtaatggtattattttggtttattgtaatttttgttttttgggtttaagggaattttttgttttagtttttggaatagttgggattataggtgtgtattattatatttagttaatttttgtattattagtagagatagggttttattatgttggttaggttggttttgtatttttgattttaggtgatttatttattttggttttttaaagattatgagttattatgtttggttttttttttagatatgttaatatttttggtgagtttagtggtaaggttggattttggagagtttgattttttgtgtgatttgtatgtttttatttggatttgttgtttgttttttattttaattttttgagtgtagagttatatttttatttttgagtttttgagaagtgggaggggaatattaattttgttttgtagtggagtttttattagttttgtggatagagtagatagataagatataggatataaattatttttttaaaagaaaagagagggttttattttttattgagaaaagaatttttgaaaagggaggtgttggtaaaaattgatgagttgattttgtttttggtttaggtaggttggaagaaattgtattttttagagtaggtgatttttgtgtttgtttgtttgttgtttttgagatattttgtgttgtttaggttggagtaaagtggtgtgattttggtgtattgtaatttttgttttttggatttaagtgatttttttgttttagttttttgagtagttgggattataggtgtatattattgtatttagttaatttttgtatttttagaagagatgagattttattatattggttaggttggttttgaatttatgattttaagtgatttatttattttggtattttaaagtgttgggattataggtgtgagttattgtgtttggtgagatggggttttattatattgtttaggttggtttggaatttttgagtttaggtaaatatatttatgttggttttttaaagtattaggattatagatgtgagttatgtttagttattaatttattttattgatgttgaaattaaagtttggaaaggttaaagagtttgatgaaggttaaataggtagtaaggggtggttggatttagattagggtttttaagtttgttgttttttttattgtgttgggttttttgagtgttttaatagttatgtttattttaaatggtgattttagagagtatttggttttaatttttttttttttggaggggagatggattttttggaatggaattgggttttggtaggggagaattttttgttgggtaaattttgataattgttttggtgtgggagtgtatagggaattttgatttttgtagaattttgggatttttgtgggtggaggggaagaggatagaggaggggagggaggagatgttgagatagaggtttttattttgagtttggtggggaggtatgtgggagaagttgttgag

SEQ ID NO: 2642 - DNA, 2382 bp, Artificial Sequence
  chemically treated genomic DNA (Homo sapiens)
ggatttatttattgtttgtaattttttgggttgaagagattattttttgggagttaattaatttattttttggagtgtgtgtttttttttgtttttaggagttggttttttaaaattttttgaggtttgtgtatgttttttttgattttttgtgtttttattttttatagaaatttatgtatttatgtttttttttttttttgagtttgtagaggattttgttttgttttttttatatttagggttgttttttttgttgttaatataaatttgttgataggttatgtttgggaagtgggtggggtgttttggagtggtgttgaggtgttgtaggtttggtttttggttgtgggggagttgtattttgaagttttgttggaatttgtgtttggggttagtagggggtattagagttaatagggattgtatgtaaaatttatttttttttaggttttttagggggatggttaggtttttgtagagatggggaggatttttttttggtaaggggagagggatgggttaggagttaagtggaaggattttgtgtttaaggttttttaagggatgggataggtgaggaatttttttgagttttttgaattgttttattagttaggtttgggaagtattttgtttttataaattttgtttttttgaaaggggttgggggggggattttaatattttttgttataggttatgatgggtatggtggttaagagtaataggttgtgtggtgaggttggttttttgtggttttgttttgttattttttgaggtatttttatgttagtgaatagagttgtgggtttttagttgtatagatgaatgtatgaataaaatataggtttatataaaggaagttattgtattgatttagatttgatttgggattgttgtataaaatagggttgataaaaattgttgtgtttttattttggaaatagagatttagtttttttttttttgtttgaggtatttagtaaaggtttgtttttgagtggttgtggatgtttaaggatttatgatttttgattttataaagtttagggtgaaaataaaaaataaaataaggagattattgttttaaagtggttgttgtagttaattattttaagaaagtaaataggttggtattgaaagttatataggtgggtggttttttgggagggttgtttagttttttttttttgagatttgagtagggagtagttagaggagtttgaagggatggtgtttagggtatgggaataggttgtatatatttttatggagtatggtgtttgtttagtttgagaagggaaagaaatgggagtagagggttgatgagaaggtagtagatggatagtgtgggattgaaaaggggatttatttgaagattggttattattatttatttttattatttgattgttgttgttttattgagattgatgtgtggagaataagttggggagtggaataaatggtagggaggggagagaagtgagtgaatatgattttggtttagttttataggatagagtgtggttatgaagtttatagaggaggataggtagggaggaattatggtatggttaggttgtagggtaagaggtagagaggagagaggattgtggaggatgtttgtggagtgttgattgttagttgaggttggttttttatttatttattttttttttttgagatggagttttgtttttgtttaggttggagtgtagtggtgtgattttggtttattgtaagttttgttttttgggtttatgttatttttttgttttagttttttaagtattgggattataggtgtttgttattatgtttggttaatttttttgtttttaatagagatagggttttatgtgttagttaggatggttttgattttttgaatttatgatttgtttattttggttttttaaagtgttgggattgtaggtattagttattgtgtttggttaaggttggtttttttttttatggtgatgggtgtttgaaagttgtatatattaaaataaatttattatttgttgatttaaagtaaaattttgagggtatgaaagggaagggtttatgtttatatggttgagataaaagttgttttaggaagttgggtgtggtggtttatttttgtaattttagtattttgggaggttaaggttggaggattttttgaggttaggaattgaagattagtttgagtgatatagtaagattttatttatatttttaaaaagggttggttgttttgggattttttgaaatagttttgtaagatatttttgttttggaattataataatttagataagatgtttttgaaagaatatttgtttaggtatagtgtttttattaatgaattgatgttaattgtggttt

SEQ ID NO: 2643 - DNA, 2382 bp, Artificial Sequence
  chemically treated genomic DNA (Homo sapiens)
aaattatagttggtattagtttattggtggagatgttgtgtttaggtaggtgtttttttaaaagtattttatttaaattgttgtgattttaaaataggaatgttttgtagggttattttgaaaagttttgagatagttaattttttttaaaaatatagatggggttttgttatattatttaggttagtttttaatttttggttttaggggattttttaattttggttttttaaagtgttgggattataggggtgagttattatatttagttttttgagatagtttttattttagttatgtaagtatgagttttttttttttatatttttagggttttattttgggttaataaatagtgagtttattttggtatgtgtaatttttaaatatttattgttataaaagaaaggattagttttggttaggtatagtggttgatgtttgtaattttagtattttgggaggttgaggtgggtggattatgagtttaggagattaagattattttggttaatatgtgaaattttgtttttattaaaaataaaaaaattagttaggtatggtagtgggtatttgtagttttagtatttgggaggttgaggtgagagaatggtatgaatttgggaggtggagtttgtagtgagttgagattgtgttattgtattttagtttgggtaagagtgagattttgttttaaaaaaaaaaaataaataaataaaggattagttttgattgatagttggtattttgtaggtattttttataatttttttttttttttgttttttgttttataatttggttatgttatgatttttttttatttgtttttttttgtggattttatgattatgttttgttttatgaggttggattagggttatgtttatttattttttttttttttttgttatttgttttattttttaatttgttttttatgtattgattttaatggagtaatagtaattagatgatgaaaataaataatggtggttagtttttaaatggattttttttttaattttgtattatttatttgttgtttttttattagttttttgtttttgtttttttttttttttaaattggataagtattgtattttgtgaagatgtgtgtagtttgtttttatgttttgaatattatttttttaagtttttttggttgttttttgtttaggttttagaaaaggagagttgggtaatttttttagggagttgtttgtttgtgtaatttttagtattagtttgtttgtttttttgagataattagttataatggttattttaaaataatggtttttttattttgttttttgtttttattttaaattttataaagttagaaattgtaagtttttgagtatttatagttatttaaggataaatttttgttgaatgttttaagtaaagagggggaggttgagtttttgtttttagggtgaaaatatgatggtttttattagttttgttttatgtgataattttaggttgaatttggattaatgtaatgattttttttgtatggatttatgttttgtttgtgtatttatttgtgtagttgggaatttgtagttttgtttattggtatggggatgttttggggaatggtagggtagagttataaaaagttagttttattatgtggtttgttgtttttagttattatgtttattatagtttgtggtaggagatgttggggttttttttttgattttttttaggaaaatagagtttgtggaggtggagtattttttaggtttgattgataaaataatttaaaagatttaaagagattttttgtttgttttgttttttgaagggttttgaatatggggtttttttgtttggtttttagtttgtttttttttttttattaggaaaggattttttttatttttgtagaagtttgattatttttttagagggtttgggaggaagtgggttttgtatatagtttttgttgattttagtgttttttgttggttttagatgtgagttttggtgaggttttagggtatagtttttttgtagttagaagttgggtttgtagtgttttagtattgttttgggatattttatttgttttttaggtgtgatttgttaataggtttgtattggtgataaaaggagtagttttgaatgtagggaaagtagggtggagttttttgtaggtttgggggaggggaggggtgtgaatgtgtggatttttgtggagagtggaaatatggggagttgaggggagtatgtgtgggttttagaaagttttgggaaattgatttttgggagtagggaggaatgtgtgttttagagagtaagttaattgatttttggggggtggtttttttagtttggggggttatagatagtaggtaaattt

SEQ ID NO: 2644 - DNA, 2303 bp, Artificial Sequence
  chemically treated genomic DNA (Homo sapiens)
tataatttattttttgtggattgggagatttagtattataaagttgttgattttttttaaattgttttatagatttaatgtaaatttagtaaaaaatttaataagaggttgggtgtggtggtttaagtttgtaattttagtattttgggaggttgaggtaggtagattataaggttaggagattgagattattttggttaatatggtgaaattttgtttttattaaaaaaaaaaaaaaaaaaaaaaatgagttaggtgtggtggtgggtgtttgtagttttagttatttaggaggttgaggtagggaatggtgttaatttaggaggtagagtttgtagtgagttgagattgagatattgtattttagtttgggtgatagagtgagattttgttttaaaaaaaaaaaaaaatttagtaaggggtgtgtgtgtgtgtttgtgtgtgtgtgtgtgtgtgtgtgtatgtaagttatagatagaatattttttttttttttttgagatagagttttattttgttgtttaggttggagtgtagtggtttgattttggtttattgtaatttttgttttttaggtttaagtgatttttttgtttttgttttttgtgtagttgggattataggtgtgtattattatatttggttaatttttgtatttttagtagatatagggttttattatgttggttaggttagtttttaatttttggttgtaagtaatttgtttattttagttttttaaagtgttgggattataggtgtgagttattgagtttagttagtatatagaatattattttttatttaagtatattaatttagaagagttttttttaaaatatagtatattatttttatttataatatttaaagataattaaagttaaattatgttgttttaagatattatatatttagaaaaatatttataaaaagtaagagaaatatataaattaggtttatttggagagaagggagtgaagtattgtgttgatatggggataaatatgttggttgggtagataggtagtttttatgtttttggttgatgtagatgttatgtattattttatgtgttattatattttttagtaaatatgtaatataagagaataattaattattattaagtgtttttattttgagataggaagatgtagaggaaagattttgatgtgtgtgttagttataaggatgtatattagtgattgatatgatttggtgtaaattttgggtagagatttatatttaagttttttatttttatttgttgaggtgtaagggtttagagggggttttatggggtgggtgggagtggtaagggttgaggtgtagttatagtttggttttgtgtatattttttttttttttttggttttatgtgtatattttttttttgttttttgttttttgtgtatattttttgtatttttttttttgttttagtttgtgtttgtagtgttatagggtggttgtagtttttgttttttatagttttttaaggttagagggttgggaatttttgggatgtggttgggatgaggattttgtttttttttaggtatttttaggtaaggggtatagagatatagttagtttagtagttgagttttttttattaggttaggtgggaaattgaagtatgaatataattttagattggaaataaaaagttgttatgtattgtgtgtttattgaatgttaagttttatgttttattttttaatgttatttttaatgagatgtttttatttagtttattatatgatagtagataggtatttatgatgtgtttattgtatgttgggtatttttttgggttatgaggatttagggaggtttttgttttggtagaagttaaatttgataggagatagagattaggggtttatatattaggaggaagaatttagtgtagagagtgttagtaggaagttataggggtagggaaggtgtttttgggagggtgggtggttgtgttttgaggttgagtagggggagttggttttgggataggatgtgtgtaggtgtggagtaggaagtttttggaatgatgggtaagagggagtaggttattgggggtaggtttaaatattgggggttgtattgggatagtagaggttttggataggtttgtttagtatgtagatttttttttttggttttttttttaggatgatagtggaggtttatttttaggtggtggtgagggtaattttgatatagagattttagtttagttggtaggggaaggggagtttttaaggatttttgtatgttggggtgtgttttgttaggtggtt

SEQ ID NO: 2645 - DNA, 2303 bp, Artificial Sequence
  chemically treated genomic DNA (Homo sapiens)
ggttgtttggtgggatatgttttaatatataggggtttttgggggtttttttttttttgttagttgggttggggtttttgtgttaggattgtttttattattatttggggatggatttttattgttattttagggaaggggttagggaggggagtttatatgttgagtgggtttgtttgaggtttttgttattttaatgtagtttttagtatttagatttgtttttagtgatttgtttttttttgtttattattttaggaattttttgttttatgtttgtgtatattttgttttgaggttagttttttttgtttagttttaggatgtagttatttatttttttaggagtgttttttttgtttttgtggttttttgttggtattttttgtattgggtttttttttttggtgtgtgggtttttagtttttgttttttgttgggtttgatttttattagagtagggatttttttgagtttttatggtttagaaaagtgtttagtatgtagtaggtgtattataaatatttgtttattattatgtggtgaattgagtgaagatattttattaaagatgatattaaagaatagggtatagggtttggtatttagtaggtatatagtatatgatggttttttatttttagtttggggttgtgtttatgttttagttttttatttggtttgataggaggggtttagttgttgggttggttgtgtttttgtgttttttgtttggaaatgtttgaggaggggtagggtttttattttagttatattttaggggtttttagttttttgattttgaggagttgtgggaggtaaaggttgtagttattttgtagtattgtaaatataggttggggtgggaaggggggtatagagggtgtgtataaggggtagggggtagggagagggtgtgtatatgggattagggggagggagggggtgtgtatagagttaggttgtggttgtattttgatttttattatttttgtttattttatggaattttttttgagtttttatgttttggtaggtgggggtgaggagtttaagtataggtttttatttaagatttgtattaagttatgttagttattggtgtatatttttgtaattgatatatatattaaggttttttttttatatttttttgttttaagatgagaatgtttgatagtggttaattatttttttatgttatgtgtttattggagagtgtgataatatatgaaatagtatgtaatatttatgttagttaaaagtataaggattgtttgtttatttaattagtatatttatttttgtattagtgtaatgttttatttttttttttttagatgggtttgatttgtatgttttttttgttttttatagatgtttttttaagtatatggtattttgaaatagtataatttggttttgattgtttttaagtgttatagataaaaatggtatattgtattttaaaaaaaatttttttagattaatatatttaagtaaaaaatggtattttgtgtattagttgggtttggtggtttatgtttataattttaatattttgggaggttgaagtgggtagattatttgtggttaggagttggagattagtttggttaatatggtgagattttgtgtttattaaaaatataaaaattagttagatgtggtggtgtatatttgtaattttagttatataggaggtagggataggagaattatttgaatttgggaggtggaggttgtagtgagttaagattgagttattgtattttagtttgggtgatagagtgagattttgttttaaaaagaaaaaaaaagtattttgtttatggtttgtatatatatatatatatatatatatataggtatatatatatattttttgttgaatttttttttttttttgagatagagttttgttttgttgtttaggttggagtgtagtgttttgattttggtttattgtaagttttgttttttgggttgatattattttttgttttagttttttgagtagttgggattataggtatttgttattatgtttggtttatttttttttttttttttttttttagtagagatgggattttattatgttagttaggatggttttgattttttgattttgtgatttgtttgttttagttttttaaagtgttgggattataggtttgagttattgtgtttagttttttgttgaattttttattggatttgtattaaatttgtagaataatttggggagaattgataattttataatattgaattttttaatttataaagagtagattatg

SEQ ID NO: 2646 - DNA, 2496 bp, Artificial Sequence
  chemically treated genomic DNA (Homo sapiens)
agtttattgtagttttgattttttgggtttaagtaattttgggattataggtatgttttattaggttgagttaatttttttttttttttttttggtagagatggggttttattatgatgtttaggatggtttttagtttttggttttaagggatttttttattttgattttttaaagtgttgggattataggtatgagtttttttgttttttttttgttgttttttttttatttttgttgatttatttttattttttaaatgtaaaattgatttaaggtgtatttagagatgtgtatagatttttgtgatggagggaattgtatagttatggtgaggagtttattataatttttaaatgtttttttaagaagtaggtattaatattttgttttatttttttggaggtagttttgggttgagtattggatttttgggttttattaattttagtgtttttaggagattaagtgtggttgggggtgagtttttgtttttgtgttttttattatgttttaatatttattttttgttttattttttagttttttgggttttggtttgtatttgtgaattgaaggggttatattaggtgttatattagggtttttggatagtttttaggtttggattttgttttttaggatattatttttattggttaatttattttgttttgtgagtgtttagtgagtgtttggtatgtaatagagtttttataaatagttgtagaaattagtgttattttatagtatggaaattgaggttttaagtgggagtggtttgtttttaaggttttattggtgagagatgttgtggaagggttgttttggtttgggtatatagtaggtgttttgatgtgggttggagaaggttttgtttggtgggattgtgttttggggtattgtgtatgggttggggaagtttggggtagggttgtatgtaaatagtgtgtgaggaggttgtggattggttagtttaggtgggggtggggtgtgttgagggtttagagttggtaggtgttttggtagggataggtttggtgtttgtgtttgtttgttggattgtttgttttgtgttttggtggttttttttgggtgatgtttttgttttgggttttgttggtttttggttgtttgtggtttggtttgggtaggtggtgaagggtaggagggggttgagtttagaaagagtgggtagttttgttttggggtgtttgttgtttggattttgatttttggtgttggggatttagatattattgttatgaataatagtgatagttaatgtttatgggttttttttgttgggaatttgagggtttatagatggttgtagttttgtgatgtgtgttgtaagagattaatatgtaggggggttgtggtaggatagagaagggattagttttagttttatggtgatgtttggatgggggtagatagagagatattttggttgaggaagtagtatgggtaagtttatggaggggagataatattgggttgttttgggaattgttagtttatgggattagttggagtttggggtgaggggagtttgtgggggaaggggtgaggttggagattgaataaagtaaagtttagaattttaggattttattgtttttttagagaggttggattttgttagggggtgttgggggattatgggagggttatagttagagaatgaggtagttagatttgtatgtggggggagggtttaggtgaggaaggtgggatggaggagggttgggttgatggtatggagagatgtttaggaggggtagtggagtttttggtaattgagtgtttgtagtagggagagaaggtagtagtttggtttgattgttttatttttgagtaggatgattgggtagggggtagtgtttgagatagtttatgtggtggtttagggggagggtgaagtttagggtttggtatataatatgtgtttagtaattgtaagtagagtgggtgtggatagttttgttggaggttagtttttatttttattgttttttttagttgtgaatttgtagttttaattggttagtgtgatttttgttattaataattttatatttattattgtggttttggaaaagtttttttgtatgtttgatagtaaagaggtttttattggtatttatgaggtttatttgtatgttttggttgatttaggtaagggttttgtttttttttggttattttaaaaggggttttgatttgtttgtagggaggagggaaggaggtagatagaggaattttttatgtttgtagttgttttattaaataggtattgtagttatagatttgtttttgttttgtagggatatttagttagtgagggaagtaataatattattagttattgaatatttatattatattaggtattttgtatattatagagttagtatttataattagtttgtaaggtagttattattaatttttattatagagtagggaagtaaggtttagagaggtggaata

SEQ ID NO: 2647 - DNA, 2496 bp, Artificial Sequence
  chemically treated genomic DNA (Homo sapiens)
tattttatttttttgagttttgtttttttgttttgtaatggggattggtaatagttattttataagttggttgtagatattagttttatggtgtgtaaagtgtttggtatggtgtaggtgtttagtgattggtggtgttattattttttttattaattggatgtttttgtaaggtaaggataggtttgtggttgtagtatttgtttaatgagatgattataggtatggagggtttttttatttgttttttttttttttttttgtagataggttagagttttttttggagtagttagagggaagtaggatttttatttgagttgattaggatatataggtagattttgtgggtgttagtgagggtttttttgttgttaaatatgtagagaggtttttttaaggttatagtggtaagtgtggggttgttggtggtgaaagttatattggttagttggggttgtaggtttatagttggaggaggtagtgaggatgggaattgatttttggtagaattgtttatatttattttgtttgtagttattgagtatgtgttgtgtgttaggttttgggttttattttttttttgggttattgtataagttgttttagatattgttttttgtttagttattttgtttagaaatggagtggttgggttaaattgttgttttttttttttgttgtagatatttagttgttaagaattttattgttttttttaagtatttttttatgttattggtttagtttttttttgttttattttttttatttgggttttttttttatatgtaagtttgattgttttattttttggttatggtttttttatggttttttagtgttttttgatgaagtttagtttttttggaaaggtagtgaggttttgaagttttgggttttgttttgtttggtttttagttttatttttttttttataggttttttttattttaggttttagttggttttatggattggtagtttttaggatagtttaatattgttttttttttatgaatttgtttatgttgtttttttggttgaaatatttttttatttgtttttgtttaggtgttattatggggttggggttagttttttttttgttttattgtagtttttttgtatgttggttttttgtaatatatattgtagggttgtagttatttgtgagtttttggatttttaatagaggaggtttgtaaatgttggttattattattatttataatagtaatatttgggtttttagtgttaggaattagggtttaggtggtgggtgttttagggtagagttgtttgttttttttgggtttagtttttttttgttttttattgtttatttgagttgaattgtaggtagttgagggttagtagggtttagagtggaggtattgtttgggaggagttgttagagtgtggggtgggtggtttagtgagtaggtgtgggtattagatttgtttttgttagggtatttgttagttttgggtttttggtgtgttttgtttttgtttgggttggttaatttgtggtttttttgtgtgttatttgtatatggttttgttttgggtttttttgatttgtgtgtggtgttttagggtgtaattttattgggtaggattttttttagtttgtattaaagtgtttattgtgtgtttaggttagggtagtttttttatagtgttttttattaatgggattttgagggtaagttatttttatttggagttttagtttttatattgtaaaatgatgttaatttttataattatttatggaggttttattatgtgttaaatatttattgggtatttgtgaaataaaatgggttgattagtaaaggtgatattttggaaaatgaagtttaggtttgggagttatttagagattttagtatgatgtttagtatgatttttttggtttataggtataagttaaggtttgggaggttggggggtggggtagggggtaagtattggagtgtggtggggggtgtggggatagggatttatttttggttgtgtttggttttttggagatattgaggttggtggaatttaggagtttagtgtttagtttagggttgtttttaaagggatggagtagggtgttaatgtttattttttaaaggggtgtttgaaaattatgatggattttttattatgattgtgtggttttttttattataagaatttgtgtatatttttggatgtattttaaattaattttatatttaagaaataaaagtaagttaataaggataggaaaaaaataatagaagaggggtaaggaggtttatgtttgtaattttaatattttgggaggttaagataggaggattttttgaggttaggagttagagattattttgggtattatagtgagattttatttttattaaaaaaaaaaaaaaaaaaattagtttagtttagtggggtatgtttgtagttttaggattgtttgagtttaggaggttgaggttatagtgaatt

SEQ ID NO: 2648 - DNA, 2499 bp, Artificial Sequence
  chemically treated genomic DNA (Homo sapiens)
attgtatttagttttttttttaatttttttttttttttttttttttttttttgggatagtagggttttgttttattattaaggttggaatgtagtggtgtgatttttgtttattgtagttttggttttttaggtttaaatgatttatttattttatttttttgagtagttgggaatataagtgtgtaatatttatatttggttattttttgtattttttttgtagagatagagttttattatgttggttaggttggtttggaattttttattttaggtgatttgtttattttggttttttaaagggttgggattataggtatgatttattatatttggtttttttttttttttaaaattgtggtaattattttttttttgttgaatttattaatgagaaaaagttaatggggttaggtatggtggtttatatttgtaattttagtattttgagaggttgaggtaggtaaattgtttgagtttaggagttttagattagtttggataatgtggtaaaattttatttttataaaaaattttaaaaattagttaggtttggtggtgtatgtttgtagttttaattatttaggtagttaaggttgtagtgaattatgattgtattattgtattttagtttaggtggtagagtgagatgttgttttaatttaaaaaaaaaaaaaaaaaaaaaaaggttgggtatagtggtttatatttgtaattttaatattttgggaggttgaggttagtggattataaggttaggagattgagattattttggttaatatggtgaaattttgtttttattaaaaaaaaaatatagaaaattagttgggtatggtggtaggtgtttgtagttttagttatttgggaggttgaggtaggagaatggtgtgaatttgggaggtggagtttgtagtgagttgaggttgtgttattgtattttagtttggtttatagagtaagattttattttagaaaaaaaaaaaaaaatgtaattaattgtaaggtttggggtgatagttttttggttattttttttagtttttttgtgtttttatagttagagatgattaaagtttatttttaagaaaatagtaagttatgtataattgaagtttatgggggtaggatgttgttttttttattggggtaatttaagtatttgagtgtttgatattatttattatttaggggatttgagttgaattttaaagattggaattaaagatgatagagtgtgtggttggagagagggggaagtttatagagtttaggtaaatttttgaattatatttttattatgtttataatgtattgtattgaagtatattggaagttaaagattaaaaaggaattagatttttagttttgttatttaaagtagaaattgagggttttatttattgtatagattttagtttaagtgttatgtttttagttttatagttttattagtagtttaagtaaaatggtttggatattaaagatggtttttgggttagagtattatttattttttttgtttataaattattttgattttttttgattttttttgttttttatttttttatttagtttttttttttttttttttttttttgagatagagttttgttttgttatttaggttggagtgttggagtgtagtggtgtgattttagtttattgtaattttggttttttgagtgtaggtaatttttttattttagtttttagagtagttgggattataggtatatattattatgtttagttaatttttgtattttttgtagagatggggtttagttatgttgtttagtttgtttttaaattattgggtttaagtaatttgtttattttaattttttaaagtgttggtattataggtatgagttattgtgtttggtttatttggttttattaaatattttattttttgtaaatgtagatgtttttttagttttgattattttttttaaagtaatgattttttatttggttagatgaatgtttttagtaaaggaaaagattagaatgtgaaaattgtattgtaatagaatataaagtttgtttaattttattttttattagatttggggtggtggtagtagtaggtgttagggtttttaggtttgtttattagttatttttaaggtttgttagtatatgggttaggaggagtatatattttggaattagaaagtttaggattgaatttagttttgtttttagttaaggttttgttatttattattatttttttgatttaggattttataaaattttgttatttgtaaaattggggatgataagttttattttgaatgttgttgtgaggaataaatgaggtaatgtttatgtagtatttagtatagatttttgtagataaatatttaataaatgttaattattatttattatttagttattagaaaagtataatgatttggtatttttaagtttttttgtttttaaaaaaaaaaaagaaaagaaaaaagaaaaagatgtgtgg

SEQ ID NO: 2649 - DNA, 2499 bp, Artificial Sequence
  chemically treated genomic DNA (Homo sapiens)
ttatatattttttttttttttttttttttttttttttttggaagtggaaggatttaaagatattagattattgtgtttttttgatgattaggtagtggatgatagttaatatttattgagtgtttatttgtaggaatttgtgttaggtgttgtatagatattattttatttattttttataataatatttaaggtagaatttattatttttagttttatggatgataaggttttgtgaggttttaggttaagggagtgatagtgagtgataaagttttgattgaaagtagggttgggtttaattttgggttttttgattttagagtgtgtgttttttttaatttgtgtgttaatgggttttagggatgattaatgggtaggtttgagagttttgatgtttgttgttgttattattttaggtttgatgggaggtggggttggatgggttttatgttttattgtagtataatttttatattttggtttttttttttgttagaagtatttatttagttaggtggggggttattattttagaaaaaataattagagttgagaaaatgtttgtatttgtagagaatgaagtatttaataagattagatgggttgggtgtagtggtttatgtttgtaatattaatattttgggaggttgaggtgggtagattgtttgagtttagtagtttgagagtagattgggtaatatagttaaattttatttttataaaaagtataaaaattagttgggtgtggtggtgtgtatttgtggttttagttattttggaggttgaggtgggaggattgtttgtgtttaggaggttgaggttgtagtgagttgagattatattattgtattttagtattttagtttgggtgatagagtaagattttgttttaaaaaaaaaaaaaaaaaaaaaaagattagatggggagatgagggatagagagaattaaagagaattaaagtggtttgtggatagaggaaatgagtgatattttgatttagaggttatttttagtgtttaggttattttgtttgagttgttggtgaaattgtgaaattggaggtatggtatttgggttaaagtttgtgtggtgaataaggtttttagtttttgttttaggtggtagagttgaaaatttgatttttttttggtttttagtttttggtgtattttaatgtagtatattgtgggtgtggtggggatgtggtttagaaatttatttaaattttgtggatttttttttttttttagttatgtattttgttatttttggttttagtttttagaatttagtttggattttttgggtgatgggtggtgttagatatttaggtgtttggattgttttggtggagagaatagtattttgtttttatgggttttagttgtatgtgatttgttgtttttttggaggtgggttttagttatttttagttataaagatataaaaaaattgggaagaatgattaggaaattgttattttaagttttgtagttgattgtatttttttttttttttttgagatggagttttgttttgtgggttaggttggagtgtagtggtatgattttggtttattgtaagttttgttttttgggtttatattatttttttgttttagttttttgagtagttgggattataggtatttgttattatgtttggttaattttttgtattttttttttagtagagataaggttttattgtgttagttaggatggttttgattttttgattttgtgatttattggttttggttttttaaagtgttgggattataggtgtgagttattgtgtttagtttttttttttttttttttttttttaaattgagatagtattttattttgttatttaggttggagtgtagtggtgtgattatggtttattgtaattttgattgtttgagtagttgagattataggtgtgtattattaagtttggttaatttttaaaattttttgtagagatggggttttgttatattgtttaggttggtttagagtttttgggtttgaataatttgtttgttttagttttttaaagtgttgggattataggtgtgagttattatgtttggttttattgatttttttttattggtgagtttaatagaggagagatgattgttgtagttttaaaaaagaaaagaggttaggtgtggtgggttatgtttgtaattttagttttttgagaggttgaggtgggtagattatttgaggtgaggagttttagattagtttggttaatatggtgaaattttgtttttataaaaaaaatataaaaaatagttaggtgtgggtgttgtatatttgtatttttagttatttaggaggatgaggtaggtggattatttgagtttgggaggttaaggttgtagtgagtggagattgtattattgtattttagttttggtgatagagtaagattttattgttttaaaaaaaaaaaaaaaaaaaaaaaaaaaaattaaagaaaaggttgggtgtaat

SEQ ID NO: 2650 - DNA, 2499 bp, Artificial Sequence
  chemically treated genomic DNA (Homo sapiens)
ttatatggatataggaaggggaatattatattttggggattgtggtggggttgggggaggggggagggatagtattgggagatatatttaatgttagatgatatattagtgggtgtagtgtattagtatggtatatgtatatatatgtaattaatttgtataatgtgtatatgtattttaaaatttagagtataataaaaaaaaaaaaaaaaaagaaaattggatatttgaatataataatgtagtaattttggagatgagattttttttttttttagggtttgttgttttggggttttgttatgttttatattgttgtaggttgtttttatgttgaggattaatttgagttgtaagtttgaggtttttttaggtttgaagttgtttttttttttgggtatatatttttttttttaaggatgtgtggtaattttaattttttttgtgtatgttattgtttttgagtgttttagtttttaatgtttggtttttaaaaaaggaaaagagaataatgaaggggaagggaaatggggttttggttttttttattttttagaagttgttttagtttggtaagggtttgtagtagtggagtggggagttgtgagtaataatggttgttggtttttgtgtttgtttttttataattaaaagtagtaattaataattagaatgtagatgttaatatttggaggatagagtgtttattgtttatgattgtttttataagttttagtttaagaagttagaagtggtgtttaagtttgtttgtttgatagaaattgtgaatttatattggtttgtttattttgaggttgtgttgttagagtttttttagtataataaagagaggtgtatataaaggaataggaatagtaggaggtgggggtaaaaatattaggtgtgatttatatgttaagttgatttgtattgtgttttataggaagtttagaagatgtttttgtaagaaattaaggatttgtttgttggggagggttgttggtatgtttgaaaagtattgtgatggttgaattttgtgggtttggggagattgtagattttttgattttaaggggaatgatgtgattttagagttgtaaagaataagtgatagtggaggtgtttatgttttgtgattgtattagagataaggaagatataattagaataatggggagtaggaatggagtggttaatagaatatgtgattgttagggatttttgatgaaggttgatttttagggagtgaattagattagtgattaattatttgtttttatataattgggtaatgtggatggattttaataaagggattatttatagtatagtaggaaagttataaagaaattagatagaagagtgtaagtagtaaggggttaagtagttatttgattagagatagtgttagtttgttaagaaggtattagatagaagttgtgatttttagtaaagggatatagtttgtttgtgttgattttgtaggggtagaggtgggggatatatatattttttttttatttattttttgttattttttttattagttgaattttaataaaagtatgagggtaagggagatttttgaagtatttaatttaggtgagttttttaaggaataaagtagaatgtagaaaaattaagagtgggtttagggaataaaatagagatatgtattagagtatgatgatgtgtttgggaaagaatatataaatatttttaaaattattagataataaatttgagatgatattaatataggtaaattttatttaatggtaatatattttaagaaatgtattattaggtgattttgtggttgtgtagatattaaagagtgtattttatataaatttagatagtgtagtttattatatatttaggttatattgtatagtttattgtttttgggttatatatttgtgtagtatgttattgtgttgaatatagtaggttaatggtttttaatatttaagttatggattagtattggtttgtgttttgttaggaattgggtataaagtaggagatgagtggttggttagttgagtattattgtttgagttttgttttttgttagattagtagtagtattagatttttataggagtataaattttattgtgaattgtttatataagggatttaggttatgttttttttatgagaatttaattaggttgggtgttgtggtttatgtttgtaattttaatattttgggaggttgaggtaggtggattataaggttaagataattttggttaatatggaaattttgtttttattaaaaatataaaaattagttgggtgtggtggtgtatgtttgtagttttagttatttgggggattgagataggagaattatttgaatttgggaggtagaggttgtagtgagttgagattgtgttattgtattttagtttggtaatagtgggagatttagtttaaaaaagaaaaaaaaaagaaaaaaaagaatttaattaatgtttgatgatttga

SEQ ID NO: 2651 - DNA, 2499 bp, Artificial Sequence
  chemically treated genomic DNA (Homo sapiens)
ttagattattaggtattagttagatttttttttttttttttttttttttttttagattgagttttttattgttgttaggttggagtgtagtggtataattttggtttattgtaatttttgttttttgggtttaagtgatttttttgttttagttttttgagtagttgggattataggtatgtgttattatatttagttaatttttgtatttttagtagagatggggtttttatgttggttaggattgttttgattttgtgatttatttgttttgattttttagagtgttgggattataggtgtgagttatagtatttagtttagttagatttttataaggagaatataatttagattttttgtatgggtagtttataatagggtttgtgtttttgtgaaggtttaatgttgttgttgatttgataggaggtggagtttaggtagtaatgtttggttggttagttatttattttttgttttgtgtttagtttttaataggatatgaattggtgttggtttatggtttgggtgttggggattattggtttattgtatttagtatagtgatatgttgtataggtgtgtagtttaggagtaataggttgtatgatatagtttaggtatgtagtaggttatgttgtttaggtttgtataaagtatattttttggtgtttgtatagttataaaattatttaatgatgtattttttggaatatattattattaaatgagatttatttgtattagtgttattttaggtttattgtttagtaattttaaaagtatttgtatatttttttttagatatattattatattttggtgtatatttttattttattttttagatttatttttaatttttttgtattttgttttgttttttaggaggtttatttgaattggatattttagagattttttttatttttatgtttttattggggtttagttaatggagggggtggtagaagataggtgagagaagagtgtgtgtattttttatttttgtttttgtagggttagtataggtagattgtgtttttttgttgaagattatagtttttgtttggtgtttttttggtaagttggtattgtttttagttaggtgattgtttggttttttattatttatatttttttgtttggtttttttgtgatttttttgttgtgttgtaagtagtttttttattagaatttatttatattatttagttatataaagataaatagttggttattgatttagtttattttttgagaattagtttttattaaagatttttaatagttatatattttgttggttgttttatttttgttttttattattttagttgtgttttttttgtttttagtgtagttataaagtataagtgtttttattgttatttgttttttgtaattttaggattatattattttttttgaaattagagaatttgtaatttttttaagtttataaaatttagttgttatagtattttttaagtatgttagtagttttttttaataaatgaatttttaattttttatagaaatattttttgggttttttgtgggatatagtgtgggttggtttggtatgtggattatatttgatatttttatttttattttttattatttttatttttttgtatgtatttttttttattatgttaggaaagttttggtaatataattttaaaataagtaggttagtgtggatttatagtttttgttagataaataaatttgagtattatttttaattttttgggttaagatttgtgggaataattatgggtgataagtattttgttttttaagtgttagtatttgtgttttggttgttgattgttatttttgattatggaagggtaaatatagaggttggtagttattattgtttataattttttattttattgttgtaagtttttattagattgaagtaatttttaggagatagaaaaggttagaattttatttttttttttttttgttgtttttttttttttttttgggagttaaatattaaagattaggatatttaaaagtaatggtatatatagaggaaattaaagttattatatatttttggagagaggagtgtgtgtttagggaaaggagtagttttagatttgagaagattttaagtttataatttaggttgatttttagtatggagataatttataataatgtaaaatataataaaattttaaaatagtaaattttgaggaagaggagagttttatttttagagttattgtattattatatttaagtgtttagtttttttttttttttttttttttattatattttaagttttagggtatatgtgtatattgtgtaggttagttatatatgtatatatgtgttatgttggtgtgttgtatttattaatgtgttatttagtattaggtatattttttaatgttatttttttttttttttttgattttattatagtttttagagtgtgatatttttttttttgtgtttatgtga

SEQ ID NO: 2652 - DNA, 2279 bp, Artificial Sequence
  chemically treated genomic DNA (Homo sapiens)
taattttagtattttgggaggttgaggtaggagggttgtttgaggttagagtttaagattagtttggataatatagtaagatttttttttaaaaaatgtttttaaaaattagttgggtaggttaggtatggtggtttatgtttgtaattttagtattttgggaggttaaggtgggtggattataaggttaggagatggagattattttggttaatatggtgaaattttgtttttattaaaaatataaaaaaaaattagttaggtgtggtggtgtatgtttgtagttttagttattttggaggttgaggtaggagaatggtgtgaatttggaaggtggagtttatagtgagttgaaattgtgttattgtattttagtttggatgatagagtaagattttgttttaaaaaaaaaaaaaaaaaaattagttgggtatagtggtatgtatttgtagttttagttatttagaaggattttttgagtttaggagtttatagttgtagtgagttgtgattattttattgtattttagtttgggtgatagaaagattatgttgttgaaaataaaattatgggtggggggtggtgttttgtgtatttaggggagtttaggtgtgaaaaattgtgttttgaaaaagtaggtttttgtgtgttggttagaatggggggatgaggaaattgaggggtagttttttttatattattatttgttttggagtagattggaagagttagtagaatgaggggtaataagtatggattggagtgatttgggtgagttgaggtaggggttgaagtttttatatggaatgtggtagggatgagtaggttatttggaatttagatttaaaagtattagttatttagatattgatttgagatttttgtagagggggaaatggttggggttttagttatttggagtgttttaattttttagtagagtttggttgtgagatttagtttttttgttttatttggtggggtgatgtgtttattttaaagttttattggatataggtaggtaaatttttattgggtatttgatttttgtattaggttttagtgtggatgttgttaagttagtatgtggttttgtatatgtggagttttatagttattttgaagtaagttttgggattttgaatttgattttgaagtttttgttgggttgattttttatttggtgttgatttgattttatatgggagttagtgtagttatgggtttggaaagtatttagataaaaggtgttttatttagtgatgaagaatgtgttgatgttttaagattgtttttagataaatagtaaaattgttggttaaaagttggtttaatttattttattttgttgttgtttgttttgttttagatgttttgtagtttgaagttgtggttttagtttttttttttagtgataagtggaaaagagggatgaggaaggggttttgttggtttgattaaaaataaaattaagaatttatgagtgtatttttttttttgggtatttggatatttttgttagaatatttagtagatgttgataattttaagttaatgtaaaagttaagtttggagggttatggggtgggagattagggtgaggaagttgttaaaggaggttaaggggatggtatggtttttatttaatagtgatagtagtattttagagttagagggtttttatttattgtttagtttatatgtatgattttaaaaaaggaagttgaggtaggaggattgtttgagtttaggagttggagattagtttaggtattttagtgagttaatgtttttgttaaaattaataaatgaagttaagaaaggtgaggtatgggtggttttagtgatttggattaatttatagagaggtagtaatggggagggttagagttttgtttttgagggattatattatagtttattttttttatttaaaggttaaaggaattgagtgttaataattaatatagtgattttggtatttggagtttttttgatgttttatggattaaggagattagatttttttatatagtttgttgagggatttggtgggtgttttttgtttttggggtttttttattttggttgttatgtttaatttagatttagtttttttttggaattttttttttaatatgtatagagatagaatttggtttggattttgtagttagtagttgtgtgtaattatttgggatagtgttgtaggttagtagttggtaatgttagatattgggttggggttgtttagtaggtttaagttttggttgttagt

SEQ ID NO: 2653 - DNA, 2279 bp, Artificial Sequence
  chemically treated genomic DNA (Homo sapiens)
gttggtagttagggtttagatttgttgagtgattttaatttggtgtttagtattgttggttgttgatttgtagtattgttttaggtgattgtatataattattggttgtaaagtttgggttgggttttgtttttgtgtgtgttgaaaggagaattttaggaagaggttgggtttgggttgagtatagtagttaaagtaggaagattttaagagtaaggggtatttattaagttttttaataagttgtatggaggaatttggtttttttaatttatgggatattgagggggttttaggtattaagattgttatgttggttattaatgtttagtttttttggtttttgggtgggggaagtgagttgtggtgtaattttttagaagtgaggttttggttttttttattgttatttttttgtgagttagtttaggttattgaggttgtttatgttttattttttttgattttatttattaattttaatagagatgttgatttgttaaggtgtttaggttagtttttaatttttgggtttaagtaatttttttgttttagtttttttttttaaaattatgtatgtgaattagataatggataaagattttttagttttaaaatgttattgttattattagatgaaggttgtgttatttttttggttttttttaataatttttttattttagttttttattttatgattttttagatttggtttttatattagtttggaattgttagtgtttattaaatgttttagtagaggtgtttaagtgtttaagggagagaatatatttatgggtttttagttttgtttttggttgggttagtaaagttttttttttattttttttttttatttattattagagaaagagattaaaattatagttttaggttgtgaaatgtttaaaataaaataaataataataaaataaggtgggttagattagtttttaattaatggttttgttgtttatttgaagatgattttaagatattaatatattttttattattgggtggagtattttttatttgagtgttttttgagtttatgattatattgatttttgtgtaaggttaagttaatattgagtagggagttagtttagtaagaattttggggttagatttggggttttagggtttgttttagagtaattgtaagattttatatgtgtgaagttatatgttggtttagtaatgtttatgttaaaatttggtgtaagaattaagtgtttggtgagggtttgtttgtttgtgtttagtgagattttgaagtggatatattattttgttaggtgagatagagagattaggttttatggttagattttgttggggaattaggatattttaagtggttgaaattttagttgtttttttttttgtagagattttaaattaatgtttgggtgattgatgtttttaagtttggattttagatggtttgtttatttttgttatgttttatatgagggttttagtttttgttttagtttatttagattattttaatttatatttgttgttttttattttgttgatttttttagtttgttttaaggtaaatgatggtgtggggaggattgttttttaatttttttatttttttattttaattagtatataggaatttgtttttttaaaatgtagttttttatatttgagtttttttaagtatataaagtattattttttatttgtgattttatttttagtgatatgatttttttgttatttaggttgaagtgtagtggagtgattatagtttattgtagttgtgaatttttgggtttaagggatttttttaagtagttgggattataggtgtatgttattatgtttagttaatttttttttttttttttttgagatagagttttgttttgttgtttaggttggagtgtagtggtgtgattttggtttattgtaagttttattttttgggtttatgttatttttttgttttagtttttggagtagttgggattataggtgtgtgttattatgtttggttaatttttttttgtatttttagtagagatggagttttattatgttagttaggatggtttttattttttgattttgtgatttatttattttggttttttaaagtgttgggattataggtgtgagttattgtgtttggtttgtttagttaatttttaaaaatattttttgagaaaaagttttgttatgttgtttaggttgattttaaattttggttttaagtaatttttttgttttggttttttaaagtgttgggatta

SEQ ID NO: 2654 - DNA, 2443 bp, Artificial Sequence
  chemically treated genomic DNA (Homo sapiens)
tgaatttttgaatttaaggaatttatttgttttagttttttaaagtgttgggattataggtgtgagttattatgttttgttatttttagttttttgatttgaaatgtttttttgtaaataagtattaattattttattgtaggtttgaggagaaaaaggtgaatgagtttttttttagttttgaagttaattagtttaatgaattggtaatgataatatatttttatttttttgggttatttttattagttttatatattgttgagagagttgaaagtgttgagttaagttagggaaggtaagagtaggtaggtgattgttaagatatttttgttttatttgtttgatatttgatattttgtagggatgaaaggttatatttatggatggtgaaggtagtggaaattgtattgatttgggagttagaaattttaagtttaagttttagttttgttattaatatgttgtgattttaagaaagttatttttttttttgggttttagtttttttatttatgtaagtaagggttgagttggttaatttattaagattttttataggttaggtatggtggtttatgtttgtaaatttagtattttgggaggttgaggtaggtggattgtttgaggttaggagtttaagattagtttggttaatatggtgaaattttatttttattaaaaatatgaaaaattagttaggtgtggtgatgggtgtaatttttgttttttagttatttaggaggttgagataggagaattatttgaatttgggaggtagatgttgtagtgagttgagattgtgttattgtattttagtttgggtgatagagtgagattttgttttaaaaaaaaaagattttttatagtgtagtttatggtttttttaatttatttatgttatgtagttaatagttattttagtaaggtagtttgtgatttgtttttttatttttaggtttggtaatttttatatttaaaatgttttaagataatttttggtttagggtagttgaaatggatttttaatttggagttagagtttttattatttttatagtatttatgagggttaatgttttatttttttagtatagaatatggatttttagtttttaattatgagattgggtttagggtggttattttgaagttttttataattttttttttatggttttgggtagggatttatttttggtttttttgaaattataatataaattaagtagggaatattgaagtttttagatattagagattttaggttgattgataggttttagaaagtgagggaaggagagaggattggagttgggattttattttagttttagttttatagatagtagttatgtagagggtgtttgtagagttatattttgggtttgtggttgtggggtaagaaagatagatgtttggttgtttggttggggattatagttaaagggaggtgtttttattggggttttattttgtttataaatattagagatatgtttttatttttttttttattttttagatttttagaaggaaagaaagaaaattaatattttttgggttgttatttgtgataagtgttgtgttaggtatttttatgtattatatatttatttaatttttagagtaatgttgggaagtgggtgttattgttgttttttatagtgagtaaataggtttagagatttaggattttgtttaaggttataaagttagtaagtgtaatttttaagtttggtttttttttaatatattatattgttttgtattttaagatttggttgattgtttgataagtatgtagtaggaatttttatgttttagtatttttttataaatttgagtttttttttttaaggttttataaatgtaattgggaattttttttttagattttaagattatatatttttttgggttttaattttaggtgattgttttttaatttaaaatattttaggtttttattaagtttttataagtgaatttttggggaattgtgataaagtattagttagggtgagggtttagaatgaggggtgttttttttgagttttggattaaatttagtttgttgtgagttagtagggagatattggaggagatagatttagtgggtgagagggaattttttttaggggaggggtttggatttttttaaggaagaaggaggtttggtgaataagaggttttagggttggggaaaattttggaagtgataggggtttttagatagttaaagtgtttttataagttatgagagagtttggggtgattttggataattttaattggttagagaaagggagaaaggatattttttggagtagggttatggtagggttttaggagtttttattggtgattgggatggaaagtatatattaggagggagttttgttagttttgtgtataatattggttttatgtgataggatag

SEQ ID NO: 2655 - DNA, 2443 bp, Artificial Sequence
  chemically treated genomic DNA (Homo sapiens)
ttgttttgttatgtgagattagtgttgtgtatagaattgataagatttttttttgatgtgtgttttttattttaattattagtaggagtttttggggttttgttatgattttattttagagaatattttttttttttttttttgattaattgagattgtttaaggttattttagatttttttatgatttatggaagtgttttaattgtttaagaatttttgttatttttgggattttttttagttttaaagttttttatttattaggttttttttttttttggagaaatttaggttttttttttaaggggagtttttttttatttattggatttgttttttttagtatttttttattggtttatagtaggttaggtttagtttaggatttagagagagtattttttattttgaatttttattttgattgatgttttgttatagttttttagggatttatttgtgagaatttagtggggatttggagtgttttgaattgaggagtagttatttgggattaggatttagggaggtgtgtggttttgagatttaggaaaggagtttttagttgtatttatgggattttggaaggaagagtttagatttgtgggagaatgttagggtatgagagtttttattatatgtttattaggtaattaattagattttggggtgtagagtaatgtgatatattaggaaaaggttaaatttaggaattatatttgttagttttgtgattttgggtaagattttgaatttttgagtttgtttatttattgtaaagggtgatagtaatatttattttttaatattattttgggggttaaatgagtatatgatatgtgaaggtgtttggtatagtgtttgttataagtagtggtttagaaaatgttagttttttttttttttttttaagggtttgagaaatgaagagaaaaatgagggtatatttttggtatttgtgggtagagtgaggttttagtggaagtatttttttttggttgtagtttttaattaggtagttagatatttgttttttttattttataattataaatttgggatgtggttttgtagatattttttatatggttgttgtttgtagggttggggttgaggtgggattttagttttagtttttttttttttttttattttttggagtttgttagttaatttaaaatttttggtatttgaaagttttgatgttttttatttaatttatattgtggttttaaaaaagttaagagtaagtttttgtttaaggttatagaggggaagttatggaaagttttagggtgattgttttgaatttagttttgtggttgaaggttaggagtttatgttttatgttagagaagtgaaatgttagtttttatgggtattgtggagatggtggggattttgattttagattaaaggtttattttagttattttgggttaaaggttgttttaagatattttggatgtggaagttgttaggtttgggggtaagaaagtaggttataggttattttattgaggtgattattagttatatggtatgagtagattaaaaaaattatagattgtattgtaagggattttttttttttgagatggagttttgttttgttatttaggttggagtgtagtggtgtagttttaatttattgtaatatttgttttttgggtttaagtgatttttttgttttagttttttgagtagttgggaggtagagattgtatttattattatatttggttaattttttatatttttagtagagatggagttttattatgttggttaggttggttttgaatttttgattttaggtgatttatttgttttagttttttgaagtgttgggtttataggtatgagttattatgtttggtttgtaagggattttaatagattgattagtttagtttttatttatatagatgaggaaattgaggtttagagagaagagtaatttttttaagattatagtatattagtggtagaattaggatttggatttagggtttttgatttttaggttagtatagtttttattgtttttattatttataaatatggttttttgtttttgtaggatattaggtgttagataggtagaatagaagtgttttagtagttatttgtttgtttttattttttttgatttagtttagtatttttgatttttttagtagtatatgaggttaatagaagtggtttagaaggataagaatatgttgttattattagtttattagattgattagttttaggattgggaagaggtttatttatttttttttttttaggtttgtggtggagtaattaatatttatttgtggggagatattttaagttaggaagttgaaagtggtagggtatggtggtttatgtttataattttagtattttgggaggttgaggtaggtggattttttgagtttaggaatttg

SEQ ID NO: 2656 - DNA, 2480 bp, Artificial Sequence
  chemically treated genomic DNA (Homo sapiens)
aggtgtgtagagttttgatttttggttttggaaaaaaggttagtatagtttggaatgggattattttagaattatatttttttttttttttgtattatttattattaggggttttttaggtttattgagaaatttggttttgtagatttttgtgttatggttttattatttttgttggatagtttaggtttaggggttgttataagatttagtttagtttttggggttatattggtggtgttgtgtttggtgtggaaaattttaaggttagggtttataatttttgttttttatgttttattaggttttttttataggttttgtttttttttttattttatggggttggggattttttttggttaaagtttagtagattggatagattttttagaaagtaatggtaggagatgtatgggatgtttgatttatttgtttttttttatttatgtgtgtagtttttttggttttgggtaaggttaaagttgggtttgtagttgtaggttattttatttttgggtgttttttggtagatgtgggtatagttatggtttttgtttatgtagtttatattttttgggaagagagatagataagagatgggttgaagattaggtagagagggagagagaaaattttaggttgaaaggggatagttaatgatatgtaataattaaatgggttgttattgtatgtattatgtatatatatgtatttgtgtatatatatatatgtgtgtgtgtagtagttatttatatggatattttttagggagaaagtaagggtatggtgtttgggtttagatttaggttttgttttgtgagttgtattgtaaatggtattttgtgatttatggagattaagtttttgttttaggttagattgtggggtatggtttgtagaattatttttgtgttagggtgatttgttttttttttttgagttatttatggttttagggtattttttatttgtttagtagattggattttttttttttgtttgtttggagtggtttatatttttttttgttgattttagttgatgtttatttttttggtgatttgtgaggtgtttttagaatttatgaggttaggggttaagtgagaggttgtaggttataagtttattaagaggttaaggtagatgaaagggaagtgtttttgtttgttaatttattagttttgtgatttgttttttatttttatttataggaagtttaggtaggagtgaagttggtttggggagtggtagtgaaggttgtagatggtgaatatgtatagggtaattttttttttttgggatatattggttttttgttttaagggaggattggtttaattttgattttgtttattttaaatatgggtatgtagtaatatagaatagatttaagaatataaatattttgttagttgtaataaagataaaaatgtttaaagttaaaaattaaataaataaatggaaatgaggaagtttgtattttgtttggtattgtaatttttggttttatttgattttgtgatttatatttttttattttgatttttttattaattaattaaattgttggaatgatgtagagtttaattaagtaatgagttagtatggaaagtgtttttatgttgttgttttgtatagaagttgtaagtttatatggaaagattttttttgttggtttgattttaaaatagtattagtgtttgagttatatagatagtggtgtgtggttaatgtttaatagttggtaggggtggaggttgatttgtagtatttattaatttatgtgggataaatatgttagttatggttaattttaaggtattagggagatgttgttaagggtagagttgggaataaatgtgtatagttggtttttataagttgagataagttagttatagtatgttttttttttagaaaggttgttgtaaagttaggtagatgtaggtgtgaatttggttttttttttggttgtggtttgggagataattgttttttttttttgagtttaattttagaaggggtaggattatttttgttttatagaggagttgtgtaaattaaatttagttatagataggaaatgttaggtaataagagatgaggtttgtttgtgggggtattggtttttgaggttggtgttttttttgtaggtttggagatagtgtggtttttttttggggtttggttggattgggtggttagaggtggtttttggtagagaaatttttttaggttattgagatatatttagttttttattaggttttttgggagttttttgttttggtaagggtttggttagtgggtggtggttagtaagttatttttttgattgttattgatagttgttgttggtggtgggttgagtttagggttgttttttttatttttgtttatttggtttttatggttttttgttgttttagtttttttatagttgtatatattttatggtttgttattttataatgttt

SEQ ID NO: 2657 - DNA, 2480 bp, Artificial Sequence
  chemically treated genomic DNA (Homo sapiens)
aggtattgtgggatggtgaattgtggagtgtgtatagttgtgaagaagttggaatagtagggagttatggaagttaaatgaatagggatgaagggggtgattttggatttagtttattgttgataatagttgttagtaatggttagggagatggtttgttggttattatttattggttaaatttttattagggtaggaggtttttagaggatttgatgagggattgaatatgttttagtagtttgggaaggtttttttattgagagttgtttttggttatttggtttagttaggttttagggaggagttatgttgtttttagatttgtaggagagatattggttttaagagttagtgtttttatagatagattttgttttttattgtttggtattttttgtttgtaattggatttaatttgtatagtttttttgtgagatagaggtgattttgttttttttaagattaggtttagaaaagggaagtagttgttttttaggttatagttaggaaggaagttagatttatatttatatttgtttgattttataatgatttttttaagaaagggatgtgttatggttggtttgttttagtttgtgagagttaattgtgtatatttgtttttagttttatttttggtgatatttttttggtattttgaaattagttgtggttggtgtatttattttatgtaaattggtaaatattgtaaattagtttttatttttgttggttgttaagtgttgattgtatgttattatttgtgtgatttaggtgttgatgttgttttggaattgagttagtggaaagggtttttttgtgtgaatttgtagtttttgtgtagggtagtagtatgaaagtgttttttgtgttaatttgttgtttagttagattttgtgttattttaataatttgattgattagtgagaaaattaaggtgaggaaatatgagttgtaaaattaggtgaaattaggagttatagtgttgggtaaaatgtaggtttttttatttttatttgtttgtttgatttttaattttagatgtttttgtttttattataattagtagggtgtttgtgtttttaaatttattttgtgttgttgtatatttgtatttaaagtggatggggttaggattgagttagtttttttttggaataagaggttggtgtgttttgggggaaggaggttgttttgtgtgtgtttgttgtttgtagtttttattgttgttttttgagttggttttatttttgtttgagttttttgtgggtggaggtggaaggtaggttatagagttggtgggttggtagatagaggtgttttttttttatttgttttggttttttgatggatttgtgatttataattttttatttgatttttgattttataaattttagaaatgttttataaattattaggaagataaatattaattgaggttaatggaagggggtatgagttattttaggtagatagagaggggagatttagtttgttgggtgggtggggggtattttagaattatgggtggtttgggagaggggagtaaattattttgatataaaagtagttttatagattatgttttataatttgatttagagtaagagtttggtttttgtgggttatgaggtgttatttatagtgtaatttatagagtaaagtttgaatttagatttaggtattgtgtttttgttttttttttaagggatatttatgtagatggttgttgtatatatgtatatgtgtgtgtgtgtaagtgtgtgtgtgtgtatgatatatgtaatgatagtttatttgattgttatatattattggttatttttttttagtttgaaattttttttttttttttttgtttggtttttaatttgttttttgtttgtttttttttttagagggtatgaattgtatgaataaagattatggttgtgtttatatttgttgggagatgtttaaaggtggggtggtttgtgattgtaggtttggttttgattttgtttaaaattagaaggattgtatatgtaggtagagggagataaatgggttaaatgttttgtgtgttttttgttattattttttggagggtttgtttagtttgttggattttggttagggagggtttttagttttatggggtggagagaagggtagggtttgtggaaggggtttgatagggtataagggataagggttgtaaattttagttttggggttttttgtattaagtatgatattattagtgtagttttaggagttgggttggattttatggtagtttttgagtttaagttgtttagtaggaatggtggggttgtggtatagaggtttataggattaggttttttgatgggtttgggaagtttttggtaatgagtagtataaagaaggaaaagagtatggttttgaagtggttttattttgggttgtgttgattttttttttgggattaaagattagaattttgtatattt

SEQ ID NO: 2658 - DNA, 2487 bp, Artificial Sequence
  chemically treated genomic DNA (Homo sapiens)
ttaaaagagttttgtggaggttaggagtggtttttgatgtttatttgaagtttttagatgttgttaggagggggggtttttttgggtttttaatatttttttgtttgttgttgttagtgtatttttgtagtttagtgtgtatttattttatgtatgttttgtgttgtgtttttgggttttgtttatggttttaataaattttttgtttggtgtgatattggttgtttttagagggtgttaagatatggggttaggtgtttaggggttgtttattgtggtagggatagagtttttagtggtgggagtgttgtggtaattttatttttttagttttttttgaaattgtgttgggggtttttgtggtgttgttttggggttttatttgaggtgttgtatttagaagtatttttgggaattttttttagatatatttgattggttatagaggaatttgaggttgtgtaatggggtgttttttttatgtgtatggattgggggttagtatggtttaggttagtgtgtagtgggggtatgaattttttgaagaataatttggttgggtatggtggtttatgtttgtaattttaatattttgggaggttgagttggggtgtattatttgaggttaggagtttgagattagtttggttaatatggtgaaattttatttttataaaaaatataaaaattagttaggtgttttggtgtatatttgtaattttagttatttaggaggttaaggtatgagaattgtttgaatttgggaggtggaggttgtagtgagttaagattgtattattgtattttagtttgggtgatagagggagattttgttttagaaaaaggaaaagaaaaataatttatttagattttaaaatggatatttaaaaaattttttagagaaagttagaagaaaataggtgatttttttattatgtgtttaggtgattgtagatgtttggtaatgtttttttttaggtttttttgggtgagtttgttttttaggtaggggttagtatggttggggtttttttgtttgagtttaggatttgtgtaatattaggaagataatagttgaaggttttttagtgagttaagggaagtatatataaatttattatataaatattagaaagtgttgtttgtaaaaaatatgtttttatagagttaataagtagagaaatagttgtttagtgttaggaagtgtattatgatttagaggtttagtttgtgtgtagtgtatagatttgaggttttagagagattgaggatgtagattagtggtatgatggaaatgtagaatgtttatgagaaaatttttttattaattgagataaagttgtaaagaggtagatagttttattgggtgtgtatgtttgaaatttgtgttttttgggttagggtatttggggtgtggtttttagttttttgtagttgttgtttggaaattgttgttatttatttattttttttttttgtttttttatttaggtgagaattttttaagttttgttttttggtgtttttgttttgtttttgtttggtttggttttgtttttgtttggttttgttttttaatgtgtttttaggtttttttttttttagttggtttttaggatggttgttggatgtgtttgtgagttttttgtttgtttgttttttatttttttgtagttttttttttaattttatggtttttttgagtttggttgttttttatgttttatgttgggtttggttggttttggggtttatttttttggttttattttttttatagttttgagggtttttttgtgtttaggtttttggtagttgttttttgtgtagattattgggtagatttagttgatttttaggggtatttttttggtttattattgggttggtgttttgtagaatgagttgtgagagttattgtggttggttagagggtgttatttatagttattttagatttataggagtttttgttttgatttttgtatttatttgtgttttgttttatgtttttttttagttatttgagttgtaggttttggttattttagattttttttttttgttatttttatttttattttagtatttttatgtttgttttaggttttattttttttttttttgtttggattaaattattttgatttttttgggtttttgtgtaatagtttgttttggttgttgttttattgtatttgtaaatttatttgtatttatatttaggttagggtttttaaatagaagttttagtagatttttttttttggttagttttttgttgaattaggaagtaggtttttgttgaattttagtatgatttgtttttatttttgtattttatttttgttttgggagtttttgggtttttgggtgtatttgttgtttttttttgtttgttattgggtgattttttgtttttgtgggtgtttttgggttttggttttgggttttttgaggatttgtttttttggtagtggttgttga

SEQ ID NO: 2659 - DNA, 2487 bp, Artificial Sequence
  chemically treated genomic DNA (Homo sapiens)
ttagtagttgttattaggagagtaagtttttagaaggtttgagattagggtttgggagtgtttataaggatgggaggttatttagtgataaatagggaagggtagtaggtgtgtttaggaatttagaggtttttagagtagaagtgggatgtaggggtgggggtgggttatgttgaggtttaatagggatttgttttttggtttaatagggagttggttagagagagggatttgttgaggtttttgtttaaaaattttggtttgggtgtgggtgtaagtggatttgtaggtgtagtgaggtagtggttggagtaggttgttgtatgaagatttaggaaagttagggtggtttgatttaggtagaagagggggaaatggagtttggggtagatgtaaaggtgttggggtgaggataagggtgataggagggaggagtttggggtgattaaggtttgtagtttaggtgattgggaaaaaatataaaatagaatatagatgaatgtaggggttgggatgaaggtttttgtgagtttgaagtgattgtgagtggtattttttggttagttatagtggtttttatagtttattttgtagagtattggtttagtgatgagttgaggaagtgtttttggaggttagttggatttgtttagtggtttgtatagggggtggttgttaggggtttgagtatagggaaatttttgaaattgtgggagggatgaagttagagaggtagattttagaattgattaagtttagtatggggtgtggagggtggttaagtttaagaagattatgagattggagaaggagttgtagagaggtggaaggtagataggtgaaggatttatgagtatgtttaatagttgttttaagggttggttggagggaaagagatttgaagatatgttggggggtggggttgggtaggggtggggttaggttgggtaggggtgggatgggggtgttggagggtagggtttggagaatttttatttgagtggaagagtagagggaggaggtgggtgggtggtagtggtttttaggtagtagttataggggattgagggttatattttgaatgttttagtttagggggtataagttttaaatgtatatatttagtggggttatttgtttttttatagttttattttaattagtaggaaagtttttttataaatgttttgtgtttttgttgtgttattggtttgtgtttttggtttttttggggttttaggtttgtgtgttgtatatgggttgaatttttggattatgatgtattttttaatattgggtagttatttttttgtttgttggttttgtgaagatgtgttttttatggatagtattttttaatgtttatgtagtaagtttgtgtatattttttttagtttattaaggaatttttaattgttgtttttttggtgttgtatgaattttgggtttagatagagggattttggttatgttgatttttgtttgggaggtgggtttatttaggagggtttgggagggaatattgttgggtatttgtagttatttaagtatatagtgaaaaagttatttatttttttttggttttttttggagaattttttaaatatttattttaagatttaagtagattgtttttttttttttttttttgagatggagtttttttttgttgtttaggttggagtgtagtggtgtaattttggtttattgtaatttttgttttttaggtttaagtgatttttatgttttagttttttgagtagttgggattataggtgtgtgttaggatatttagttaatttttgtattttttgtggagatggggttttattatgttggttaagttggttttaaatttttgattttaggtgatatgttttggtttggttttttaaagtgttgggattataagtgtgagttattgtgtttggttagattgttttttaaggagtttatgtttttattatatattgatttgagttgtgttggtttttagtttgtgtatgtggaaaggatattttattgtatagttttggatttttttgtggttaattgagtgtatttagggagaatttttaagggtgtttttagatatggtattttagataaggttttagagtagtattgtagggatttttggtataattttggaaagagttaaaagggtgagattgttataatatttttgttattggggattttgtttttattataatgggtagtttttgggtatttggttttatgttttagtattttttagaaatagttaatgttatattaagtagagagtttattgaggttatgggtagggtttaggaatatagtatggggtgtgtgtggggtggatgtatgttggattgtaggggtgtgttagtagtggtaagtggaggggtattgggggtttaggagggtttttttttttagtagtgtttaggggttttaggtgagtattaagaattatttttagtttttgtagggtttttttgg

SEQ ID NO: 2660 - DNA, 2429 bp, Artificial Sequence
  chemically treated genomic DNA (Homo sapiens)
aaaatataaaaattagttgggtgtgatggtatgtatttttagttttagttatttgagaggttgaggtaggagaattgtttgaattagggaggaggaggttgtagtgagttgagattgtgttgttgtattttagtttaggtgatagattgagattttgttttaaaaaaaaaaaattagttgggtgtggtggtatgtagttgtaattttagttatttgggaggttgaggtgggaggatggtttgagtttaggagtttgaggttgtagtgagttatgattatatgattgtatttgggtgatagagtggaggtgatgtgtttttttaaatagttatgagaataatgtttttttttttgttttggtttaggaattttattattatgttatgttgttttgttgtgttgtgttggtgttgtaggttggtggtaggatatttgtttattttataggttttgtttttagttttgaagtatggttttttttgattgttgtttatatggttttttgttgttagtttgggttatatatttgggtttttttatttttgtgggtttggtgaggtttggttatgtgtttgtgttatgttagttgtttttaagatgatgtttttagtaggattatatgtgaatatagtgattattatggttaggaggaagttggttgtttattattagtttgtttagggattttttgtattttggtggggattagtagattttgttatgagagagtagaaggtagtatgttgatttttaggagtgtttatagtgtggttgggtagagtagagttataaatgaatagatttagtgttgaggttattttgatttttttaggggttgttaggttgtgggtgtagggtttagtaggtttatttgattttagtattttatgtgtgtttgtttggggtggttagtttattgtttttttatttttagtttaattagtaggtgttttattatgagtttttttaggtttattttgtttatttttgttatgtgatttgggatttttgagatgagattatagttgtagagtatatagtatagggaggagtttattagtatttttttatttgtggtgttttggtttagtttttttttggttggggttggatttgttttggtagttaggttttgtgttatttgttttatttgttttgtaatttatttgtttaattgttattttggtggttgtgaggttagttgatagaatggagaggggtaagtattttttgtttggagaggatgggtgtgtggttatttgattgtttttgtaagtttggtggttgtgtgtaggttgttttggtggttttagttttttggggtaggtggggttttgtgtaggatgtagagattgggtgtggttttttgtagatgtttagatgtttttgggttgtggtttttgagatttagggtaaggttgttgattggattttagatttttttgtttgtttttttttttagttgttttttgtggtttggttttggttgtttgggttttagggttaattttgtatggttttgattattttggtttttttggattgttaaggatatgttgagagttggttgggtttggtttaagtgttgagtttagggtaggggtggggataggtagggtggagttttatttggaaagttaggtatgattttttttgggatattaatttttttgtagagttggttaatttgggtaattttgagggtgagttttgtgtggtataagagatgttttgaggagtttagttttatttggtgtgatgggatttgtggaagttgtgggaagtggttttggttatttgtgtgtttatatgttttgtgtttagattaagatatggtgattaaaaggataaggattatatttatggtttttttttagagtttggtaagttagtaggtatgagagggtgttggaatgttgtggtgggtttgtgtggggattttgtaggatttagggaatttgtagggtttggtttagggagtatataggggtttaggtaaaggtaaggttataggttgggggaggtgaagttggtagggggagggggagatttgttggttagagttgggttgggggttggtgggtagtgggtttggtttgagtagggggtgagggattggagagaaaggtagtttttgatggttttttttttaggggttggtttttttttggttttttttttttaatgattgtgtttttgttgaggttatagtttttggttttgtgtttatatttttagtgttaggttgtttggagatttgtttatggtttttttttggattatggagttttttttgttattggtgtttggagggttggtttgttgtttttgtattttggttagttaggatggtggggttttgtagttgaattgggggtgtttttttgtttgtttgttttatgtgtattagtggttagaattgtttttat

SEQ ID NO: 2661 - DNA, 2429 bp, Artificial Sequence
  chemically treated genomic DNA (Homo sapiens)
atgagggtagttttggttattgatatatgtaggatagataggtagaaaggtatttttagtttagttgtaggattttattattttagttggttagggtgtaggggtagtagattagttttttaggtattagtggtagggagggttttatggtttaagggaaggttataaatagatttttggatagtttggtattggaggtgtgggtgtagagttaagggttgtggttttgatgaagatgtggttattgggagggaaggattagaggaaagttagtttttggggaggggattattaggaattgtttttttttttaattttttgttttttgtttgagttaggtttattgtttattggtttttaatttagttttagttagtaggtttttttttttttttgttagttttattttttttgatttgtgattttgtttttgtttgggtttttgtgtgttttttaagttaagttttgtaggttttttaggttttataaggtttttatataggtttattatagtattttaatatttttttatgtttgttgatttgttaggttttgggagggagttatggatatagtttttgtttttttggttattatattttgatttgggtgtagggtatgtgggtatatgggtggttaggattattttttataatttttataggttttattatattaggtgaggttgggttttttagggtattttttgtgttatatagagtttgtttttaaggttgtttgaattggttaattttataggagggttggtgttttagggagaattgtgtttggttttttaggtgaggttttgttttgtttgtttttatttttgttttgggtttagtatttgggttaagtttaattaatttttagtatgtttttggtagtttaagaaggttagagtggttaaagttatgtagggttggttttgaggtttaggtggttagaattagattataaagagtagttggaggaagaggtaggtaggagggtttggggtttagttagtagttttgttttgggttttagaggttatagtttagaagtatttgaatatttgtaggaagttatgtttagtttttgtattttgtataggattttgtttgttttaaggggttaagattattagggtagtttgtatataattattaggtttgtagaagtagttagatggttatatgtttattttttttaggtggaaaatgtttatttttttttattttgttaattggttttatggttattgggatagtagttgggtaagtaggttatagggtgggtggggtaggtgatgtaaaatttggttgttagggtgggtttaattttaattggaaggaggttgggttagggtattataggtgggaagatgttgatgagtttttttttgtgttgtgtgttttgtagttgtgattttattttaagagttttaggttatatggtagggatgggtaaggtgagtttggaggggtttatggtggggtatttgttggttgggttagaggtgaagaagtagtgagttggttattttgagtaggtatatgtgggatgttgggattaagtgggtttgttggattttgtatttatggtttggtagtttttgagagagttaggatggttttggtattggatttgtttatttgtagttttgttttgtttagttatgttgtggatatttttggaagttagtatgttgttttttgtttttttatagtaggatttgttgatttttgttagggtgtaagaggtttttgggtaagttggtgatgggtagttagtttttttttggttatggtggttattgtgtttatatgtggttttattagaaatattattttgaaagtaattggtatgatataggtatatggttaggttttattaggtttatagggatggaagagtttagatatgtagtttaggttgataataggaggttgtgtgggtagtagttgagaggagttatattttaagattgaaagtagagtttgtgaggtgggtaaatgttttgttattgatttatgatattagtatagtgtagtagggtaatgtggtatggtggtgaggtttttgagttaggataagaaaagaagtgttgtttttatggttatttgaggaagtatattatttttattttgttgtttaggtgtagttgtgtgattatagtttattgtagttttgaatttttgggtttaagttatttttttattttagttttttaagtagttaagattatagttgtatattattatatttggttaattttttttttttgagatagagttttgatttgttatttaggttggagtgtagtggtgtgattttagtttattgtagtttttttttttttggtttaagtgatttttttgttttagttttttaaatagttgggattagaggtgtgtgttattatatttagttaatttttgtatttt

SEQ ID NO: 2662 - DNA, 2267 bp, Artificial Sequence
  chemically treated genomic DNA (Homo sapiens)
ttaagggtttttatttgtttttttagttttagttttttttttgaagaaagaggtaagatgttagtggaaaataatttttattgagattttattaattgtaaaatttgtttttggtattaagttttttttttttttgtaatttggtttttttttagtggtttttgtggggagagaggtagtggttagaggtagaagatgataggtgatagtagatgtttattttagaggagattaagattttgggttagtttttatagttataagagaggtttaaggtattaagattatttttattttggttggagttaaaggtaggtggttgtttaagttattatatttagtgaggggggtaggtagaggtgtttattatgaatgttttttttttttttatggtttggaagtggttatggttaaatttggaggtggtgttaatgaatttaaggttaattttttttagagtttgttgttttgtttgtattagtaaggattatgggttaagaggggaagggatttaggattatgaggagttaggttttttttagtattgtttatagtgtttttgtatttgggaagttatatgattaatttagttttttttattatttggtagatgaggatatatttaaagtagtaaatagtttagtaaggttagattgggaatttttttattttaggattttaaagttagtgtgaaaggattgttaatatttttttttttttttttttttttattatagggttattagtgtttgtggttttggattttttttttataagagtttttttatgataagttaggatttgttttattttgtggagggtgagtatttgttttttggtttttattatatagttttttagtatgataaagttattggttattttattatagtggataaagttattttggaaaatgagtattggattagtataggtttaggaggggattgttgtgtagatgatttttttaggtttaggttttttttgattatagggttgtttttagaaggaaggtaataaggaatggttttgtagtttgttttgggtgttgtgtttagtgtatattttaggttttattattgaatagttgagtttgagattttattttttattagttaattttgatgagtggatttagatgataatatgttatttataagggatatagttaggtgttgtgttggttttagttaatgattttgttagtagtttttaggaagtagtttatttttaaaagtatgaggtttgggatggttttatagagtagaatatttattatttattagagggttgatgtttttgttagataggttatagttagtggaggtattgtttttgattagtttgttgtttttgataaggtagttttggttaattttataaatttgaatgaataagaagggtgtaaggttggggtattagggataaataatttagatatgttagtgtgttgatttgtaaagtatgttagaaggtagttgaggttttagttttagttatagtgtattttaaggttagagtaaaaagttggttggttttttaggtttttttttgtaaggtggttgggttaaaattaaagattttgttgtataatataggtttgttatttttttggtggtggtattagggattaataagattagtatttttagttatattagttagttttattatagttattttataggatggtattttataaattattaagatgggttagaattgattatgagaagtaagttattgatgtttatgtgatgtataagttatagttagtgaagtagtattgataggtatagaaattttattttttattatgggggtttttttttatttttagggagttatttttagaattttatttttttgttgattttagtgtggtgatggtagtttttttgtttagtgtgtgttatagagaaggttatatgagtaggatgttatgttttaatataggttattttgtgtaggttttggtgggttttgtggggtagttttttggtgtgttaatgattggtgatttttggaatggatatatattattttattttagtgtttagtattttttattgatttttttttgttatttagtaattattaattatggttgggttatttgagggagtgataagattattttatgtgtattatttataggttttttttgttaagttggataggttttgggggtgttattttgaatttaattttgaatgggtgttttttaaggtatttattagtttaagtttttttatttatagggattg

SEQ ID NO: 2663 - DNA, 2267 bp, Artificial Sequence
  chemically treated genomic DNA (Homo sapiens)
tagtttttgtgaatgggggagtttaaattaatggatgttttaaaaagtatttatttagaattgagtttagggtgatatttttagagtttatttagtttgataggggagatttgtgggtaatgtatatgaaataattttattatttttttagatgatttagttatggttggtaattgttgagtagtaggaaggggttagtgggaggtgttgggtgttgaggtgaagtaatgtgtatttattttaggggttattagttgttggtatattaagaagttgttttgtaagatttattgaggtttgtgtaaggtggtttgtattggggtatggtattttgtttgtgtagttttttttgtggtatgtgttgggtagaaaggttattattattgtattgagattaataagaaggtgaggttttgagagtggttttttgggggtgggaagaggtttttgtgatggggagtggggtttttgtgtttgttagtgttgttttattgattgtagtttatgtattatgtggatattagtggtttgttttttatggttagttttggtttattttgatgatttgtaaggtgttattttgtagagtggttgtggtggggttgattggtgtggttggggatattagttttattggtttttgatgttattattaggggggtgataggtttgtgttgtatagtaggatttttagttttagtttagttgttttatagaaaggaatttggagggttagttagttttttgttttgattttgggatatgttgtgattgggattgaggttttagttgttttttagtgtgttttgtaggttagtatattggtatgtttgggttatttgtttttaatgttttagttttatattttttttgtttatttagatttataagattggttagggttattttattaaggatggtaagttgattaagaataatgtttttattgattatgatttatttgataagagtattaattttttggtaagtaatgggtgttttgttttgtgaggttattttaggttttgtgtttttggggataggttgttttttaggggttgttagtaggattgttaattgaagttaatataatatttagttgtgttttttgtaagtggtatgttgttatttgagtttatttgttggggttggttggtgagaagtggggttttaggtttagttgtttagtgatgaggtttggaatgtgtgttgggtatagtgtttgagatagattgtggaattgttttttgttgttttttttttgagaatagttttgtggttagggagggtttgaatttggaggggttatttgtatgataatttttttttgggtttgtgttgatttgatgtttgttttttagggtggttttgtttattatggtgaagtgattaatgattttgttatgttgaaaggttgtgtggtgggaattaagaagtgggtgtttattttttgtaaggtgaggtaggttttgatttgttatgggggggtttttgtagagggaggatttaaggttatagatgttggtggttttgtggtgggagaggaaaggaaggagagggtgttggtagtttttttatattggttttgaagttttgagatgaggaaatttttagtttggttttgttgggttgtttgttgttttgagtgtgtttttatttgttggatggtgggggaggttgaattgattgtgtggttttttagatgtaggggtgttgtgaatagtgttgaggaaagtttggttttttgtaattttaaattttttttttttttggtttatagtttttgttggtgtagatgaagtggtgggttttggagaagattgattttaagtttattgatattatttttaagtttggttatggttgtttttagattatggaggagaagaaagtatttatggtgagtatttttgtttgttttttttgttgggtgtggtggtttgggtagttgtttgtttttggttttagttggggtaggggtggttttgatgttttaggttttttttgtggttgtggagattggtttagagttttggttttttttagagtgggtatttgttgttatttgttattttttatttttgattattgtttttttttttatagggattattgaagaaagattgaattgtaaaggaagaaggagtttaatgttaggaatagattttgtagttggtggggttttaataaaagttattttttattgatattttgtttttttttttaggagagaggttgggattggggaggtagatgggggtttttga

SEQ ID NO: 2664 - DNA, 2426 bp, Artificial Sequence
  chemically treated genomic DNA (Homo sapiens)
gttttggttaattttataaatttgaatgaataagaagggtgtaaggttggggtattagggataaataatttagatatgttagtgtgttgatttgtaaagtatgttagaaggtagttgaggttttagttttagttatagtgtattttaaggttagagtaaaaagttggttggttttttaggtttttttttgtaaggtggttgggttaaaattaaagattttgttgtataatataggtttgttatttttttggtggtggtattagggattaataagattagtatttttagttatattagttagttttattatagttattttataggatggtattttataaattattaagatgggttagaattgattatgagaagtaagttattgatgtttatgtgatgtataagttatagttagtgaagtagtattgataggtatagaaattttattttttattatgggggtttttttttatttttagggagttatttttagaattttatttttttgttgattttagtgtggtgatggtagtttttttgtttagtgtgtgttatagagaaggttatatgagtaggatgttatgttttaatataggttattttgtgtaggttttggtgggttttgtggggtagttttttggtgtgttaatgattggtgatttttggaatggatatatattattttattttagtgtttagtattttttattgatttttttttgttatttagtaattattaattatggttgggttatttgagggagtgataagattattttatgtgtattatttataggttttttttgttaagttggataggttttgggggtgttattttgaatttaattttgaatgggtgttttttaaggtatttattagtttaagtttttttatttatagggattgattaatataattttaagtttttttttgtagttattagtaggttataaagagtaaagggtttaggaatgtgttaagaagttgttttttggttttttgttattttagttatttttgattataaggttgtttttagaaggaaggtagtagagaatggttttatattgtttgatttgggtgttgtatttagtgtttattttgagttttattaatgaatagttgggtttgaaattattttttttttaggtttgtatagtaatttaagttattgtaaagtttatttttgtagtttttgtttttggttattttgatgatgttgattattttattttgtttaaatatttggtttataggtatttgttgtttaagttttttgtgggtttagtttagttttttggttatagtgtttttgtttatttggatttttattaggtgggtttttttttggtgtagaggaagtaggtgtatttaggagaaggtagatatagtttagttttagttgttagtgttttttttatagtagaggaattgtagttttatgtggtttgattgatgttaagtatatggtaaaaagttagtaattttgaataagttattgaattttattaagaggaaggaatttttatttttgttaatagtaataatttaattttggatattggtgtttgagttattgttaggatgagtggataagatttatattataggtaaataattagattttagtttttattagtttaatgtttttgtggttgttttttgggttagttttttttggggtattgtagtggttttattttagttatttatatttgttttagtgataagtttgtttttgagagagtataagttttaagtaagaaaatgtattattgggagtggtggtttatatttgtaattttagtattttgggaggttgaggtaggtggattatttgaggttaggagtttaaaattagtttgattaatatggagaaattttgtttttattaaaaatataaaattagtagggtgtggtggtgtatgtttgtaattttagttatttaggaggttgaggtaggagaatagtttgaatttagaaagtggaggttgtagtgagttgagatagggttattgtattttagtttgggtaataagaatgaaattttgtttttaaaaaaaaaaaaatgtatttaagtataaagtttttatttaaggatagtttggtaatgttttgataaaattttaatggtggatatgtatttttatttgtggtggtttttattatatggggttgtatttagtatttgagattagttaggataattagtaataggatagtaagaggtatttattttaattaagttaataaaaagtttgtttagtttattaattaggtttttaggagagtagttagtattttataattgatttttaggtaggtattttagtgttattggtgagttattagttgaattttaaaggggaatggtttttttgttaagggttagtaaggatatagtgttttttgttggtaagggagaagtt

SEQ ID NO: 2665 - DNA, 2426 bp, Artificial Sequence
  chemically treated genomic DNA (Homo sapiens)
ggttttttttttgttagtagagggtattgtgtttttattggtttttagtaagggaattatttttttttaaaatttaattggtgatttattagtaatattgaaatgtttgtttgaaagttggttgtgaggtattggttgtttttttggaaatttagttgatgagttgagtaggttttttattgatttggttagagtgggtgttttttgttgttttgttattggttattttggttgattttaagtgttgagtgtaattttatgtggtgagggttattatggatgagagtgtatgtttattgttgaaattttgttaggatattgttaggttgtttttgagtgaaagttttatgtttaaatgtatttttttttttttagagatagaattttgtttttgttgtttaggttagagtgtaatagttttattttagtttattgtaatttttattttttaggtttaagttatttttttgttttagttttttgagtagttgggattataggtatgtgttattatgttttattaattttgtatttttagtagagatggggtttttttatgttggttaggttggttttgaatttttgattttaggtgatttatttgttttggttttttaaagtgttgggattataggtgtgagttattgtttttggtgatgtatttttttatttagagtttgtgtttttttaaaagtaggtttgttattagggtaagtgtaggtggttgaggtaaaattattgtagtattttaaaaggaattgatttaaaggatagttataggaatattgggttggtaggggttgggatttggttgtttgtttgtggtgtgggttttgtttgtttattttgatagtaatttaggtattagtatttaaagttaagttgttgttgttggtaaaaatgaaagttttttttttttggtgaggtttagtgatttgtttagagttattggttttttgttgtgtgtttgatattaattaggttgtatggagttgtagtttttttgttgtgggaggagtgttggtagttggagttgagttgtgtttatttttttttagatgtgtttgttttttttgtgttagaagaaggtttatttgatggagatttaggtgaatggaggtattgtggttgagaagttggattgggtttgtgagaggtttgagtagtaggtatttgtgaattaagtgtttgggtaggatgagatgattgatgttattggggtgattaagggtaaaggttataaaggtgagttttgtggtggtttgagttgttgtgtaaatttgggggagaagtggttttaggtttagttgtttgttgatgaggtttagagtgagtgttgggtatagtgtttgaattggatagtgtagaattattttttattgttttttttttgagaatagttttgtggttagaagtggttgggatagtggagggttaggggataattttttaatatgtttttggattttttgttttttgtagtttattgataattgtaaaggggagtttggaattatgttagttagtttttgtgaatgggggagtttaaattaatggatgttttaaaaagtatttatttagaattgagtttagggtgatatttttagagtttatttagtttgataggggagatttgtgggtaatgtatatgaaataattttattatttttttagatgatttagttatggttggtaattgttgagtagtaggaaggggttagtgggaggtgttgggtgttgaggtgaagtaatgtgtatttattttaggggttattagttgttggtatattaagaagttgttttgtaagatttattgaggtttgtgtaaggtggtttgtattggggtatggtattttgtttgtgtagttttttttgtggtatgtgttgggtagaaaggttattattattgtattgagattaataagaaggtgaggttttgagagtggttttttgggggtgggaagaggtttttgtgatggggagtggggtttttgtgtttgttagtgttgttttattgattgtagtttatgtattatgtggatattagtggtttgttttttatggttagttttggtttattttgatgatttgtaaggtgttattttgtagagtggttgtggtggggttgattggtgtggttggggatattagttttattggtttttgatgttattattaggggggtgataggtttgtgttgtatagtaggatttttagttttagtttagttgttttatagaaaggaatttggagggttagttagttttttgttttgattttgggatatgttgtgattgggattgaggttttagttgttttttagtgtgttttgtaggttagtatattggtatgtttgggttatttgtttttaatgttttagttttatattttttttgtttatttagatttataagattggttagggt

SEQ ID NO: 2666 - DNA, 2306 bp, Artificial Sequence
  chemically treated genomic DNA (Homo sapiens)
tagtggtttatgtttgtaattttagtattttgggaggttgaggtgggtggattatgaggttaggagattaatattattttggttaatatggtgaaattttttgtttattaaaaatataaaaaattagttgggtgtagtggtgggtgtttgtagttttagttatttgggaggttgaggtaggagaatggtgtgaatttaggaggtggagtttgtagtgagttgagattgtgttattgtattttagtttgggggatagagtgagattttattttaaaaaaaaaaaaaaaaaaaaaaaaaaaagtttggtagggagtaggatatttggattttattttgttgtttttttggttgtgtgatatttaggttatgttgtttttttgggttttggtttttttatttgtttaagaggggttgatagttgtatttgtttttttagtttttttttaggaaggtggtagttataattagtatttgttgaggttgattttgtattaggtttaggataggtggggtttagggaggtttgttttttgttatgtttttttgttaggggagttttgaggtttttttagtgttatttttatgttatattttgttttagttttgtgtgttttaagttagggtattgagtgtgttagtatttgtagggataggtattggattttgggtggatttgagggtttgtgattatttttttagttgtttttttttagaggttattttttttaaggaaggaaagaatttttttgttattttttgtagtgtggttagtttaggttagtttgtatagtagggttagaattagggtttttggggagggatgtttgtttgtttagtgggaggagatggtatgtttgtgaagttgttatttagttagtttgggggttatgagtgttgtttttggtggtgttgtgtggggagggagggggttgagtagggtgggtatttgtatgtttgtgttttgttggtttttgatagatgatagttttttttttagggtttttagtgtagagttttttggggatattatggttatttttgtttagatgagagggagttggttgtttgtgatagtgttgtaaaatgttgttagggtttttttttttttttttttttttttttttttgtttttttttggttggtggttttttgtaggtttttgtttttgttggtgttggttataatgtttttatttttagggttttggtgttttagttttttgtgtttattgtgtttgtttgttagaatttttgtgtttttggtgtgtgtggtttgttgagttttgagtttttgttttttttagttttttttttttttgtgtttttaggaggtgtttttggaagttatggagttttattggtattaagattgattgttttttggggtgaggtagtaggttgtatagtttggggttttgttttgttatgggataattatataatttattgttttttttgaagtggttgtaatatttgtggtggatagagtgtttggaattttggttgggagtgggtagggttaggtttgggggtagttttggtagtagttgggggtaggggttgtttatattgagaagtttgataggtttaggtgttatttgttgtgtgattttggataggtttttgatttttttgggttttagtttttttttttgtaaaatggaggtaaatgaggatggaaggagatgtagtgtggagtattgagggtagaggagagttgagttgattttattttttgttttagttgtattgagagaggtgatttatgtagttgtttgtttgatttttgttttttaatattttttaatattttttttgttattaggtttaggtttatgggtggttttgagttgtattttttattgagtattaggagaaggtattgtggggttaggggtggttgagatgtttggaggttatagggttgtgagtattggtgttgtttattattttaggtttttagtatgtgttttagtttggttagtttagtggtagggtttttgtttgtggaggaagggaggttaaggtattttttttgagtaggaagtgagaggaatagttttgtatatattgggttttatatggtataatttgaaggtagatagtggtttttttgtatttggggaaattgaggtttagagagttagggattttttaagattagttagtagtagttgtttttttttggggtgttattttttttgttttttttgttttgtgtttgtttagtttttttgttttggtgattgaggattgttaggtaggggttggtgttgggtggggggtggtgggtttttttgtagtgta

SEQ ID NO: 2667 - DNA, 2306 bp, Artificial Sequence
  chemically treated genomic DNA (Homo sapiens)
tgtattgtgggagggtttgttgttttttgtttagtattagtttttgtttggtggtttttagttattagagtaggagggttgggtaggtgtagggtaggagggataggggagatggtattttaggaaggggtagttgttgttggttggttttgggaagtttttggttttttgggttttagtttttttaggtatagaggagttattgtttgtttttagattgtgttatgtgggatttagtgtatgtagagttgttttttttattttttgtttaggaaaggtgttttggtttttttttttttataggtagaggttttgttattgagttggttaggttggggtatgtgttgggaatttggggtgatgggtaatgttaatatttgtagttttgtgatttttaaatgttttggttatttttggttttatggtgtttttttttggtgtttagtggagggtatggtttagggttatttatgagtttgggtttgatggtggggggagtgttggggagtgttgggagatagaggttagataaatagttgtgtggattgttttttttagtgtggttggggtagagggtggggttggtttagtttttttttgtttttgatgttttatattgtatttttttttatttttatttgtttttattttatagaggaggaaattgagatttagagagattaggggtttgtttaaggttatatagtaagtggtatttaggtttgttagattttttagtgtaggtggtttttgtttttgattgttgttaaggttgtttttaaatttggttttgtttgtttttagttagggttttagatgttttgtttattgtagatattatagttattttaggaaagatagtagattgtatagttattttatagtagggtagagttttaaattatataatttattattttattttaaagggtagttggttttggtgttgatgggattttgtggtttttagaggtattttttggggatgtgggaggaaagagggttgaggagaataggggtttgaggtttggtaggttatatgtattaagggtatagggattttggtgggtaggtgtggtgggtgtagggggttgggatgttgaaattttgggagtggggatattgtggttagtattagtagggatgggagtttgtaggaaattattaattagagagggatgaggaagagagaaaggaggagggagggaaagttttggtggtattttgtgatgttgttataggtagttggtttttttttatttggataggagtggttataatgtttttaaggaattttgtattggagattttaggaggagggttgttatttgttgaaggttagtaagatataggtatgtgagtgtttattttgtttggttttttttttttttgtatagtgttattagaagtagtatttgtggtttttaggttggttgagtagtggttttatgggtgtgttgtttttttttattgggtaggtaggtatttttttttaggggttttggttttggttttgttgtgtaggttggtttgagttgattgtattgtaggaggtggtgggaaggttttttttttttttgagggaagtggtttttaggggagagtagttgggggggtagttatagatttttaggtttatttagggtttagtgtttgtttttgtgggtgttggtatatttagtgttttagtttgggatgtatagggttgggatagagtgtagtatgaggatgatattgagagggttttggggtttttttagtaggggaatgtggtgagagatgggtttttttaagttttgtttattttgggtttggtgtagggttagttttaataaatgttaattgtggttattatttttttggggaaaagttgagggggtagatatgattgttaattttttttaaataggtgaggagattgaggtttagagaggtaatgtgatttggatgttatatagttaagggggtagtagagtgaggtttaaatgttttgttttttgttaagtttttttttttttttttttttttttttttgagatggagttttattttgttttttaggttggagtgtagtggtgtgattttggtttattgtaagttttgttttttgggtttatgttatttttttgttttagttttttgagtagttgggattataggtgtttgttattatgtttggttgattttttgtatttttagtagatagggggttttattgtgttagttaggatggtgttgattttttgattttgtgatttgtttgttttagttttttaaagtgttgggattataggtatgagttattg

SEQ ID NO: 2668 - DNA, 2473 bp, Artificial Sequence
  chemically treated genomic DNA (Homo sapiens)
tagttttgatgtttgagtatttttaatgtttgattggattttttattttttatttttttttgggtgatgttggttattttggtttgtttttagttagaatttagtttggttagtttagatagagtgatttatttttttagttattttttatttattaattttatttggagttttgtttttgaatttttatatttttttgtgtttgaaatggagtataattttttttttttgttgtaaaattttattgtaggggtttttgtgagtagagattgttttattgtttggaataagttttagaagaattttatttttaatatgggaagtggattagagggtagagtttttagggtttttttttttagttggtagtttatagttttatttttagttttagaggtataggttttttattgttgggttaggaatgggaatagtaggggttttggagtgggtagggggtttttgggtaggaggtgtatagagggtatgggttggttattttgggtttggtaatggttatttgttttttgtatatgatggttttatagggtatttttatgtttattatgttataaatgatgttttaaggatttgaattgggggtggaattgatatttttggatttttaagtttaggtgtattttaaaattgttgagataggatggttgaggttttagaattttaaggtgtaatattatttatttagtttaagttgtggttttaaatttttatttgaaaattttggttttgtttatgtgggttagattatgttgggtaggaggatttggtttttgaggatttagttgtttagagtggtttagatttaaagttaaaaggatgttttttttattttttttttgggttttgttttttttttaattttggagtgtgtggttagatgttagttagatgaggttttgtatttttggatagttttttgatttttttttttttttattatgaggtggtttttgttattgggttttaggataaagttttggggtagtttggatggtgttttgattttaatttttttagggggtttttagttaagggttttttttgtatggaatttttaaagttagtaagaaatagaagttttttgaatattgttaatgttttgaatatttagtatttatgaaatttaagtgaattagttaaaaataaaaatgtggtgatgattatttgttgtgggtttaatttaatttgaggatttatttaaaataaaattttggggaatgaaaatagaagttagtagtatatttttagggttagtagggagtatatttgtttagtatttgagtttttgttaggtgttagattttgtttttgatagttgtgttgggtgtgtgtatataagttttgggtggaggttagggttgtatttagtgtatatgagatgttatgtgggattggaaatgttttttgtgtttttttgagttatatgaaattattgagaagtttttgatttgggggttattagaggaatttggtttattttgtttggaatatagagggaaggttggttatggggaaaatttagaggtggtaattttgtgtttttaatagatagtatgagttattatgagaaggggaaaggggatttggtttttagatatatattaaggattttaatgtggatagtggtaaggtgttgtttttgattttttatttgttgtttatttaatttggtattttagggttgtattggttgagttattattaaggtttattttttgtttggtttaggatttttttggagatgagggtagataagtggatggtattttttgttttaaggttttggggttttatgaagtagttgtttttattgaatagttttagtagttgtagtgtttttttttgtattttttagaatttgttgttttgaagttttgtttgttattattgtgtttattttttttagttagttatatagaataaatttatttttttgtttttggaaaaggggttaggtttttggatgtttgaaaatagttgttttgttttttttgattttttttttgttattgttgtaatttaaggtgaggagttgttatttataaggtatttattgtttgttgagggttttatttaggttaggatgtggttatttttatttagagatgaagaaattggggtttggtgaggttaattgtttgtttagggttatatagggaataggagatgttggatgtaaatttagttttgtttggttttgaaggttgttttttttttggttttgtagagtgttagttttttttttataagttggatgtttttggtttaatattttatagagaaaaggtttttaatgttttttttgttattagtgtttttttgtaaaagagtattttgaatgtttatgttagttatagaggtgttttttttattttttggtaggtgggttttttttattttttttttttgtattgattggtatgtatttaggttaggtagtagaatgtttggt

SEQ ID NO: 2669 - DNA, 2473 bp, Artificial Sequence
  chemically treated genomic DNA (Homo sapiens)
gttaggtattttgttatttgatttgaatatatattaattgatatagaaaaggaaggtgagaggagtttatttgttagagggtgggaggggtgtttttgtggttggtgtgggtatttaggatgtttttttgtagagaagtgttgatggtaggggaggtattggaggttttttttttgtggggtgttgggttgggggtatttagtttatagaagagaggttggtgttttgtagggttggggagaaggtagtttttagaattagatggggttgagtttatatttagtgttttttgttttttgtgtgattttgggtaagtagttaattttgttgaattttagtttttttatttttaaatgggaataattgtgttttgatttaaataaaatttttgataaatagtaggtgttttgtaagtggtagttttttgttttaggttgtggtggtggtgggggaggggttagagaggatagggtagttatttttaaatatttaaggatttgattttttttttgaggataagggaatagatttgttttgtgtgattgattgaagggaatagatatagtggtgatagatggagttttaggataataggttttgaggaatataggaaggaatattgtagttgttggagttgtttaataggaatggttgttttatgaggttttggagttttggagtagagggtgttatttatttgtttgtttttatttttaagggagttttggattaggtgagaggtgggttttggtgatgatttggttggtatagttttggggtgttaggttgagtgggtgatgggtggagggttagggatagtattttgttattgtttatattgaagtttttggtgtgtgtttggaagttaagtttttttttttttttttatggtgatttatgttgtttgttgagagtatgaagttgttgtttttggattttttttgtaattagttttttttttgtgttttagataaggtgggttaggtttttttaatggtttttagattaagaattttttagtagttttatgtaatttaagggagtgtaggaggtatttttagttttatgtagtattttatatgtgttaagtgtagttttggtttttgtttggggtttgtgtgtgtatgtttagtatagttgttaggaatagggtttggtatttggtaaggatttaggtgttgggtaaatgtgttttttattagttttggaggtgtgttattgatttttgtttttattttttaaggttttattttaagtaaatttttaaattggattaaatttatagtaaatgattattattatgtttttatttttaattagtttgtttgggttttgtggatgttggatatttaggatgttagtaatgtttaggaagtttttattttttattggttttgggggttttatgtagggaagatttttgattaggagttttttggggggattggggttagaatattatttaggttgttttgaggttttgttttgggatttagtgataaaggttgttttgtggtggaaggaaaaggggattaaaggattgtttagaaatgtgggattttatttggttggtatttggttatatattttagagttggggaggaggtagggtttaagggagaggtgggagaggtatttttttggttttgggtttgggttattttggatagttgggtttttagaaattaagtttttttgtttaatatggtttgatttatatgaatagggttagggtttttaagtaggagtttggggttatagtttgggttggatagatagtgttgtgttttagggttttagggttttagttattttgttttgatagttttgagatatatttgagtttggaggtttagagatgttagttttatttttggtttagatttttagggtattgtttatagtatgatgaatatgaggatgttttgtgaggttattatgtgtagggagtaggtggttattgttaggtttggggtggttaatttatgttttttgtgtattttttgtttgagggttttttgtttattttggagtttttgttgtttttatttttggtttggtagtggggagtttgtgtttttggagttgagagtgggattatgggttgttagttgaggagaagagttttgggggttttgttttttggtttattttttatgttaagaataaaatttttttgaggtttattttagatggtaaagtagtttttatttataggggtttttgtaatgaggttttgtaataggggagaaagattgtgttttattttaaatataaggaaatgtggggatttagaagtaaggttttaggtggaattggtggatggaagatggttaagagggtgggttattttgtttaagttgattaggttggattttggttagaggtaggttagggtgattgatattatttagaggaaggtaggggatgaggaatttggttaggtattgagggtgtttagatattgaaattg

SEQ ID NO: 2670 - DNA, 2498 bp, Artificial Sequence
  chemically treated genomic DNA (Homo sapiens)
taaaatgtaagggagggtatgggtattttttattttttataaataggattttgttttttataatttttttattgttttatttttatttgattaaattttaaatgaatatttgaggtagataattataagagattttttttgaaagtaaaattgagatgaaatttttggttaaatgggtttgtttattatagtgtggatttggagagagatgtaagtaagaagaaaagttttggttgggtgtagtattttatgtttgtaattttagtattttgggaggttgaggagggaggattgtttgagattaggagtttaagagtagtttgggtaatatagtaagattttatttttatgaaaatataaaatattagttaggtgtggtggtatatatttgtagttttagatattttggaggttgaggtgggaggattgtgtgagtttaggagttggaggttgtagtgagttatgatggtgtttttgtattttagtttaagtgatagagttagattttgtttttaaaaaaaaaaaaaaagagagagagaaaaaaaaaataaaagtttagtttagtattgtggtttatgtttgtaattttagtattttggaaggttaaggtgggtagattatttgaggttaggagtttaagattagtttggttaatatggtgaaattgtgtttttattaaaaatatatatatatatatatataaaatattagttgggtgtggtggtgtatgtttgtaatgttagttattagggaggttgaggtaagagaattgtttgaatttagaaggtggaggatgtaatgagttgagattatgttattgtattttagtttgggttatataagtgagattgtatttttaaaaaaaaaaaagaaagaaagaaaagaaaaattttatagggtatattatttttattttgagttagtgatttaggttgatgataaagtagtgggaatagttattagggatttttatttattaggtatagtttttaagggttatatatggtttgtttggtaattgtttgtggagaatttgttattatatatatgtagagtagaaggtgtgattaatgtgtttttaaatattattagtattgttgttgtgattttgaggagttttttaatattaatgagggattgatttttttagttttatataaatagggaatttaagaagtgggtatatggggttagggtatttaaaattttaaggagttttagaaaatgtataatttttgttttagatttatttttttattggttggtgttgtaatatatttagttgttgagggaatttttgttagttgttgtggttatttttttttttttgaatggtatttaagattatttttttaaattttgtaggtaaattttttattgtttattggagaatgagttattttatagggggatgtttatttttttttattttatgtaatgtgttatttttttttttttataggtttttgatgttttttgtgtaggaggagaagtatttgtatttatgttaaggtttagtgatgtttgtaatgtgttagatgttgggtggagtgttttttattatttgttttaatttttgttatgattttgtttaatttaaaagatagatgaggaaattgaggtttggggtagtaaggagattagtttagtggaaggttataggtttggttttttgtattgtttttttttttgaggtttgggatgtaaaatttgattttaatgtttagttattaggtgattaatggaggaaatgtgagtatttttgtgtagtttattatagttaggtgggttttgatgtttgtaataagttttatttgggtaggatagtggttgaagtttagattatagtggtttaggtaaatgtaatttatgaaagtagaagttggttaagattagtgtttttaaggataagggaggaagaaatgaggtgggtggggttgggataaggaatttttatataggggtattttttttttttttatttatttttgtagagatgggggtgaagatttttgattttgaattagttttatttgggtttattttggtttttttgtaggaaatttttattattttttttatattttaggggttaaaggtagtagggtgttagggtgattatgatgaatgttgtttttggatggggtttttattttttaggtttgggattaggataggatgtatttttgtaataaagtatttgtgttttttggtatttagtaggtattagttatattggtaggtgttttttttttattggggttttaggagatgttagaattgagttattggatagaatagttgattgaggattagtgaggtagtatggttttgttttaattatattttggtttttaggttaggggtttgaattattgttttgttatttgtggggaataaatgggaagatttaaatagttaatggtatgatttggtgatggttatgaggaggtaagatatagagttggtttttatttttagtatttgttggtaggaaa

SEQ ID NO: 2671 - DNA, 2498 bp, Artificial Sequence
  chemically treated genomic DNA (Homo sapiens)
ttttttattaatagatgttggagataaaaattaattttgtgttttgtttttttatggttgttattaggttatgttgttggttgtttaggtttttttatttgttttttataggtgatgggatagtggtttgaatttttagtttgggggttgggatgtgattggggtaaggttgtgttgttttattgatttttagttagttattttatttagtggtttaattttggtattttttaggattttagtgaggaggaagtgtttgttggtatagttggtatttgttgagtgttagggagtataggtgttttgttgtaggagtgtattttattttggttttaggtttagggggtgaggattttatttagagatagtatttattatggttattttggtattttgttgtttttggtttttgaggtgtaggaggggtgatgaggattttttgtagagggattgggatggatttagatggggttggtttggggttagggatttttatttttatttttgtaggggtgggtagggaaggaagggatgtttttgtatgggaattttttgttttagttttgtttattttattttttttttttttatttttgagaatattggttttagttagtttttgtttttgtaggttgtatttgtttgggttgttgtggtttgggttttagttattgttttatttgagtgaggtttgttatagatattagggtttatttgattgtggtgggttatatgaggatgtttatattttttttattagttatttgatggttaggtattggagttagattttatgttttagattttggggaggaggatagtgtaggaagttaggtttgtggttttttattggattgatttttttattgttttgggttttagtttttttatttgttttttgggttaaatggggttgtggtgaggattaagatagataatgaaaagtattttgtttagtgtttggtatattgtagatgttattaagttttggtataaatatagatgtttttttttttgtataggaagtattgggaatttgtgaggggagggggatgatatgttgtatgaagtggagaggagtgggtgtttttttgtgggatggtttattttttagtgggtagtgagagatttgtttgtggaatttaggagggtggttttgggtgttgtttaggaaagagaaagtggttgtggtagttggtagaaatttttttaatggttagatgtgttataatgttaattagtgagaaaatgaatttgagataaaaattgtgtattttttggaattttttagagttttaaatattttggttttatatatttattttttagattttttgtttgtgtagggttggaaaaattagttttttgttagtgttgggaaattttttaaaattatggtaataatgttaataatatttaagagtgtattaattatattttttattttgtatatatatggtgatgggttttttatgggtagttattagataaattatgtgtagtttttaaaagttgtgtttggtgggtaggaatttttggtagttgtttttattgttttgttattagtttgggttattgatttaggataaaaatgatgtattttgtagaatttttttttttttttttttttttttttttttggagatgtagttttatttgtgtggtttaggttggagtgtagtggtgtgattttggtttattgtattttttgttttttgggtttaagtggtttttttgttttagtttttttggtagttagtattataggtatgtgttattatgtttagttaatattttgtgtgtgtgtgtgtgtgtatttttagtagagatatggttttattatgttggttaggttggttttgaatttttgattttaagtgatttgtttattttggttttttaaagtgttgggattataggtatgagttatagtgttgggttggatttttattttttttttttttttttttttttttttttttttagaaataaggtttagttttgttatttaggttggagtgtaggggtattattatagtttattgtagtttttaatttttgggtttatgtgatttttttattttagtttttagggtatttaggattataggtgtgtgttattatatttggttaatgttttatgtttttatagagatggggttttgttgtgttgtttaggttgtttttgaatttttggttttaaatgattttttttttttagttttttaaagtgttaggattataggtgtgagatgttgtatttagttagaatttttttttttgtttgtgtttttttttaaatttatgttatggtgagtaaatttatttgattggaggttttattttgattttgtttttggaagaaattttttgtgattgtttgttttaagtgtttatttagggtttaattaaataaaggtggggtggtaaagggattgtagggagtaaaattttatttgtagagagtggggaatatttatgtttttttttgtgtttta

SEQ ID NO: 2672 - DNA, 2460 bp, Artificial Sequence
  chemically treated genomic DNA (Homo sapiens)
atttttgaggtagtatttattggttttattgatttttggtagtttagagtgagggtgaagagatgtttgggtttatgttttaattttattaattatatagtatttttgggtaagttatttatttataagttttagttttttattgtaaaatgtgattataatagaatttgttttaaggagtgagtttgatgattttttttttgtgtgaaatgtttagtgtttaatatagagtaagatgtttataatgattgttgtttgttgttttgtgtattgttttgatttgtgagtgttgttgattgtgggtgagtggttggtgaggttgggttttggatggtttttggatgtttttttttttttttatttttaggtttgtggagttattgtagtgtttttattatttgtggttttattttttttagttgtagtttttagtagttagttatagtttgaaaatattaaagagaaaattttagaaataatttataatttgatattgtatgttattttgagtagggtgatgaaattatgtagtgatgattgtgatttatttttttgtttagtgtttttgtgttgtaggtgtttttgtttgtgagttattttgtagtttttttggtgattagagagaaaaagtttaatttatagagggttttgtattatttgtggttttaggaatttatggggggtgttggagggtaggggttattgtaattttttgttttttgtgaggtttgtattaggtagttttttgttggtggtttggtttgggtttttgagattgtttttgaaagggaaagggattttgggtttttgggaattgtttaggaggtagggtagagggatttttagaagttgtagtaagtagttgtattattagttatgaggttgagaattaaggggaggaaggtgagttgttagttgtatggggttatatttgggtggggggatagagatagagtagtatagtttttgttagtaaggttgttaatgaagatttaggtagagagtaatttggggtgagtttataaggtggtggttagttatttatttttttatattttgtggttatttttaggtgagttgagtgaagtttttggttttgttatattttttaaggtaaaggtagtttttgttattatttttttgtttttatttgtttagaaatttttagtaggtatttttttttttttttaggaggaatggaatgggattttttgttttgttattgtaggattttggtgaggtttgtttaggggttttggtgagagaaaagtgtgataggaagtgtatgttagtaggtatttggagatgtatttttggtgatatgtataggtatggtagttgttttatttattataggtttttgtttgggatagtggggtatatgtataatatagatgaggtttagagatgtagagatttttaataaattttttttatgttagggagataggagatttagttgggaatgagtttatattatgaagttttttttttaggagtttatattggagtttaggagttttgttttattttagggtttttgtatttattattttttggtgggagtgagtgttttagtatagggttttataggtaggatttttgatattttttaaattttagagaggtttttttgattttatttatatgattttattttagtgatttgttttatttttttatagttgtttttatttttaaattgtttttttttttgataggattttgttttgttatttagtttggagtgtagtggtgtaattatgtatggtttattgtagttttgattttttaggtttaagtggatttttttattttagttttttaagtagttgggattataggtatgtgttattatatttagttaatttttaaattttttgtagagataggttttattaggttgttttaaatttttgggtttaagttatttttttgtattagttttttaaagtgttgagattatagatgtgagttattatatatggtaggtaaggaagggttgaggggttgttaatagtaaaggtttagtttttagttaagttaggttgtttgtgagaaaggttttttgtgtatttgggtatatgtggataggtatgggtgtgatgttagtttttatttgtagtttgtaggtgtgtttgtggtattgggtgtttatgtgtgtgttttgagtttgggggaagatagatagattatttttaggggtttttgttttttgtgttttgttattttggttatatttagaatttggtatagagttttggataagtagttaggtttggttaggatattttagattagtaaatttttttttttttgggttggtaggtagtggggttttaggtttagtttaagggatggggaagggaggggataggttgggatttttgtttagttagtatttttattaggatgagatttaattatggagattgataagaggtagtatttaggagatta

SEQ ID NO: 2673 - DNA, 2460 bp, Artificial Sequence
  chemically treated genomic DNA (Homo sapiens)
tggttttttgggtgttgttttttgttagtttttatggttagattttgttttggtggggatgttgattgggtaggggttttagtttgtttttttttttttttattttttaggttgggtttggagttttgttgtttattagtttagaaaggaaagggtttgttggtttgagatgttttggttgagtttggttgtttgtttagggttttgtattgagttttgggtatggttaggatgataggatgtaaagaataaaggtttttaggggtagtttgtttgtttttttttaggtttaggatatatatataggtatttagtattatagatatatttgtaggttgtaagtggaggttggtattatatttgtatttatttatatgtgtttaagtgtatagaaagttttttttatgggtagtttggtttgattgggggttgagtttttgttgttgatagttttttagtttttttttgtttgttgtgtgtggtggtttatgtttgtaattttagtattttgggagattgatatgggaggatggtttgagtttaggagtttgagataatttagtgagatttgtttttataaaagatttaaaagttagttgggtatggtggtgtgtgtttatagttttagttatttgggaggttgaggtgggaggatttgtttgagtttgggaggttaaggttgtagtgagttatgtatgattgtattattgtattttaggttgggtgatagagtaagattttgttaagaaaaaaggtagtttagaagtgaagatggttgtgaggaaataaaataggttattgggatggagttatgtgggtggggttggggaggtttttttgagatttgaaaggtattaagggttttgtttgtggagttttgtgttggaatatttatttttgttagggaatggtgagtgtgaaggttttggggtgggataaggtttttgggttttggtatgagtttttgagggaggggttttatgatatgggtttatttttagttggattttttgtttttttagtatggagaaggtttgttgggggtttttgtatttttgggttttgtttgtattgtgtgtgtgttttgttgttttgagtggaggtttgtggtgggtggggtggttgttgtgtttgtgtatgttattaagggtatatttttaagtgtttgttggtatgtgttttttgttatgttttttttttattagaatttttagataggttttgttggaattttgtggtgatagaataagaagttttattttattttttttgaaaaaaagaaaaaatatttgttgggaatttttgagtaagtgggaatagggaggtggtggtgggagttgtttttgttttaaaaggtgtgatggagttagggattttgtttagtttatttggggatggttatggggtgtagaggggtgagtggttggttgttattttgtgggtttattttaaattgttttttgtttagatttttgttgatagttttgttggtaggggttgtgttgttttgtttttgtttttttatttagatgtagttttatgtagttggtagtttatttttttttttttggtttttaattttgtagttgataatgtagttatttgttgtaatttttgggggtttttttgttttgttttttgggtagtttttaggagtttaaagttttttttttttttaggagtagttttaggagtttgggttaggttattgataggagattgtttgatgtaaattttatgggaggtaggaaattatagtagtttttattttttgatattttttgtggatttttgaaattgtggatagtatggaattttttgtggattaggttttttttttttgattattaagagggttataaagtgatttatgggtgggaatgtttgtagtgtggagatgttggatagaggaatgagttatgattattgttgtatgattttattattttgtttagaatggtatgtaatgttaaattatgaattatttttgaaattttttttttaatatttttaggttgtggttgattgttggaaattgtaattaaggaaagtgaaattatagataatgggggtgttgtggtaattttatgggtttgagagtgagggaggaagggagtatttaggaattatttagagtttaattttattagttgtttatttataattagtagtatttataggttaaggtagtgtgtgggatagtaggtggtaattattgtgagtattttgttttgtattaggtattgagtattttatatagagaaaaagttattaggtttattttttgaggtaggttttgttatgattatattttatagtaagaaattggggtttgtggatgaataatttgtttagggatgttgtatgattggtggggttgggatgtgagtttaggtatttttttatttttattttaggttattaggggttggtaaagttaatgaatgttgttttaagggt

SEQ ID NO: 2674 - DNA, 2300 bp, Artificial Sequence
  chemically treated genomic DNA (Homo sapiens)
tttttgttatggggttatggttggtagaggtagtttttttgaatttagggtttgttaggttgatggaggaagttattgtaggataagggggtgatgtattattatggggtagggttatatgattttaaagttgtatttagttttattttagtggtttataggtgggttgtagtaggataatgtttaattttgttaggttagggagggtaaaattttatgtaggttaggttaggttaggaaggagaatagagttatatttattaagggtaggaggatttaggggagtttataaaggttagatgggtgtaggaggtatagttagttatgttttgtagggtgagtagagtatggataggttagagggttatgaggttaggttttggaggttagtagaaggtatgttggggttttttgttttttatatgtatgtttgagttatagtttttagagttatagttttaaatagatggttttgtttttagtggtggtgatttgagtgttaggatgttgttttgtttatttgtttgtattttaggttgtaagagtgtaggtattgttgtgatataggtttttgaggttattaggtaagtattagggtttaggttgggtattaggttagaggataagattgggtttttggtttggtaatatttttttttattgttttttttgtagttgattttttagatttaaatatgaggtttttttttaggtttggtttttttttattaattttagttggttagggttttgattttgtaattgtttgtggttttttagttttttgttttgttttgttttttatttttgagagttgtaggtttttggtttaggaataaatttatgatgtagtttttgttttatttgttggtttattagtattatattgttagtattatattgttttatgttgggttttttgattttttttatagtttttttgttttataaagattataggatgggtatttattattttttaagttttattttttattagggtggagtttatgtgtagtgaaggtttagtttgtgttagggatgttgggatggagtgaggtggtaagtttaggtgttttttatgttttgaagttttttgtttgagtttggaagtgaggtatgtggttggtgttttttgtaggtttttttgatttttgttagatagggtttagttaagaaataagattaggaaattaggtgtttatatagagattttgttattatttgaggtttattatttttttggtgtttattaaatattagttagtgtggtttttatggtttgttttaaggaatagaggaaattaggaagtttgagtttgaaatgtttgtaaagtaaggggagttttgggtataagtaggggtttgagttgagggaagggtttatatttgggagatgtttgtttgttttgatgaggttgttgtagtggtggaattttgataagagtgtattgtgaggtattgtgtttatttttagttgttttgtgagataagtatttgagtttttatgatttttaagttaggaataggaggtttaaagaggtgtttagggtttttaaggtttattgagaggtattagtagggaagtagtttagatattatggaaggggtttttagtgtattgggatagtttgatttattttaggatttatgggggttatagttaggagtgttttatggtgttggataagaagagtggttgttttggttttggagagagggggtttatgtggtttattggttttttttattgttgttagttgagttttttttatatataggtgttttgtagaggattagtttggtttagatttgaggttttagatgattagtatatgtgaattgtttttgtattagtgaggtggtttttttgtttttttttttatttaaattttattgtttgtttaggaggtgatgggttaagttgggtattaaaattattttaattgttatttttaagtgatttattagggtttagagaggtagatttaggtttagtatttattttgtgtttgtttttttatttttgaatttttaggtttatattttgttggtggttagattatgttttttttaattttggaggaagttttttattttaaaaggattttgttatttttgtttggttttatttttgtagttttaggatttttattttaagttttattatttggtatgagagttgatgtggatttagggtgtgtttagtaagtgtttgtttagtaaattaataatatgtgttaatggttatatttgttatttaattgatgtaaaatttggggttagaagtatagttttta

SEQ ID NO: 2675 - DNA, 2300 bp, Artificial Sequence
  chemically treated genomic DNA (Homo sapiens)
tgggggttatgtttttgattttaaattttgtattagttaaataatagatatgattattagtatgtattattaatttattgagtaaatatttgttgagtgtgttttgagtttatattagtttttatgttaggtgatggagtttgaggtgggagttttggggttgtaggaatagagttaggtagggatggtagggtttttttggggtagggggttttttttggggttgggaagggtgtgatttggttattagtagggtatggatttgggggtttaagggtgaggggataagtatagagtgggtgttaggtttgggtttgtttttttgagttttgatgggttatttggggatgatagttgagatggttttaatatttagtttagtttattattttttgggtaggtagtggaatttaggtaagaggaggagtaggagggttattttattgatgtggaaatagtttatgtgtattggttatttgaagttttagatttaaattagattggttttttgtagggtatttgtgtgtagggagagtttagttggtagtagtgggaggggttgatagattatgtggattttttttttttaaggttaaggtagttattttttttgtttaatgttatgaaatatttttgattgtggtttttgtgagttttggggtgagttaagttgttttaatgtattaggagttttttttatggtgtttaaattgtttttttgttgatgttttttagtggattttggggattttggatatttttttgagttttttgtttttgatttagaggttatggaaatttaggtatttattttataaggtagttggaggtgggtatggtgttttatagtatatttttattaggattttgttattgtggtagttttattaggatagataaatattttttgagtgtgggttttttttttagtttaggtttttgtttgtgtttaggattttttttgttttgtaggtattttaggtttaggttttttggttttttttattttttgagataaattatgggaattatattgattaatatttagtgggtattgaggagatgatgggttttaaataataataaaatttttgtgtagatgtttggttttttggttttgttttttggttgggttttgtttggtaggagttaggaaagtttgtaggaggtattaattatatattttatttttgggtttagataggaagttttagagtgtgggaagtatttgagtttgttgttttattttattttagtgtttttgatgtaggttgagtttttattgtatatgggttttattttagtaggaggtgaagtttaggagatggtgggtgtttattttgtaatttttatagaataggaaggttataaagaaggttagagggtttagtatgggatagtgtggtgttggtagtgtggtgttgatggattagtaagtgaggtaggagttgtattgtgggtttgtttttagattagaggtttgtagtttttagagatgggggataagatagagtgggaggttgaagaattatagatggttataaagttaggattttgattagttgaagttgatgagaggaggttaaatttagagaagagttttatatttgggtttgaaagattaattgtagaggaggtagtggggaaaggtgttgttaggttagaagtttagttttgttttttgatttagtgtttagtttgggttttggtgtttgtttggtgattttgggagtttgtgttatagtggtgtttgtatttttgtagtttggagtgtagataggtgggtaaagtggtattttgatatttaaattattattattgaaaatagagttgtttatttgaagttgtagttttggaaattgtgatttaagtatgtatatgggaagtaagaagttttagtatgttttttgttggtttttagggtttggttttatagttttttgatttgtttatgttttgtttattttgtaaaatatgattggttgtgttttttgtatttatttggtttttgtgggtttttttgggtttttttgtttttggtggatgtggttttgtttttttttttggtttggtttggtttgtatggggttttgttttttttggtttggtagggttaaatattgttttgttgtagtttatttgtgggttattggggtagagttggatgtagttttggagttatgtggttttgttttatggtagtgtattatttttttgttttgtagtgattttttttattagtttgatagattttggatttagaggagttgtttttgttaattatgattttatggtaaggg

SEQ ID NO: 2676 - DNA, 2300 bp, Artificial Sequence
  chemically treated genomic DNA (Homo sapiens)
ggtgtaaggttggggtattagggataaataatttagatatgttagtgtgttgatttgtaaagtatgttagaaggtagttgaggttttagttttagttatagtgtattttaaggttagagtaaaaagttggttggttttttaggtttttttttgtaaggtggttgggttaaaattaaagattttgttgtataatataggtttgttatttttttggtggtggtattagggattaataagattagtatttttagttatattagttagttttattatagttattttataggatggtattttataaattattaagatgggttagaattgattatgagaagtaagttattgatgtttatgtgatgtataagttatagttagtgaagtagtattgataggtatagaaattttattttttattatgggggtttttttttatttttagggagttatttttagaattttatttttttgttgattttagtgtggtgatggtagtttttttgtttagtgtgtgttatagagaaggttatatgagtaggatgttatgttttaatataggttattttgtgtaggttttggtgggttttgtggggtagttttttggtgtgttaatgattggtgatttttggaatggatatatattattttattttagtgtttagtattttttattgatttttttttgttatttagtaattattaattatggttgggttatttgagggagtgataagattattttatgtgtattatttataggttttttttgttaagttggataggttttgggggtgttattttgaatttaattttgaatgggtgttttttaaggtatttattagtttaagtttttttatttatagggattgattaatataattttaagtttttttttgtagttattagtaggttataaagagtaaagggtttaggaatgtgttaagaagttgttttttggttttttgttattttagttatttttgattataaggttgtttttagaaggaaggtagtagagaatggttttatattgtttgatttgggtgttgtatttagtgtttattttgagttttattaatgaatagttgggtttgaaattattttttttttaggtttgtatagtaatttaagttattgtaaagtttatttttgtagtttttgtttttggttattttgatgatgttgattattttattttgtttaaatatttggtttataggtatttgttgtttaagttttttgtgggtttagtttagttttttggttatagtgtttttgtttatttggatttttattaggtgggtttttttttggtgtagaggaagtaggtgtatttaggagaaggtagatatagtttagttttagttgttagtgttttttttatagtagaggaattgtagttttatgtggtttgattgatgttaagtatatggtaaaaagttagtaattttgaataagttattgaattttattaagaggaaggaatttttatttttgttaatagtaataatttaattttggatattggtgtttgagttattgttaggatgagtggataagatttatattataggtaaataattagattttagtttttattagtttaatgtttttgtggttgttttttgggttagttttttttggggtattgtagtggttttattttagttatttatatttgttttagtgataagtttgtttttgagagagtataagttttaagtaagaaaatgtattattgggagtggtggtttatatttgtaattttagtattttgggaggttgaggtaggtggattatttgaggttaggagtttaaaattagtttgattaatatggagaaattttgtttttattaaaaatataaaattagtagggtgtggtggtgtatgtttgtaattttagttatttaggaggttgaggtaggagaatagtttgaatttagaaagtggaggttgtagtgagttgagatagggttattgtattttagtttgggtaataagaatgaaattttgtttttaaaaaaaaaaaaatgtatttaagtataaagtttttatttaaggatagtttggtaatgttttgataaaattttaatggtggatatgtatttttatttgtggtggtttttattatatggggttgtatttagtatttgagattagttaggataattagtaataggatagtaagaggtatttattttaattaagttaataaaaagtttgtttagtttattaattaggtttttaggagagtagttagtattttataattgatttttaggtaggtattttagtgttattg

SEQ ID NO: 2677 - DNA, 2300 bp, Artificial Sequence
  chemically treated genomic DNA (Homo sapiens)
tagtaatattgaaatgtttgtttgaaagttggttgtgaggtattggttgtttttttggaaatttagttgatgagttgagtaggttttttattgatttggttagagtgggtgttttttgttgttttgttattggttattttggttgattttaagtgttgagtgtaattttatgtggtgagggttattatggatgagagtgtatgtttattgttgaaattttgttaggatattgttaggttgtttttgagtgaaagttttatgtttaaatgtatttttttttttttagagatagaattttgtttttgttgtttaggttagagtgtaatagttttattttagtttattgtaatttttattttttaggtttaagttatttttttgttttagttttttgagtagttgggattataggtatgtgttattatgttttattaattttgtatttttagtagagatggggtttttttatgttggttaggttggttttgaatttttgattttaggtgatttatttgttttggttttttaaagtgttgggattataggtgtgagttattgtttttggtgatgtatttttttatttagagtttgtgtttttttaaaagtaggtttgttattagggtaagtgtaggtggttgaggtaaaattattgtagtattttaaaaggaattgatttaaaggatagttataggaatattgggttggtaggggttgggatttggttgtttgtttgtggtgtgggttttgtttgtttattttgatagtaatttaggtattagtatttaaagttaagttgttgttgttggtaaaaatgaaagttttttttttttggtgaggtttagtgatttgtttagagttattggttttttgttgtgtgtttgatattaattaggttgtatggagttgtagtttttttgttgtgggaggagtgttggtagttggagttgagttgtgtttatttttttttagatgtgtttgttttttttgtgttagaagaaggtttatttgatggagatttaggtgaatggaggtattgtggttgagaagttggattgggtttgtgagaggtttgagtagtaggtatttgtgaattaagtgtttgggtaggatgagatgattgatgttattggggtgattaagggtaaaggttataaaggtgagttttgtggtggtttgagttgttgtgtaaatttgggggagaagtggttttaggtttagttgtttgttgatgaggtttagagtgagtgttgggtatagtgtttgaattggatagtgtagaattattttttattgttttttttttgagaatagttttgtggttagaagtggttgggatagtggagggttaggggataattttttaatatgtttttggattttttgttttttgtagtttattgataattgtaaaggggagtttggaattatgttagttagtttttgtgaatgggggagtttaaattaatggatgttttaaaaagtatttatttagaattgagtttagggtgatatttttagagtttatttagtttgataggggagatttgtgggtaatgtatatgaaataattttattatttttttagatgatttagttatggttggtaattgttgagtagtaggaaggggttagtgggaggtgttgggtgttgaggtgaagtaatgtgtatttattttaggggttattagttgttggtatattaagaagttgttttgtaagatttattgaggtttgtgtaaggtggtttgtattggggtatggtattttgtttgtgtagttttttttgtggtatgtgttgggtagaaaggttattattattgtattgagattaataagaaggtgaggttttgagagtggttttttgggggtgggaagaggtttttgtgatggggagtggggtttttgtgtttgttagtgttgttttattgattgtagtttatgtattatgtggatattagtggtttgttttttatggttagttttggtttattttgatgatttgtaaggtgttattttgtagagtggttgtggtggggttgattggtgtggttggggatattagttttattggtttttgatgttattattaggggggtgataggtttgtgttgtatagtaggatttttagttttagtttagttgttttatagaaaggaatttggagggttagttagttttttgttttgattttgggatatgttgtgattgggattgaggttttagttgttttttagtgtgttttgtaggttagtatattggtatgtttgggttatttgtttttaatgttttagttttatatt

SEQ ID NO: 2678 - DNA, 2487 bp, Artificial Sequence
  chemically treated genomic DNA (Homo sapiens)
ataaaaataaaaataaatagaagatattgataatagttgattttattttttattttaaaagtggtgattttatataatttaatttaatattaaggtatttttgttatattgtattagtttttaaatattatattttttattttatttttatttttaagttattattattataataattaagagaaggtaaatataggttagagatttgatttttgttttttgtatgtatttatttttgtagatttataaataatttatattttgtagttttaaggtttttaattatattagattttgttttttattttatttagagttattgtttttgttgtttgttttttatatgtgataagttaattttttatgttattttttttataatttttatgtaaatttattatttttatttttatttattttttagagatgtatgattgtagaaaattttttttttttgaaatattgtttaatagagattaaatttaatatttagttttatttgtttatttttgaattataggttattgagaagttagaatagatagttatagaagtattttattaaatttatttttttattttttttaatatttgataaatatttattaagtatttattttgagtaagtattggagtaagtttttttataaatatgaagttgtgtaaataaggatgtatgtatttatgtaaatataagtttaatgttggatatatattgttttaagtgtttgatatgtattagtttatttatttttatttaaggggataagtgttattgttgtttttattttaaagatgaggaaattgaggttagagagattatatgaatttttaaaattttaatttttaattatagtatttagaatttatttggttgtagtggaggatttaatgttaaaaaagtaagtgttttttttagattatgaatataatgtgtgataaattagtagtttttttttttgttttaagatagtaaatatttatttaggttaatttgtgtttgttagagaataaagagtgggtttgttatattgtttttttttaagagggtttatttgtttttgtttttttggtatatgttaggggatatatattgtttagtatatttttgtagagttatattttattttatattttattataattttgttgaatgttaggtattattaagaaaatgtttatttattttttttttgttatgtttaatgtgtgaattgataatatatttaaatttaaagaaaattaatagatattattttaattaatttgaaaagtttggtgatttatttttattttttttatggggtttttgttgggttgtttggttttttggaattagtttttaggttttttgtagttggggtgtagtttagtgtttgagttttttttttgttgtttattagatgagtgttgattttttttggtataggtatttgagttgtatttgaattgtagaatatgttgtttttattttgtgttgattgtgattttattttatgtgttttagaggtaggttaaataagtttgttttggaaaaaataatagggaagaagatgttgattttttaatttttagagtaagttttgttattttggaggtaaagttataatatttaaatatggtttgatttatgttaggttttataaatatatatatatatgtggatgttgaaattgtgtatgttttgatagttaaaaaaaaagttaaaatgatttattgttttattagtaggataagatttgataggttagtttattagaataaagaatataaaaaatgggtatttaatttttttatatagatatatatatatatatatatatatatatatatatatatatatatataatttgatgtaatgattttaagagagttggttgttttggtaatgaagaattgtttgtatatttaaggatttttttgtttaaatttaagttagttatttgaattttttgagtttttttgagtttagttttaggtttttatttttagatagaggtttgatatttatgttagtttttagtaaggtaggaagtttagaagttggattaaaattttataagttagttagtttggatttgaattttagttttatggttttttagttgtgtgatttgggttagttgtttaattattttgaatttttatttttttatttgtataatgggaataataaaattaaaataaatttgtatgggtttattatgaaaattagattgattgatgatataatatatagtaagtatttagagttgtgtttgattttgaatgtgagttatttgtaatagtgatttgaaatgggtttatattgtttggtaggaaattatttaatttttttttgtttttgattttaatttttgaagtgtttttattttatttttttttattttgtgtttgtggagaaggaggatgtttagttatttttggagtataattttttattaaaaattattattaagtttttttaagttttttttttgtagtaaa

SEQ ID NO: 2679 - DNA, 2487 bp, Artificial Sequence
  chemically treated genomic DNA (Homo sapiens)
tttattataaaagagaaatttgaagagatttaataatggtttttaataaaagattgtattttaaggatggttaaatattttttttttttataaatataaaataagaagaaatgagatgaaagtgttttaaagattaaagttaaaaataaaaaggaattgaatggttttttgttaggtagtgtaaatttattttaagttattattatagataatttatatttggaattaggtatagttttaaatgtttgttatgtattatgttattaattaatttaatttttataatgaatttatgtaagtttgttttaattttattatttttattgtataggtgaggaaatagaggtttaaggtggttaagtagttaatttaggttatatagttgagaaattatagagttgaaatttaaatttaggttggttggtttgtgaggttttggtttgatttttaagttttttgttttgttagaggttgatatagatgttagatttttgtttggggatggaggtttgaagttaagtttaagaaagtttgagaagtttaagtggttagtttaaatttaaataagaaaatttttgaatatataaatgattttttattgttagggtaattagtttttttgaggttgttatattagattgtgtgtgtgtgtgtgtgtgtgtgtgtgtgtgtgtgtgtgtgtgtgtttgtgtagagaagttaaatatttattttttgtattttttattttggtgagttggtttattaggttttgttttgttaatgagatagtaagttgttttgattttttttttggttgttagggtatgtatggttttagtatttatgtgtgtgtgtgtatttataagatttgatatgaattgagttatatttagatattatgattttatttttagagtgatggaatttattttgggggttggagagttagtatttttttttttgttattttttttaaggtaagtttgtttagtttgtttttggggtatatgaagtggggttatagttagtatagaatgggggtagtatgttttgtaatttaaatgtaatttaaatgtttgtgttaaagaaagttaatatttatttgatgggtagtagagagggggtttgaatattgagttgtattttggttgtaggaggtttggaggttggttttggagaattaggtagtttagtaggagttttgtgagaagggtgggaatgagttattagattttttaggttgattgaggtgatgtttgttgattttttttgaatttagatgtgttattagtttatatattgggtataatgggaagaagatgagtgaatatttttttgatagtgtttgatatttagtagggttgtgataagatgtggggtaagatatgattttgtaagaatatgttggatagtgtgtgttttttagtgtgtattaaaggagtggaggtagatggatttttttgggagaaaatagtgtgataagtttattttttgttttttgatagatataagttggtttgggtggatatttattattttagggtaaggggaagaattgttaatttgttatatattgtgtttatggtttgggaaaagtatttgtttttttgatattgggttttttattataattagatagattttgaatgttgtggttaagagttagggttttaggagtttgtataatttttttggttttagtttttttatttttaagatggaaataataatggtatttatttttttagataggaataaatagattaatatatattaggtatttaaaataatatatatttagtattaaatttgtatttatatgaatgtatgtatttttatttatataattttatatttatgggaggatttattttaatgtttgtttaagatagatgtttagtaaatatttgttaaatattgaaggagatagaagaatggatttagtggggtatttttatggttatttgttttgattttttagtaatttgtaatttaaggatagataggtaaaattgggtgttagatttaatttttattgagtaatattttaaaaaaggggagttttttgtaattatatatttttgaagaatagatggaaatggagatgatgagtttgtatgaagattgtgaaggaaatggtatgaagaattgatttgttatatgtgaaggataggtagtaaggataatgattttaaataaaataaaaaatagggtttaatataattagaaattttaaaattgtaaaatataagttatttgtgaatttataaaaataaatatatataaaaaataggagttaaatttttgatttgtatttatttttttttggttgttgtaataatgatagtttagaaatagaagtaaaatgaaaagtataatgtttaggagttggtatagtatgataagaatattttaatattagattaaattatataaaattattatttttggggtaaaaaatagggttagttattgttaatattttttatttatttttatttttat

SEQ ID NO: 2680 - DNA, 2435 bp, Artificial Sequence
  chemically treated genomic DNA (Homo sapiens)
tatgtaaaaatatgatgataaaatagtaaagtattgttgtgtgtttgagttgttggatagggatgatttagttaagaagatagtgagagaattttttagaaatatgtttttattatttgtatatagagatatgattgtttttttttaaagtattattatttgggagagggagttttggggggtgatgggaggttttgagttatagtttttatatattatatgggtaggaaggtgtaaggtgtattttggtgtatagatatggtgattgggttgttaggtttttaagagaagagatgaatgagtttggggggtagatggaggtattagttgagggttagaggttggattttgggatttagaggggagggatagagttgaatgttttatttggggttattttggataattgtgttttgggtaaagttaaggaaggtggtatagaagtttatgtatatagagggattttagttgttatggttattttggagtaggtagaggaggaggtagaagatgggtagtgggggtggtgggaggagagaaggtaggttgttgttttggatgttagatttgtggttttggtgtttggggatatgggtgggagttgtaatattgtttttttattttgatatatttaaatatttttatggtaggaaaggttttgagggaagagataaaattgtttgggttatggaagttagtaataatatttgggatttttgggaggaatgattgagtttattattttaggagtttgtgtttgataggaaaagtaagggattagtgggattttttgtgtattttttattttgtttttatttttttttttaagttttttttttagtttttaagtttaagtttttgttttgtttattttgattttgaatttgtagaaatttttttattggttagggttgtgtatttttttggaggttttgagttttatatagtaggttgggggttgtgtggatggggtttgggggtttgtgtagtttattttttttgagaagagtagagggtggttttttaggtggttgtgtagtatagagtagaaggttatgttggtgttaatttttttagaggggtttggggagtttttaggtttgtttgtataaggagagaagtagtagtaggtgtggtgggtttttaatttttgggaaggggaagggggttatgaagtaggggtaatttatttgtatatatgtattgtttaaatttgtattttatgtatataagtttttggaggagtggtggttgagtaagtttttgggtttgagtgtttggtgtttttattttatttaggtatagtgttttttggaattgggaggttgttagttgttagtttttttgttgtttatatggtgttgttagtagttttgttaggtgtttttgttatgttattatggtttttgttagttagtttggatttttgagaggtaggagttataggttgaaggtttgatataagtattagtgagatgttttttttgaagaatagttttgttttttttaaggattgatttttattttggttttggtttttttaattttagagggtaggtatgggtttttagatatattgtttattatgttttgtttatttttttaattggttttggtgttttaggagttagtatagtaggtggtttagttttttttggatttttttgttttggggttggtattgatttgggtatttgtttttgaggttaaagttggggtttggattgttagtggggggtgggttatagtagtgtagggtttgggtatttttatggtattggtgttgagtatttagggagaagtagtttagttttgaagggtgttggtagaaaggaaagggtttagagtagagggtagggtttgtgggtagagaaggtgttggatgaggtagtttgttttgaggtttagttatttttgtttttttagttttttttttggtttttttgggatttatgaggttttaagataagtaggggtatagagtttttattttatagaggaggtttggagaaggatgattggtttaggattaagtgagttatttgattgttaggttttggttttgaaatatttaggttttttagatgttattgtggttaagtttttattttgtttttttttttgttttttatttattttttttttaggttttttaaatgtagtgaggttaggaaggatgtttgtgtttagattaagaatttagttattttaaagttttttaatttttatttttgtagagttatgatgttatggtaggtatgttagaggttgaaggatgtaaaagtggttttttgtttttgatgatgtaattatttagtgatagtggtgggtaaattttttttggggtgggggaggtgtgagttttatgaaggaggttgatattaatgtggttattggtgtttttttatgttgttaatgagtttttgggtgtgtgt

SEQ ID NO: 2681 - DNA, 2435 bp, Artificial Sequence
  chemically treated genomic DNA (Homo sapiens)
atgtatgtttggggatttgttggtggtgtggaggggtgttggtggttatgttggtgttaattttttttgtgaagtttatattttttttgttttgggaggggtttgtttgttattgttgttgaatgattgtattattgaaagtagaaaattatttttgtattttttggtttttggtgtgtttgttatgatgttatagttttgtggaggtggaagttggggagttttgaggtaattggatttttgatttgagtgtagatgttttttttaattttattgtatttggaggatttggagggagggtgggtgaagggtaaggaaagaggtaggatgagagtttggttgtggtggtgtttgaggggtttgaatgttttaaggttagagtttggtgattaggtggtttgtttagttttaaattagttatttttttttaggttttttttgtagaatggaaattttgtatttttgtttgttttaggattttatggattttagggggattaagagaggagttgagaagatagaggtagttgagttttggaataaattattttgtttagtattttttttgtttatagattttgttttttattttgggtttttttttttttattggtgttttttggaattgggttgtttttttttggatgtttaatgttagtattatggagatgtttgagttttgtgttattatagtttattttttattaatggtttaggttttaattttgattttagagatggatatttggattgatattagttttgggatgaggaggtttaggaaaggttggattatttgttgtgttggtttttggaatattgaggttggttggaggggtgagtaaagtgtggtaggtagtatatttggagatttgtatttattttttaaaattaggagagttaaagttggggtgagaattagtttttagaagaaataagattattttttgaggggagtattttattaatgtttgtgttagatttttagtttgtaatttttgttttttaggggtttaggttggttggtagaggttatagtgatgtggtgggggtatttgataaaattgttgatgatattgtatgagtggtaggagggttggtagttggtagttttttggttttagggaatattatatttgagtgaagtggagatattgaatgtttgggtttagaggtttgtttggttattgtttttttgggagtttatgtatatgggatataaatttgagtagtatatgtgtgtaggtgagttgtttttgttttatagttttttttttttttttagaggttgagagtttgttatgtttgttgttgtttttttttttgtgtagataaatttggaagttttttagatttttttggggaggttaatattaatgtggttttttgttttgtgttatgtagttgtttgggaagttattttttgttttttttaggggaggtagattgtatagatttttaagttttatttatatagtttttaatttgttatgtggagtttaagatttttaaggagatgtatagttttggttaatggaggagtttttataggtttaggattggggtgggtagggtgagagtttaggtttgaaggttgggaaagggatttggggaggagggtgaaggtagaatggagggtgtatgaggggttttattgattttttgttttttttgttagatataagtttttgaaatggtgggtttagttattttttttaggggttttgaatgttgttgttggtttttgtaatttagatggttttgtttttttttttaagattttttttattatgaagatgtttgaatatgttagggtaagggaatgatgttgtagtttttatttgtatttttaaatattaagattataggtttagtatttagggtaatagtttgttttttttttttttattatttttattgtttattttttgtttttttttttgtttgttttagaatgattgtgatggttggaatttttttgtgtgtatgaatttttgtgttgttttttttagttttgtttagagtatggttgtttaggatgattttaggtgaggtatttagttttgttttttttttttggattttaggatttagtttttggtttttaattgatgtttttatttgttttttaggtttgtttatttttttttttgggagtttggtggtttagttattgtgtttgtatattaagatgtattttatgtttttttgtttatatggtatgtggaagttatgatttaggattttttattattttttaagatttttttttttaaatagtaatgttttagagggaggtagttatatttttgtgtgtagataataaaagtatatttttaagaggtttttttgttgtttttttagttgagttatttttgtttagtaatttaagtatataatagtgttttgttgttttattattatgtttttatatg

SEQ ID NO: 2682 - DNA, 4136 bp, Artificial Sequence
  chemically treated genomic DNA (Homo sapiens)
ttttagagttttttttatggtttagtaaggtttgagggaagtttatttagatattagtaggttatgatttttgggtttttttttgttaaagtgttggtttaaggtttggttttagttgaatgtggttatatgtagggttagattttttttaagattttgggaatttaggttgtttagatttttaggtagaaaagttagtgttttgatattttatttaaattttttttgtggttgtttttttagtttttttttattatttttttagtttttatgtttgttgtttgtttttttttttttgagttttaatatatagtgggtatttgaagattttttttttatttttttatttttattaatttattttttatttgaatttgggatttttatttttgtttttttttataatttaatttatttttttttgaaggaattattttggttttgatttttatttttattttttaatagtttgtttttgttttttgtatgttagttggttttatttttttattattgtttttttagatatttgaggttttatttagttagtttgtgagttttaaggttgttttgatttttttatttgtttttttatttggtttttgtattttttttttttttggattttttgaatttttttaggatttttgtttagtttttttttgtttttaattgattttttttgaatgttttttattaattgtgagagttttttattgtgttttggttatattttttatgttttgtttttggttttgtttttgtttttgattgtgtttgtgtaaggtgggtgttttaaagttttattttattttgttgggaggagggggaaaggtgtatgtaggtgtagtggtgtttaaatttgggtttattaaatgtgttggagtatttttgtgtttaggtggtttttttttattgtggtaatttgggaaaatttgtgaattaattagaaaaagtggaaggtgggagattttggggtgttgtttaatggtgtggaagagaataaatgagttggttaattgggaatggtatgggggtgggtttgtttggtgtgaagtttgggtttgggaattttgaaggaggggtaggtgttgtttgtgtgtagaggttgtgttttttttggttttggttttttggttgttaaatagatgtagtaatgttggtttttgttgaggagtttaaggggttttgggatttgttgtataggttggtattgtttgaagaggaggttatttggagattgtgttgtgtgggtagatttgaaatggggttggggtggagtgggaaaaggttgggtatgttttgtatgattgtggggagtttttttttgtttttattttatttagagaagttgggaagtaggggtttaggtttaatttgttggagtatttaaggatttgtttgtatttttttttgggggatgatagtggatttattgtttttggaggtttaattagttatgagtgagggattggttagaagattggggtgtaggtaagtaggagtgttttattaggataagtaagtttgataggaagaagttgtttttttttgaattatatagaggtgatgtgtttgtattgtatgtagatgtgtgtataataggatttttttttttgtgttttgttattttgatatatataggagttgtttaaagtatttttgttttgtagattggaggttttttaaatattttgtgatttgaggatttagtttaagtgaggtgttataggatgtgtttttgagtttgtattgtatggagatttttttggaattttttatttgtaagttggtttaattaattttgtattgagttttaggttgtttgtattttgaatttgggttatttaggtagtgtgtttaaagttgaaattgtatatagtataatttaagtttgtattagattgggaagtgaatttaagttagtggtgtgtggtttaggagtgggaaaggaaatggatgtttgaagtggaagaggtggtgtagagggggtattgtttatgttgttttgtttttaattgttgtgtatagggggtggtaggggtggtgatttttatattttttatttttttgttggggttggttgtatttattgtttgggttatagggttgatttgtgtgatgtggttttgtggttttagtaggagtttggttttatttttgggatttatgttgaattgtatgttgagttttggggtgatgattggagggttagtttggaagattatagtagttaaggtgagtattaagtagggtagttttgtttttgggtggttgaagtgttaggttggaatgagtaaggtttttataagattttgttgtttgttttttatatttttattagattggatggatagttgtggtttagatttttatttttttattagaagtgtgtatagttagaagttttttgttagattgattttttttggttttgtttagtttatataggatttgggatattattagaaagatattatagtggggatgttttgaggttattagaggttaagtttagatttgatttagtttttagttttgttgaggtattttgtttttgggttagggtagttttatgttgaataatgtttttaataatttgggtatgtttttttttgtgatttgaggtagttagttttagaaagtttagatttatatttgagttttgttattgttttttggtaaagttagttgtaggagtgttatggttattagattatagtagttaatatttatttagtgtttattgttatgagttaggttttattttaagtgtattgaatgtaggtggtattaatattatttttatttatagtaaaggaaaatgaggtataaagaggttaaggaatttgtttagggttgggtatggtggtttatatttataatttagtattttgggaggttaaggtagggtggattatttgagtttaggagtttgagattagtttgggtaatatggtgaaaatttgtttttattaaaaaattaattaattttttaaaaaaagtttgggtgtggtggtttatgtttgtaattttagtattttgggaggttgagatgggtagattatgaggttaggagtttgagattattttgattaatatgttgaaattttatttgtgttgaaaaaaaaatataaaaattagttaggtgtggtggtgtgtatttgtaattttagttatttaggaggttgaagtagtagaattatttgaatttgggaggtggaggttgtagtgagttgagattgtattattgtattttagtttgggtgatagagtgagattttattttaaataaataaataaattaaaagtttgtttagggttatataattggtaagtggtagagttaggatttgaatgagttggagttgggggagagtgagtatgtttgaaaattggattttagggtggggtatggtggtttatgtttgtaattttagtattttgggaggttgaggtgggtagattaggaggttaggagtatgagattagtttggttaatatggtaaaattttgtttttgttaaaaataaaaaaattagttagatgtggtggtatatgtttgtaattttagttatttaggaggttgaggtaggagaattgtttgaatttgggaggtggtttaagtttgggtaatagagtaaaattttattttaaaaaaaaaaaaaagaaagaaaaaaaaagaagaaagaaagaaaattggattttaggatagtgagggtagggattttttgtaggaaagtataagaaatatagatttgtttttagttgataaggagtgtattgtttggtatttgttatttgttgaggggtttaggatgtgagggagaatttgattatagttttatatttttttttagaaattatatagatttttttatttttgattttggttatttttgtttttgttttttatatttgtttggtgttttattattaataggtattttggttaataatgtttgatttttaagaggttataggttggaattgagtgatggagattttttgatttttggttttgaagggtttttaggaattagttttttggagttttattttatgttttaataagtatgagttaagttttaggattttgttgttattattattttatggtttaggggagaagtttgg

SEQ ID NO: 2683 - DNA, 4136 bp, Artificial Sequence
  chemically treated genomic DNA (Homo sapiens)
ttgggttttttttttagattgtgggatggtaatggtagtaaagttttgaggtttgatttgtatttgttggaatatgaagtagaattttgaggggttggtttttgggggttttttagggttaaaggttaggaggtttttattatttaattttagtttgtgattttttgggagttggatattattgattaaagtatttgttgatggtggggtattaggtaaatatggaggataaaaatagaaatgattagagttaggagtggagaaatttgtatgatttttggggaagaatatgaaattgtagttagatttttttttatattttaagttttttagtaggtgataggtattaggtagtatattttttgttagttaggaataagtttgtgttttttgtgtttttttataaaggatttttgtttttattgttttaaggtttaattttttttttttttttttttttttttttttttttttttttttttgagatggagttttgttttattgtttaagtttgaattgttttttaggtttaagtaatttttttgttttagttttttgagtagttgggattataggtatgtgttattatgtttggttaatttttttatttttagtagagatagggttttattatgttggttaggttggttttatatttttgattttttgatttgtttgttttagttttttaaagtgttgggattataggtgtgagttattgtgttttgttttaaggtttagtttttaaatatgtttatttttttttagttttagtttgtttagattttagttttattatttattagttatgtgattttgggtaagtttttggtttgtttgtttgtttgagatggagttttgttttgttgtttaagttggagtgtagtggtgtgattttagtttattgtaatttttgttttttgggtttaagtgattttgttgttttagttttttgagtagttggggttataggtgtatgttattatatttggttaatttttgtattttttttttagtatagatggggttttaatatgttggttaggatggttttgaatttttgattttgtgatttgtttattttggttttttaaagtgttgggattataggtgtgagttattgtgtttaggttttttttaaaaaattaattaattttttggtagagataggtttttattatgttgtttaggttggttttgaatttttgagtttaagtgatttattttgttttagttttttaaagtgttggattataggtgtaaattattatgtttagttttggataagttttttaatttttttgtgttttatttttttttattgtaaatgaggataatattagtattatttatatttaatatatttaaaatagggtttggtttataatagtaagtattagatgaatgttggttattatagtttaataattataatatttttatagttgattttattaagaggtagtggtaaaatttaaatgtgaatttaggttttttgaggttaattgttttaagttatggagaaagatatgtttagattattaaaaatattatttaatatagaattgttttaatttaggaatagagtgttttagtaaagttggaaattgaattaagtttaaatttggtttttagtggttttagaatatttttattgtgatatttttttgatgatattttaggttttgtatgagttaaatgggattaaaaagggttagtttggtagagagtttttgattgtgtatatttttggtgggaagatgaaggtttggattatgattatttatttaatttgatgggagtatgggaggtaggtagtagggttttgtggagattttatttattttagtttggtgttttaattatttaggggtaaagttgttttgtttaatgtttattttggttgttgtggttttttaggttgattttttagttattattttggggtttggtatgtagtttggtgtggattttagagatgaggttaggtttttgttggggttgtagggttatattatataggttggttttgtggtttaagtgataggtgtagttagttttggtgggggggtggaaggtgtagagattattgtttttgttgttttttatgtgtagtagttggaagtagggtagtatgggtggtgttttttttgtattattttttttattttaggtatttatttttttttttatttttgggttatgtattgttggtttaagtttgttttttagtttgatgtaaatttgagttgtgttgtatgtggttttaattttgagtatattatttgaatagtttaaatttagagtgtaagtagtttaggatttaatgtaaaattggttaagttgatttgtaaatgaaaaattttaggaaggtttttgtgtaatgtaaatttaggaatatgttttatggtattttatttgagttggatttttagattataaaatatttggggagtttttaatttgtaaggtaaggatattttaggtagtttttgtgtgtgttggggtggtggggtgtggggaaggaggttttgttatatatatgtttatgtgtaatatgaatatattatttttgtgtaatttggagaagagtagtttttttttgttaaatttgtttattttaatagagtatttttgtttgtttgtgttttgattttttggttaattttttatttataattggttgaatttttgagggtaatgaatttattgttattttttaaaagaaagtgtaaatgagtttttaagtattttaataaattggatttaaatttttattttttggtttttttaggtgggataaaaataggaaggagttttttgtgattatgtaaggtatatttggtttttttttattttgttttagttttgttttggatttatttgtgtggtgtagtttttgagtagttttttttttaagtagtgttagtttgtgtggtggattttgggattttttgggttttttggtaggagttgatgttgttgtatttgtttgatagttaagaagttggggttaggaggggtgtggtttttgtgtgtgggtagtgtttattttttttttggaatttttgggtttgaattttgtgttgagtgagtttgtttttgtgttgtttttgattggttagtttatttgtttttttttgtgttattggatagtgttttaagattttttgttttttattttttttgattagtttataagtttttttgggttgttgtagtgaggaggagttgtttgggtgtggagatgttttgatgtatttagtgggtttaaatttagatgttattgtgtttgtgtatatttttttttttttttttaatagagtgaaataggattttagggtgtttgttttgtgtaggtgtggttaggggtagaggtggggttgggagtgaggtgtagggggtgtggttaaagtgtagtagggggtttttgtggttggtaagggatgtttgggaagagttggttgggggtgggaaggggttgagtgggggttttgggagggtttaaggggtttaaaggggaagggggtataggggttaggtgaagggatagatgaagagattagaatagttttagagtttatgggttaattgggtgaagttttgggtatttaggggagtagtggtgggagagtagagttggttagtgtatagggggtgagggtaggttattgagagatgggggtgagggttaggattagaataatttttttagaaaaaggtagattaggttgtaaaaagggatgggagtagggattttagatttgggtaaaaaatagattaatgagggtgggagggtgggaggaagatttttaagtgtttattatgtgttaggatttgagaaagaggaggtgggtagtaggtatggaagttaaggggatagtagagagaagttgagagaatagttgtaggaaagatttgaataagatgttaggatgttggtttttttgtttggggatttaggtggtttggatttttaaggttttggggagggtttagttttgtatgtggttatatttagttggggttaggttttgggttagtattttaatagggaaggatttaagagttatggtttgttggtgtttggatgggttttttttaggttttgttgagttatggagagaattttggag

SEQ ID NO: 2684 - DNA, 2460 bp, Artificial Sequence
  chemically treated genomic DNA (Homo sapiens)
tgtgggaatttttggatttatagtggggtgtggttggggtaggtggggggtttaggtgaggaagttttttttgtgttttgggttgggtgaagggttttgtgatgtgatgggggtagttttagtgtgtgtttagtttttatgttgttattgagtggtgtttttgttttagtttggagttttgtagggttgtttttatttttgtttatttttttgtgggttggggtagttttttgttagttattttgtgtttttaggaagagggattggttattatttatttatgtttttttattttattttaatattttttgtaaagttattgtttgtgttgtatttgtgtggtggggggtggggtggggtggagttatgttgtggagttgttgtaggtaaatagttttttttttgtggtgggagtggggttgttggttttaggtagggatagtagttgttgtttgtgttttgggttgggattttgttgttgtttttgttggaggtatgtgttagggtgggggttgggttgtggtggaggtgggtggttttggtgttttttgttgttgttttggtttggtttgtttgttttttgattttgggggtggtggtggagtgttttttaaattttgttgtgggttttgtgtttggttagttttgtatttgttgtgtgtttttggttatttttattttttggagttttttgtttggttttggtgttttttgttatttttttttgtggtttgtggttttgtttttgttttgtgtttttatgttttttgatttttgtttttgtgttgtgtgtttttttttgtttgtgttttttttgttgggttttgttttgtgttttttgttttgtttgtgttttttgttgggttgtgttttttgttttttatgtattattttttggagtagttggtggatatggtgattgtgttgttggtgggagagaagttgtgggagttgattttgttgggtgtgtaggatgataaggtgggtgtgttggttgtgttgtttttgtagttgaagttggagttgttgtttgattgggtggttattattggtattgtgttggtgtttattttgttggttattttggtttttattaagaattttgtaggtgaggttggtggttggggtgtggggtgtgggtagagggggtgtttgtaggtgtttgggagttggtgttttttgtgtttttggtggttttgtttagttgtgtttattgtggtttggttgtgtttgtggtgttttaggtattttttatagttgtttttattttagtaggtgttgttggttgtatagattttttgtttttattttattgttgtttttttttttatttgtttgtttatggttgtgggtgggattaggtttgtttggatttaggggttttaaatgttatgagatatggggtttggtttggagaatgttataagtagtgtttgaggggatgtagggtggttaggtggggattaggaaaggttgggatgggtgttgatagtagagagttgattataggggttggtggagttgttgggtagggtttttaggttggatttgggtggaaggagggtagagagagtttttgagaggtttaggttttttattttttaggtagggtgaggtttttttgggtgtattgggggtttttgaaggtttgaagtaggggggttagtatggggtagggttatgtgttagagtagggagtttggagtttttgtagggagatgggggttggattagggtagggatttgtgttggttagattaggatttgtgggggtatttgaagttatttaggtgaggtaggaagatggatagagtagttagtttgtttgtgagtttttgtggggtggggttttggtgtttttgttttttttaaggagtggggtgagataggtggagttgagaatttttttttttggggtttgggttaaggtaagggggattagggttttttggtttgtgtggtttagaggtattagtttgtagtggggaggggtgttgggattttggggtttttttttttgtagtttttaaattttagtagattttgttttagtattggtgttttttaaattttttagatgttttgttttaaggagtttttgtggtttggagatattaggtttgagggtggatattggttaggttgtttgattttatttaggggtggaggaggtttttgttggttttttttttgatattggaggttagattttggggattagaggatttttggggtgggtatatagtatattttgtagagtagggagtttaggtgtgtggtggggttttggggtaggtttagtatgtttagatattatgtgtgttttttgtgtttgtagtaattaagtattgtaaattaggtagttttaaatagtagatatttattttttatggttttggaggttaaaagtttaaaattgaggtgttggtagggttttgtttttttttatagttttaggaa

SEQ ID NO: 2685 - DNA, 2460 bp, Artificial Sequence
  chemically treated genomic DNA (Homo sapiens)
tttttagagttgtgggagggagtagggttttgttgatattttgattttggatttttggtttttggaattatgagagataaatgtttgttgtttgaaattgtttagtttgtggtatttggttgttataaatatagagaatatatgtggtgtttggatatgttgggtttgttttaaggttttattgtatgtttgggttttttgttttgtagagtgtgttgtgtgtttattttaggggttttttaatttttggggtttggtttttagtgttgaagaggagattagtagaggttttttttatttttgggtgggattagatagtttggttaatgtttatttttaggtttggtgtttttaggttatggggattttttaaggtaaggtatttgggagatttgggaagtgttagtgttgaggtagggtttgttgaggtttggaggttgtagaagagagggttttagggttttaatatttttttttgttgtagattagtatttttgggttatataggttaggagattttgattttttttgttttggtttagattttaggggaggaagtttttggttttatttgttttgttttattttttggggagggtagaggtattaggattttattttgtagaggtttataggtaggttggttgttttgtttatttttttgttttgtttgggtggttttaagtgtttttataggttttgatttaattagtgtgggtttttgttttggtttagtttttatttttttgtaggagttttaggttttttgttttgatatgtggttttgttttatgttagtttttttgttttaaatttttggaggtttttagtgtatttggagaggttttgttttgtttgaggggtggagggtttgggttttttagagattttttttgttttttttttatttaagtttagtttgggaattttgtttggtagttttattagtttttgtaattagttttttgttgttaatatttattttggttttttttggtttttatttggttattttgtatttttttaggtgttgtttgtgatattttttaaattagattttgtgttttatgatatttgggatttttgggtttagataggtttagttttatttgtggttatgggtggatgaatggaaggaagaataataataaaatagagatgaggggtttgtgtgattagtgatatttgttaggatgggggtggttgtggaaggtgtttgggatgttgtggatgtagttaggttatggtgggtgtggttggatggagttgttggggatgtgggaagtgttagtttttggatatttgtggatgttttttttgtttgtgttttgtgttttggttgttggttttatttgtgaagtttttggtgaagattagggtgattagtaggatgggtattagtatggtgttgatggtgattatttggttgaatggtagttttagttttagttgtagaagtagtgtggttagtgtgtttgttttgttgttttgtgtgtttggtaggattagtttttgtagttttttttttgttagtagtgtggttgttatgtttgttgattgttttaggaggtggtgtatggggggtggggggtgtggtttggtggggggtgtgggtggggtggggggtgtggggtggggtttggtgaggggggtgtgggtgggaggggatgtgtggtgtgggggtggggattggggagtgtgggggtgtgggatggggatggggttgtgggttgtgggagagggtggtaggggatgttgggattgagtggggggttttgggggatgggagtagttggaggtgtgtggtgggtgtggggttggttgggtgtggagtttgtagtggggtttggggggtgttttgttgttgtttttggggttagggggtgggtgggttgggttggggtggtggtggggggtattggagttgtttgtttttgttgtagtttggtttttgttttggtgtgtgtttttggtgggggtggtggtgggattttggtttggagtgtgggtggtggttgttgtttttgtttggggttggtggttttgtttttgttgtggggagggggttgtttatttgtggtgattttgtggtgtggttttgttttattttgttttttgttatgtagatgtggtgtgggtgatgattttgtagaaaatattgaaatgaaatgaaaggatatgaatgagtaatgattggtttttttttttgggaatgtggggtggttggtggggggttgttttggtttgtgggagggtgggtaggggtgggggtggttttgtggggttttgggttggggtgggggtgttgtttggtggtgatgtgaggattgggtgtgtgttggggttgtttttgttgtattgtagggttttttgtttagtttagggtgtagagggggtttttttgtttgggttttttatttgttttggttgtgttttgttgtgggtttggaggtttttgtg

SEQ ID NO: 2686 - DNA, 2474 bp, Artificial Sequence
  chemically treated genomic DNA (Homo sapiens)
tatgggttaggtgagtggggtttggttgagggtagttgggtagggggtagtagggtgtggtagtttgtttattggaattttttagggtgtattttaggggggttgtttatttgaagggaagtgaggatgagggtgtttaaaggttgttttttttatttttatttttatttttattttttgttttttgggattgttatgttttggagtgagtgtagttggtttgttttttaaagttttttgttttggttgattagttgggtgagttttggaattggaatttggattgtttagtgtgttgattttataattttgttggggtggatttttagtttggtatttagttgttttttaattttgagtggtatttgtggatgtagttggtttttggtttagggatgtttatttatttttggtttgtttgaagaaagttgttgtttttaatttttttttttttaagtaagtttaaaatttttatgagtaaaagagtttaaagaggtaagaggatattggtgttttaattgttttttttttttttaattttttttttttttttttttttggttggttttatggattatttgggagataaatttatagtggtttagatttatatgatttagtggatgggtattgtgaggaggtttttttaggaagtttttaatttggtgattattatggtgggttatgaatggatgagtgtagagttggttagttggattttttttaagtgtattttttttttttgatatttggttttttggagttgggaatttttttgttgtttttttgtttgtagttaatagagattttttttattgaggaaaaggtatatagatttggaattgttagatattgtaagtttattatgttttaaaaaatattaaaataatattgaaagttttttttttttagtttttttagggagggggttttagatattaaattggggaagttattttttttagaatagttgttagttaaagtttaggtattttttgttttttgtatttgggaaagaggtatgtagtaataattttttttttttgaagttagttaggatatttttgttggagttgatgtttgtgtggatagggttagtatgtgagttgggttgaatttgttagttgatttatgtttaagtgtgaatattttaatttttgatatgaaagtttatttttttttttatttttagggtggattagtggtatttgttttatttttttttatttttttaggaagtataagtggtggtgttatgtgtatgttgagttgtagtttttgttgttttattgagtttttattggattgttaaggaaagggttttaggagattgaggtgtggtgggtgagtttgtttgttggttgtgaattttgggtttggtgtgagtgggttagggagggaggttttgattttttatttaggtaggtttgggagggtttggattgggatagtagggtggaatgatagttaatgattaaaattttggtttgtgttttgttaggtgatagtgtagaaataattgtaaggtttttttgatgatttggagaggtgggattgggtttagaaagtgaaagtgtttattgtgggggaagtatagtgagtgagtggtagagttaggttttgaattttaggttttgatttttttatttatggttttttgtagtttagtttttagtagatgttttttttagatttttttaattaatttagggttgtttaggttattgattagatttgagtttaaagagagggtttgttatttttatataggagatttttgttatttgattgtgttggtttagtttatgggagtatttgaggataggtgaagggttaagttagtttttttttttgggttttttttagttaggagtgttatagttattaagggatttagtatttagggaggagttttgagttggttttttttatatttgaggtggtagggtttatagttgttttgttaggtgtaggggtttagtattttttttgttgatttagaggtgtgatttattttaggttatgtagtagttagagtaggtagttgtaaatgtaaggtaggagttgagtatttgggtatgatatgtgttttgtttataggatgttttttttatagtgggtttgtgtttttttgtggtttagaataaattagtggggtttggatttatgagatagattttttaatttttggaaggtgtgatttgttatagggaaagaaggttttttatttattttgtttttttttgtgtgtatttttgtttttgtgatgtgtttttttgttttgttttgtttttgtttgtttttttgttatttttgtttttttttagggtatggggttggtgataggtaggttttgttggtatttttttttttttattttggggagtggtgtgattatgggtattggtatgaattttttaggtgttttattttgtgttataggttggtgttattggtaggagtggtttttttag

SEQ ID NO: 2687 - DNA, 2474 bp, Artificial Sequence
  chemically treated genomic DNA (Homo sapiens)
ttggagaggttatttttgttagtggtattaatttgtaatatagggtaagatgtttaggggatttatgttaatgtttatggttatattattttttagggtggggaaagagggatgttaatagagtttgtttgttattaattttatattttgagagagaataggagtgatagagaaataaatagagatagagtaaggtagaaagatatattatagagatagagatatatatagagggagatagaatgaatgaggggttttttttttttgtggtaagttatattttttagaggttggggaatttgttttataaatttaagttttattaatttgttttgggttataaagaagtatagatttattgtgaaggagatgttttgtgaatgagatatgtgttatgtttaagtgtttggtttttgttttgtatttgtaattgtttgttttggttgttgtgtgatttggggtgagttatatttttgggttagtagaggggatattgagtttttgtatttggtagggtagttgtgagttttgttattttgagtgtagggagggttagtttagggtttttttttaaatgttgggttttttaatgattatagtatttttggttaggaggaatttagaaaaaggggttggtttagttttttgtttgtttttaagtgtttttataaattgggttaatatagttaggtggtagaagttttttatgtgaaaatggtaggttttttttttaggtttaggtttggttagtgatttgggtagttttgaattaattgggagggtttggggagaatatttgttgggagttggattgtaaagagttgtgaatggggaggttagagtttggggtttgggatttggttttgttatttatttattgtgttttttttatagtaggtatttttgttttttgggtttagttttatttttttaaattattagaaggattttatgattgtttttgtattgttgtttagtaggatataggttaaggttttaattattagttgttattttattttgttgttttaatttaagtttttttgagtttgtttgagtaagaaattaaggtttttttttttggtttatttatattaaatttaaggtttatggttagtgggtaaatttgtttattatattttggttttttaagattttttttttggtaatttaatgaaagtttggtggaatgataaaagttataatttagtgtgtatatgatattgttatttgtgttttttaggagggtgagaggagatgaggtaggtgttattaatttattttaaaaatagggagaaggatgagtttttgtgttgggggttggggtgtttatatttaaatataaattaattggtaaatttagtttaatttatgtgttggttttgtttatatagatgttgattttagtaaaaatgttttgattgattttaggagagaggaattattgttatgtgttttttttttaggtataggggataggaagtgtttgggttttgattgataattattttggaagaagtaatttttttggtttgatgtttgggattttttttttgggaggattggaggggaggagtttttagtgttgttttaatattttttaaaatataataagtttataatatttggtggttttgaatttgtatgttttttttttagtgaagaaaatttttgttggttgtgagtagagaagtggtggaaggatttttgattttgggaagttaggtgttggaaggaggaagtatgtttgaagggggtttggttggttgattttgtatttgtttgtttgtggtttattgtggtggttattaaattgagggttttttggaaggatttttttatggtgtttatttattgggttatgtgggtttgggttattgtgagtttattttttaggtaatttatggggttagttaggaggagagggaagaaggaagttagggagggagagagtaattaaaatgttagtgtttttttgtttttttggatttttttgtttatggaagttttgggtttgtttggaggaaaaaaaattaaaaatagtagttttttttaggtaaattaagggtaagtaaatatttttgagttaggagttggttgtatttatgggtgttgtttagaattaagaggtagttaagtgttaggttgggagtttattttagtggagttataaagttaatatattgggtagtttaggttttagttttagggtttatttagttgattggttgagataaggagttttgaggaataagttggttgtatttattttagggtgtgatggttttgaaaggtgggggatggggatgggggtgggggtggagggggtggtttttgggtatttttgtttttatttttttttaggtaggtagtttttttgaggtgtattttgggaggttttggtgggtaagttgttgtattttgttgttttttgtttggttgtttttggttagattttgtttatttgatttatg

SEQ ID NO: 2688 - DNA, 2827 bp, Artificial Sequence
  chemically treated genomic DNA (Homo sapiens)
ttggggttttgttttgtttaggtttgtatgtggggtttttgggaattgttgttttttttttttgtttttgtgtttgtgtttttttttttggggttttggtttatttatttttggtgtggttttgttggatttaggagttttggttgtttgggttgtggggagggggtgttttgggttggttttagaagttattttgtaaagaggtagggggtgtggggttgtgtggggtgagtttgggatttgtggggaagaagttttttgggattgtgttttggttgtttgagttttttgtgtttgttgttttttattttggttgggggtttatttgggagtttgttgtttttggttagttgtttgtgtgtgtttagggttagtagtatgtataagtgttagtgtatggttgttgtgtttatgtttaatgtgggttttgttgggtgtgtgggtgtgtggggtgtggggatttgattgattggttgtttttgtaggtgttgtttgttgtttgttgttttgttattgtttgggtttttgagttgtttagttagtttggttgatgagttgatagtgtgtgtttattggtttgtggtgttggaggggtggggtgttgtttagggttggttaatgggtgttggtttttggttttttgaggaagaggggggtttgggtgttgttggggggattttttttttggggtgggtggtaggtggggggtgtgggtttggttggttggtttgttaggtgtggggtttaggttaggttggggttgtttggaggttgtgtttttttttgtttgtggtgttttggtttttgttgttgagagtggatgtttttttggggtaattttttttggtttagaggtagttttgggggtggggattttgtgaattggggattttgtgaggttgtttgttatttgtgggtagtgaaatgtgttagtgtgtagagtagatttgtttgtgttgttgtttgttggatgttttttgagtatttattggggattgagtgtgggtgaggtagtagtgaaggaattgggaggggaaattttgtgaagattatttgaaaattgatgtttaaaataaatgaattttttagtatttgttaaaggatagtggtttgttagtgtgtttgttatggggtggttgtaggatttgtgtttggaattgggtgggtgtttgggatggataatgttgtttggtggttggttttgtgggaggtttttgtatggggttaattttggttggtgaagtttgttgtttggaatgtgaggttgaggtttttttttgtgatagattgggtggggttaggaggaggggtagggtgggtattttggtttgaagatttaggaattgttttggtttggtttggggtttatatttgatgtttggtgagggttggttttgggtttggttttattgggtttgggagggatgggtggttggaaataaatggttttttttagttttaggtaggatgttttaagggatgaaagtttagtaaattttaaggtttatttttttgataattattaataagagttttttttttttttttttgttttttaggtttaatttaaagataatttttttttttttttgtttattttgtttgtattagtttgagtttttttatattagtttttttttttgtttttaatatatatatgtatatatatatatatatatatatatatatatatatatatagttatatatgtagatatatgtttttatgtgtaattatttagatatagttttatatttttatattttttagtatatatatgtttatatatgtttttttatgtttttatttaatttattgtagatgagttttttagttttggaaggttaaatttgtgtttagttagtttttatattttatttgattttatattagtttgtggtatgggtttggtggttgaggtaaggggttttttatatggggattgggggtgtggggggtttagagatgtttaaagaagaaggaagtgttgtttgttgtttttattgagtttttattttattgttttagatattttggtttgtatggttgtttttggttgttggtttaatttgggagatgttgttgataggttttattttgtttttgttaattgtgtagttttgagtttttgtagggggtggggagtttttttagaattatatattattttgtgtattgggtaatagggtaagtagtgtgaggtggtgggggaggtttttttagggggttttgatttatttgaaataatgttttttaatgtgtttggttattaggtatttttttgtttagttttagttaggtgttttttaagtttgatggtagtaagagaagttttttttaggttttatttttataaattaaggtaggaatggaggtaggttattttgtgattttttagtttagaggtagttgttttttgtattaagttgtagtttttagtttgtttttaagtgattgtttaggttaagtttgttggtgaattattattttttaaggtgtgtaggtagagagaaagtggttttttttaggtagttgttgtttatgtggaggatttagtgagtagaggaggagggaaatggagagaagatatatttgtaagttttttataggtgaaggaaaggaggtggtttgtggagtagagaaagaggaggttatttttgttttagggtgttgttagggaggttttttaggataggtgatttgggttagatatagaatataaagaggatatttgtttaatggatgagaagaataaatagagaatttgttaaggtttatgagtgaaggtgaggattgaataagtgagttagagaatgttttggaagta

SEQ ID NO: 2689 - DNA, 2827 bp, Artificial Sequence
  chemically treated genomic DNA (Homo sapiens)
tgtttttagaatattttttggtttatttatttagtttttgtttttatttatggattttggtagattttttatttgttttttttatttattaggtaaatattttttttatgttttgtgtttagtttaggttatttgttttaagaggtttttttgatggtgttttggggtagaagtgattttttttttttttgttttataggttgtttttttttttttatttgtgaggggtttataggtgtgttttttttttatttttttttttttttgtttgttgagttttttatatagataatagttgtttagaaggaattattttttttttgtttgtatattttagagggtgataatttattagtaaatttgatttgagtaattgtttgggggtaggttggggattataatttggtataagggatagttatttttgggttgaggggttatagagtaatttgtttttatttttgttttgatttgtggggatggagtttggaagaagttttttttgttgttattaagtttgaggggtatttggttagggttgggtgggggggtgtttaatgattaggtatattagagggtattgttttaagtaggttagagttttttggaagaattttttttattattttatattgtttgttttgttgtttaatgtataagataatatgtggttttgagggaattttttattttttgtagaaatttaaagttatataattgatggggataaaataaagtttgttaatagtattttttaaattaaattagtagttaggagtagttgtgtagattgaaatgtttggagtaatggggtgggggtttagtggagataataggtagtgttttttttttttttgggtatttttggattttttatatttttgatttttatgtaggggattttttgttttagttattaggtttgtgttataagttgatgtgaagttagatggggtgtgagagttggttggatatagatttaattttttagggttgaggagtttgtttatggtaggttggatgagggtgtgaagaagtatgtgtgagtgtgtgtgtgttggagggtgtgagggtgtgaggttgtgtttgagtgattgtatgtgagagtatgtgtttgtatgtgtgattgtgtgtgtgtgtgtgtgtgtgtgtgtgtgtgtgtgtgtgtgtgtgtgtgttgggggtaggaaagggagttggtgtggaggggtttaaattggtgtaggtagagtggataaaaagagaaaagagttgtttttgagttgggtttggagagtaggagaagaaaaaaggagtttttattggtggttgttaaggagatgggttttggggtttgttgaatttttgttttttaaagtgttttgtttggaattgagaggggttatttatttttagttgtttgttttttttaggtttggtgggattagatttgaagttaatttttgttaggtgttaggtgtagattttaggttaggttagagtagtttttgggtttttggattgggatgtttgttttgtttttttttttggttttgtttggtttgttatagggggaggttttggttttgtattttgggtagtgaattttgttggttgaggttagttttgtgtgggggttttttgtgggattgattgttaagtggtattgtttgttttgggtgtttgtttggttttagatgtaggttttgtggttgttttgtgataagtatattgatgggttattgttttttgatgagtgttaaaaagtttgtttgttttgaatgttaatttttaagtgatttttatgaggtttttttttttggtttttttgttgttgttttgtttgtatttggtttttagtaggtgtttaagaaatgtttagtaaatggtagtgtaggtgagtttgttttgtgtgttggtgtgttttattgtttatggatggtgggtgattttatgggatttttggtttgtaggatttttgtttttgaggttgtttttgggttgggaggggttattttagaggggtgtttatttttgatggtgggggttggggtgttgtgggtaggggagggtgtagtttttaagtagttttagtttggtttagattttgtgtttagtgagttggttggttaggtttatattttttatttgttgtttgttttaggggaagggtttttttgatgatgtttgagttttttttttttttggagggttggaggttggtgtttattggttggttttgggtgatgttttgtttttttgatgttatgggttaatgagtgtgtgttgttagtttattagttgggttggttgggtggtttgggagtttgagtggtggtggagtggtgagtagtgagtagtgtttgtgggagtggttggttggttgggtttttgtgttttgtatgtttgtatgtttagtggggtttgtattgagtatgggtgtggtggttgtgtgttggtatttgtgtgtgttgttggttttgggtatatgtgggtggttggttgggggtagtgggtttttaggtaagtttttgattgaggtggggggtggtgggtgtggggggtttgggtggttgaggtgtggttttggagggttttttttttgtggattttgagtttgttttgtgtggttttgtgttttttgtttttttgtaaagtaatttttagggttggtttggggtgttttttttttgtagtttgggtggttggggtttttgagtttggtggggttgtattaggggtgggtgggttggggttttgggaggggaagtgtgagtgtgggagtgaggaagaaaggtggtggtttttggggattttgtgtgtggatttgggtggggtgggattttga

SEQ ID NO: 2690 - DNA, 2265 bp, Artificial Sequence
  chemically treated genomic DNA (Homo sapiens)
gttagtgggttatttttgtttattatgtagtatggtatttatttgtttagtattttatataatattggaggtaggggagtttattatagaattttttattaagaaggtttttattatggagaaattgaggtattggaggtggggtttttgtagttatgttgggttatgtgttttagttagttaagttgtagtggttattaagggtgtttagggtttggtttgttggttatagtgttgattttatggtttgaaatgggttttttttgtttagataggttttagtttattattatttatttgttttagttttggtgggtagggagtggttgggagattttgttttttatattttgggttttgtggtatttaatgagtttttaatatatattttagggtttttgttttagattaggttatagtttgtttaggtatataaggggtatttatattttggaggtaaagagatatgtttatgtgtttgtaggtatatatgattatgtgtatagatatatgtgtagatgtatattaagttatatatatgtatataagtttgaggtggggatttttaggatatggaggtaggtaggtagaggtggggtttaggatgttttgtttttgtttgtgggtttggtttttttatttaatagatgagtatgtgggtgtgggagtggttattgtgaaaggggttttagtatgtgttatttgtggagattatagtaggtatgttgtgtgtatgtatgtgtggttgtgggtgtgtaggtgggggtgaggatatagatatgtatttttagagtttgtgtgtgtatttagtgtttgtgtatgtgtatattggggtggtgttggtttgtatgtgtattagaggtgtgtaagtgtgtagtttgtgtagataagtgtatgtgtaaggaaatgtgtgtgtagtttgtggtattatggatattagtagggtagtttgggtgggtatttggggagtattttttaggtggggtatgtttaatttatatggagtttatttttttttgtttgtattgtgggattttatagttggtggggtgggggagttttatgagggttgttagggaggggttgttgattgttttattgtttttgatttttttagttaagttttttaatgttttttgggttgtagatggtgggtgttgttgtttttttttattgtttgttttggaggtagtgttgggataattttgttttttatgttttttattgttgttaatgtttttatttattttattgtggattgattttggagaaatgggaggttttgagtttagattgtgaggttggggtggaggtggtttgatatttttatttatttttggtatttatgtttttgtaaaaatttgtttgttaattttttggtggttggggtgttttgaggttgggttttgtttttttagtttatggtttttgtttttgatttggtttagtattggggatttttggattgttatttttggttttgttgaagttgttaatttttttgggaagtggtaattttttttgttgtttttggttttgtttttttggggttggggtgttagtggttttagtttggtgtggtattgtggtggttttttttgttgtttggttatgttttttttgttttggtagtttgggatgggttttgtggttttggggagggggtgagttgtttttttttgtgttttgttgttggttgggtttgggtgtagtgtggatatttatttttagtggatgttttttttattgtaggggttgggtggggtgtgttggggattgaaagttgttttggggtgggtgtttgtttttttgtggttgggtttgtatttaggtgttgttgttatggtttggttttggtttggttgtgggatgaggtttggtgtgttttgttttgtttggttttggttgggtttgggttgtgggtgtgtagggtgtgtagggtgtatagggtgagggtggtggtggtgtgggggttggggtgtgggtggtgtggtgggttggggtgtgtaggttgggttgtaggaggtgtttagtttgtttggtgtattggtgttgtgtggttttagataaaggtggtgtatttttgaagaggtggtggtttttgtaggtggtggaggggatggtggtttgggttggagttggttggggatgtgggtttgagggtgtggtggtttaggttggtttggtttttaagtgggtaagggttttgttttgaggtttaggaatggtttttgtttgatttattttttttttggttttatgaaa

SEQ ID NO: 2691 - DNA, 2265 bp, Artificial Sequence
  chemically treated genomic DNA (Homo sapiens)
ttttgtgaggttaggaagggagtgggttaggtagaggttatttttaggttttgggataaagtttttgtttgtttggggattgggttagtttaggttgttatatttttgggtttgtgtttttggttggttttggtttgggttgttattttttttgttgtttgtaggggttgttgtttttttaggaatgtgttgtttttgtttgggattgtgtggtgttggtgtattgggtgggttgagtgttttttgtggtttggtttgtgtgttttggtttgttgtgttgtttatgttttaatttttgtgttgttgttgtttttgttttgtgtgttttgtgtgttttgtgtatttgtggtttgagtttagttagagttgggtggagtggagtgtgttgagttttgttttgtggttgggttggggttgggttgtagtggtggtgtttggatgtggatttggttgtggggagatgggtgtttgttttgaaatgatttttagtttttgatgtgttttgtttaatttttatgatgaagagggtgtttgttggaggtgagtgtttgtgttgtatttgagtttggttggtggtggggtgtggaggggggtggtttgttttttttttggagttgtagggtttgttttgggttgttgaggtgagggaagtgtagttgggtggtagggaaagttattgtagtgttgtgttaggttggggttgttggtgttttggttttgggagggtggagttggaggtggtaggaaaagttgttgttttttgggaaagttgatggttttggtagggttgagggtggtggtttgagggtttttgatgttgggttaagttgagggtgggggttgtgggttggaagggtggggtttggttttggagtgttttggttattaaggggttaatgagtgggtttttgtagaaatgtgggtattgagggtgggtgggggtgttgggttgtttttattttagttttatggtttgggtttagaattttttgtttttttgaggttagtttatagtgggatgaatgggggtgttggtggtagtagagggtgtgggggatagggttgttttagtgttgtttttagggtgggtggtgagaggaggtagtaatgtttattatttgtagtttgagggatattgagaggtttggttgggggaattaggggtggtggggtaattagtaatttttttttagtagtttttgtgggatttttttgttttattggttgtgaggttttgtggtgtgggtaagggagggtgggttttatgtgagttgggtatgttttgtttggagggtgttttttaggtgtttatttaggttgttttgttgatgtttatggtgttgtaggttgtatatatgtttttttgtatgtgtatttgtttatatggattgtatatttgtatatttttggtgtatatgtaagttaatgttgttttagtgtgtatatgtataaatattgggtgtatatatggattttgagggtgtatatttgtgtttttgtttttgtttgtatatttatggttatatatgtatgtatgtggtatgtttgttgtggtttttatgggtggtatatgttggggttttttttgtaataattatttttgtatttatatgtttgtttgttgagtggggaggttaggtttatagataggggtaagatattttgggttttatttttgtttgtttgtttttgtgttttgggggtttttgttttgggtttgtgtgtgtgtgtgtaatttggtatgtatttgtatgtgtgtttgtgtgtgtgattatgtgtgtttgtgggtatataggtatgtttttttgtttttagggtgtgggtgttttttgtgtgtttagataggttgtggtttaatttggagtagaggttttggaatgtgtgttgggggtttgttgaatattgtaaagtttagggtgtgaggggtagggttttttagttattttttatttattagggttgaggtagatagatgatggtgggttggaatttgtttgggtagggaagatttattttaggttatgaggttaatattgtgattaataggttagattttgggtatttttggtggttgttgtagtttggttgattggagtatgtgatttagtgtgattgtagaggttttgtttttagtgttttagtttttttatggtgaggatttttttggtgaggggttttgtggtgggtttttttatttttggtgttgtgtagggtgttgagtagatggatgttatgttgtatgatgggtaagggtggtttattagt

SEQ ID NO: 2692 - DNA, 2459 bp, Artificial Sequence
  chemically treated genomic DNA (Homo sapiens)
ggtattttttaggtttattaagattagttttttgtgtattgtgttttttgattatattttgggtttttgtaatgtggttagtattttttggtatttttttatttattatgtttttggtaagtagttgaattgtaaggtttttagggttttggtttgtgatagggttggagtatttagttgttttgttggtatatttattgtttgtagtgaagatgattagtgtttttttaagtagttttaggttttttatggttgttattagggtttttatagttgtatttagttttattagggagtttttaaatggtttgtggtttgaatgttttgtaaagttttgtttattgaattgagggtagtgggtgtgttgggggtaaagattggagttagtattgggtaggggttatgggtagttagggggttgggttaagattatttatgtgagaggtatagtataggaagaaggggtgattttggtgttgggtgttggttatgaggttatgggtgaaagttatgtagtgggtttttagtttgggtagttaggggggttgtgtttttatggataggttggttaatagtgggatggggattaggttttggttatagttattgttgtaaggagtggttggtgggaagtaggttaggttttggtaggggttttgaggtgggtagttgttgtgagggttgggttggtaggtggggttgtgggagtattaagggttgggggattttgggaggtgggagggtggttgagggtttgggtggtttttatttggttgtgggagtatgggatgtttagaaattgatggaagttttgatgggggggtaggaaggtttttttaggttttattttaaggtgttatttgttggttatttttgtgaggtagttttgggtagttaggattttggttatggttattttttttaggggtaggtttttttgggagttgggtattaggatgttagggtatatgtttatttgaattgggagttggttggttaggagggtggttttgtgggataagttatagagtttttgagatagatagaaatgtggttttttttagagagagagatagatgttttttttgtttttttgtaatttattgggaggaaagggatggagggttggggtggggaagaggtgtggttttttttttatttagagggtgtgtatagagatataggtatgtagaagtttgtgaattgtagtttttttgttgttagttggtttaggttgggagtggtagagttggggtgtttatagtagtttaggtttttatagttgaggttgttggtaaagattagtatgatgttgggtggatgggtaatggttaggttagtagttagggttaggaggagggattgtggtgtttttatggatatgggattgaggggtttgttttaagagagggagggttatttggttttagtaggttttttttgatattgtagatttaggtgttgtttttttttgagattttggatttaaatattttttgattttgatggttgttttttgaagttttagagggttggggtttgatagtattgggagattgtgggttgggatggaatttttttaggattagggtatttttagatttttgagtggagatttgattttttttgtttagtggtttgggtttagggttgggggtgtaagttatttggtgttgattagtggagttgggttggggggaaggtgttagagggagtttaggaggagttggtattgggttgtgggtgtttttgttttggttttgttttgtgatttgtgatttttgtggggtggggttgggggtggggttgggggtggggttgggggtgggttggggtgaggggtgttgttgtgtgtgtttgttttgaggttgttgtgtgtgtttgaggttgttggttgtggttttgaaatgggttttgggagttttttttgtgtggttggttttggttgaggtgttttgggttgtgtgtggggtttggtgttgtgtagtgtttggtgtttttttggtttggagtttttttagaggaggagtggtttgtgtgtttttagatttttggtattgggagatttgggtttttttgtaagagatttgagtgtggagtgttatgggtatttggtgaatgagtaaatggtagggaaaattgtgtagttttatggattgtgggttttttttttatgattagtaaaagttttgatatttttttttttgtgtatgtgtgtttgtgtgtgtgtaagttgtggttgggtgtggggggttgtgtatgtgtttgtgtgtggtgtgtgtggagtgtttgaggtaggtgtgtggtgttttaggtgtgtgtgtatgtgtggtgtttgaggtgtgtgtgtgtgtttttgtagtgtttgagggatatgtgtgtgtggtgtttgaggtgggtgtgtggtgtttgaggggtgtgtgtgtgtggttgaggggtgtgtttggtgtttgaggggt

SEQ ID NO: 2693 - DNA, 2459 bp, Artificial Sequence
  chemically treated genomic DNA (Homo sapiens)
attttttaaatattaaatatattttttaattatatatatatattttttaaatattatatatttattttaaatattatatatatatattttttaaatattataaaaatatatatatatattttaaatattatatatgtatatatatttgaaatattatatatttgttttaaatattttatatatattatatatagatatgtatatagttttttgtatttagttatagtttatatgtatatagatatgtgtatgtaggagaaagggtgttaaagtttttgttagttgtgaaggaagagtttgtagtttatggggttgtatggttttttttgttatttgtttatttattgggtgtttataatgttttgtgtttaggttttttataggagggtttgagttttttagtattggaggtttgggggtgtatgagttgttttttttttggagaagttttggattgagaggatattggatattgtgtagtgttgagttttgtgtgtagtttgggatgttttagttagggttgattgtgtagaggaagtttttagagtttgttttaagattgtagttaatagttttaggtgtatatggtggttttggagtgagtatgtgtagtaatgttttttgttttggtttgtttttggttttgtttttggttttgtttttggttttgttttgtaagggttataggttatggggtggggttgaggtggaagtgtttgtagtttggtattggttttttttgggttttttttagtgttttttttttggtttgattttgttggttagtgttaagtgatttatgtttttgattttgagtttggattgttaggtgaggaggattagatttttgtttgagaatttgaaggtgttttggttttggaggagttttgttttagtttgtggttttttggtattgttgggttttggttttttggagttttaggaggtggttgttagggttggggagtatttgggtttggggttttagggaagggtggtgtttgggtttgtggtattggaaagagtttgttggagttaagtagtttttttttttttgggatagattttttggttttatgtttatgggggtattgtggtttttttttttggttttggttgttggtttggttgttgtttgtttgtttaatattgtgttgatttttgttgatgattttggttatggggatttgggttgttatgggtattttagttttattatttttaatttggattagttggtggtgggagggttgtggtttatagatttttatgtgtttgtgtttttgtgtatattttttaggtaaagagggggttgtgttttttttttgttttgattttttatttttttttttttaatggattgtaggggggtgggaaaaatgtttgtttttttttttagggaaggttatatttttgtttgttttagggattttgtgatttgttttgtagggttgtttttttgattggttggtttttggtttggatgggtatgtattttggtgttttggtgtttagtttttgggggggtttgtttttggaggaggtgattgtggttgaagttttggttgtttgaggttattttataggaatggttggtaagtggtattttggggtggggtttgagggggtttttttgtttttttattagggtttttattgatttttaggtattttgtatttttatgattaggtaggaattatttgggtttttagttatttttttattttttaaagttttttagtttttgatgtttttgtagttttatttgttagtttagtttttatggtagttgtttgttttagggtttttgttagaatttgatttgttttttgttggttattttttgtgatggtggttgtgattagggtttggtttttattttattgttggttaatttgtttgtggaggtgtagtttttttggttgtttggattagaggtttgttatatggtttttgtttatgattttatggttgatgtttagtgttaggattgttttttttttttgtattatgttttttatgtaagtgattttggtttaattttttggttgtttgtgatttttatttagtgttaattttagtttttgtttttagtatatttattatttttagtttagtgggtagagttttgtagagtgtttaggttgtgggttatttggggattttttgatggagttggatgtagttgtggggattttgatgatagttataggggatttggggttgtttgaagagatgttggttatttttattgtagataatgggtatgttagtagggtagttgggtgttttggttttgttatgggttagggttttggaggttttgtagtttagttgtttgttaagaatatagtgggtgagggggtgttaggagatgttggttatgttgtaggggtttaaggtgtagttaggagatatagtgtatagagagttggttttggtaggtttgggaggtgtt

SEQ ID NO: 2694 - DNA, 2731 bp, Artificial Sequence; identical to SEQ ID NO: 2112
  chemically treated genomic DNA (Homo sapiens)

SEQ ID NO: 2695 - DNA, 2731 bp, Artificial Sequence; identical to SEQ ID NO: 2113
  chemically treated genomic DNA (Homo sapiens)

SEQ ID NO: 2696 - DNA, 2499 bp, Artificial Sequence
  chemically treated genomic DNA (Homo sapiens)
ggggtttggggttagtggggagagttaaggttatatgggttttggatgtggtgaggggtgagggaaggagggtattttttagttaagatgaaattattatttttgagtgttggtagtttttttaggttgttgatttgtaagaattttttgtttttgtgttgttttgaagaggaagaagttagaaaaggtttttagaataaaaatgttgtatttttatattttttttttttttttttaagtggagttttatagttttgagaaatagtaaggtttgggattagaggtttggattagttttattttttggttgggtttttttgttttgttatattttggggtagttggggggttttggtgggtggggttaggtgtagtaggtggataaagagaagttttttagttggattttggtgggttaggggaggggaggtaaattggggtggtttatttttttttattttttaatttttataatagtatgtttttttttttgaggttttttgggttttgtgaatttatatgtgtgtattttatgtaagaattttgttaattttatttagtattttttttttatttttatagagtagaaggtaatgttatttttttttttagaaggtaagttaaggtttagagaggttgtgatttttttaaggttatttagtttatagtattttttggtggtagatgttgtaggaggaggtgagggggttgtgtgggtggtgagatgtttagggtagagtagggtgggggtttgggggtgtattgggtttgtggatatgtggggaaatgggttgggtttatttttgattaaatttatggtgtgtagttttaaggggatgttattttttttggtgaagatgtagatggtgtggttgggttgggatattaggttaagaaatagttttaggtttatggtgggggtggtaaggatagtggggatggtagtgaaggtgttgagtgtggtgtgggtagtagttgtggtaggattttggtgtgttgggaaataggggattaggttttattttttggggatagtatttaattggagtgtattatttttggatttgttttgtttttttggtttttgtttagttttgttggttaagattttattattagatttgtgtgtttttatagggagggtggttgttatgaatgtatagttgggagggtggagttggagttggggatttttgattggtagggaggatgtggatgtagggggttgattgtaaggggaaggggaattggttggatagggagaagtaggtttgttttttgggattttggtgttagggattttgtttagttttaggtgttgttttgatttagaaatgattgggtgttgttgttttggaaaggttttagtgtatggatatttgagggtttgtttagagttttgttttttggtgttgtatggtggtggaagggagggagtgaatgggattttttaaaagggattttagagttttatttagtgggatgtgatatttgtaggtgttttaaattggtgggaattttgattggaaggttggggttaaggatgaattttttgttgtttagattgttttttgtagagtagttgttgttagatagtgggagttgttagatagtgggagtttttattttgtgtataggatgggggtagggagtttgtagttgtgggaggtaggaatgattgtttgggaatttttttttttttttttgaattttagttttggtattttattagggggtatagtgatggtttagggttgggtttgggattttagttgaattttttagagtattttatttttttggttagtggtttaagtgagtgaattagaatgtttttttgggagttttgaaattggaattggagagaggagttttttatggggaggtaaatgggagttggggttatttgtagtgatattttttgagtttgaggagtagatgagattgagagagaaaagttgatttagagaaagggagtgataatagggtatgttggtttatatttgtaattttagttatttttatgggatttgtttttttgatgtttgggtatgaaaggattttttaagttttagaatagtgggagaatttaataaagaaaaaattaatatatatataaggttattttgtggaggaaaaaatggattaattttaagtaaaaaattgggaaggattttggtaaaagatatgttagaaggaagtaatgttttttaagatgtttttagaaatttattagataggtggggtgtggtggtttatgtttgtaatttttgtattttgggaggtagagatgggtggattagttgaggttaggagtttgagattagtttgggtaatatggtgaagttttgtttttattaaaaatataaaaattagttgggtgtggtggtatatttgggaggttgagataggagaattatttgaattttggaggtagaggttttagtgagttgagattatattattgtattttagttgggttattgagtgagattgttt

SEQ ID NO: 2697 - DNA, 2499 bp, Artificial Sequence
  chemically treated genomic DNA (Homo sapiens)
agatagttttgtttagtggtttggttggagtgtagtggtatgattttagtttattgaaatttttgtttttaaggtttaagtgatttttttgttttagttttttgagtgtgttattgtatttagttaatttttgtatttttagtagagatggggttttattgtgttgtttaggttggttttaaatttttgattttaattgatttgtttatttttgttttttaaagtatagggattataggtgtgaattattatattttatttgtttgatgggtttttaagaatattttaaaggatattatttttttttgatgtattttttattgagattttttttagttttttgtttaaggttaatttatttttttttttataaagtaattttgtatatgtattggttttttttttgttgagtttttttattgttttgaggtttagaaagtttttttatatttagatattagagaaatagattttgtgagagtaattgggattgtaggtgtgggttagtatgttttgttattattttttttttttgagttagttttttttttttagttttgtttattttttgaatttaggaaatgttattataggtggttttagtttttgtttatttttttatagggagtttttttttttagttttagttttaaaatttttaaggaagtattttggtttatttgtttgggttattggttagagggatgggatattttgaaagatttagttagagttttgggtttagttttggattattattgtgttttttggtgagatgttagggttgggatttagggagaagaaaggaggtttttggatagttatttttgttttttgtggttgtgggttttttgtttttattttgtgtatgaagtgggagtttttgttgtttggtagtttttgttgtttggtagtagttgttttgtaggggatagtttggatggtagaaagtttatttttaattttagttttttagttaaggtttttattagtttgggatatttgtaagtgttatattttattgggtgaaattttaagattttttttaggggattttatttgtttttttttttttgttattatgtagtgttgagaaatagagttttgaatgaatttttagatgtttgtgtgttggggtttttttaggatggtggtgtttagttgtttttgggttagggtgatgtttggaattgggtagggtttttggtattgggattttgaaaagtagatttgtttttttttgtttagttggttttttttttttttgtagttggttttttgtatttgtgttttttttgttagttgagggtttttagttttaattttatttttttagttgtgtgtttatagtgattgttttttttgtagggatgtatggatttggtggtggagttttggttggtaggattggataggaattgaaggggtgaggtgggtttgggggtggtgtgttttaattgggtgttgtttttagggggtggggtttgattttttattttttggtgtgttgggattttgttatagttgttgtttatattgtgtttagtgtttttattgttatttttgttgtttttgttgtttttgttatgggtttagagttgttttttgatttggtgttttagtttagttgtgttgtttatatttttgttaagaagaatggtatttttttagagttgtgtattgtggatttggttaaaggtgggtttagtttgtttttttgtgtgtttataaatttagtgtatttttaggtttttgttttgttttgttttgagtgttttgttgtttgtatagtttttttatttttttttgtagtgtttgttattagagaatgttgtggattgagtggttttgaagggattatagtttttttgaattttagtttgttttttgaaaaggaggataatgttattttttgttttgtagggatggaaagaaaatattgaatggagttgatagagtttttgtgtggaatgtatgtatataaatttataaagtttagaagattttgggaagaaggatatattgttgtgagaattaagagatgggaagagatgagttattttagtttgtttttttttttttggtttattagagtttggttagaaaatttttttttatttatttgttgtatttggttttatttattaaaattttttagttgttttggaatgtggtagggtagggaggtttagttagggagtgaggttgatttaggtttttagttttagattttgttgttttttagggttgtggggttttgtttggggaggaggagggagggtgtagaggtgtagtgtttttattttgaagattttttttgatttttttttttttagggtagtataagagtaaggagtttttgtagattaatagtttggggaaattgttgatgtttaaggatggtgattttattttgattgaaaggtgtttttttttttttattttttattgtatttggagtttatgtgattttggttttttttattggttttgggtttt

SEQ ID NO: 2698 - DNA, 2299 bp, Artificial Sequence
  chemically treated genomic DNA (Homo sapiens)
ttttttttaaaaagtattaaggttatttatttaataaataggaagaaattttaaagtgaaaatatagaggggttagggatttttttattaagagtttaagattaggttgggtttagtggtgtatgtttgtaattttagtattttgggaggttgaggtaggtggattataatggaaggggtttgagattagtttttattaaaatataaaaattaggtgtggtggtgtgtatttgtaattttagttatttgggaggttgaggtaggagaattgtttgaattttggaggtggaggttgtagtgagttgagattgtattattgtattttagtttggatgatagagtgagattttgttttaaaaaaaaaaaaaagagtttaatattaattttttgaaagttagaggaagtagaatgtattgtaagtaataaggagaaataagattgattttagtgttgtataaagggaaattattaattttgaaagtaaattatgtgaagggttttttgtgggttttttttatattttaagttttagggtatatgtgtataatgtgtaggtttgatatataggtatatttgtgttatgttggtttgttgtatttattaatatattatttatattaggtattttttttaatgttattttttttttagttttgatttttttgataggttttggtgtgtgatgttttttttgaagggtttttttaaagattaggttaaagttaaagattaagtttttttttttaaatgttttagttaaaagtaggagttaatttttatatttttgaaggtggttttaggattttaagttatattttggtaagggtgtggtagttggtagaggattgtaggtttttgttaggtagaatttgttgggttttggggagtggagatttagattttgaggtggaagtagagataagagttgggtatatttatttggatgtggggttgggagtggtgaattagagtttagttagattttggaggttggtagtaggttttgtagaggtgtaggggtattttatttagaaggggttatttattggttttttgtggttaaaattagttttaagtaggattttttatggttggagttgtttttaaaggggtgttggtttttatttaggtgtgattttgagtgttgtttagttgaaaaggtgtgatgatagggagtatatgtgaggttatttgggaagaatattttgttaagtgtagaggttgtaaaaatgtggaatatggttttgttttttatgttttattgaaaatgattattagaagtagaaattgggtttgtgtttagaatttgaaaatttgtagggtagaaaaataggataaaggtattttttagtgattgtaaaattaaattttaatagaaagatgtttgaagagataggtggattatgattttagaattggagataggagaggtttttagaattaaagattatttatggttatataaatatttgagaggtatttttattaaaatatttttttttttatattaatattatgaattatatgttatgtataatttataatagagtatagtagagttattagtggtttaaagtgttgtatatatgattgttatatgaggtaaataagattttttgatttagagttaagaaaatggaaataataattgttaaggtatattaagaattatatatgtatgtgtgtgtgtatatatatatatatatatatatatatatatatatatatatatatataatatttaatttttatagtaatatatatttataaatgagtatatataaatatgtgtgtgtatgtgtgtgtgtgtatatatatttatttaatttttgtagtaattttataaggtagggattattgtaatttttatttgagagaggtgtattttgaagtatttggtagtaaggtaatttgtttaaggttatatagttagtaataagtatagtatggttttgtaggtttaggtgggttttattatattgttttttttggtagtaagaaaatggaaggtttttgaagtagtgggggagttattgggtataaggaagtagatttttggaggaatatataattagtaaaagtggagtttaggaatagatgttattaggtataagtgatttttttagatattgggaatttgtgttttgaaatattaaagtatttttaggaagtagaaaagttagtttttttattgaattgttatgtggttttgaagaaaatgttttaatatttataaaatttaaagttttaatttgtaagaaggaaaaaatgttatgtgttttttattaagttttttttt

SEQ ID NO: 2699 - DNA, 2299 bp, Artificial Sequence
  chemically treated genomic DNA (Homo sapiens)
aaaaaaaaatttagtaggaggtatatgatatttttttttttttgtagattaaagttttgagttttatggatattaggatattttttttaaaattatatagtagtttaatgaaagagttaatttttttgttttttaaaaatattttggtgttttaaaatataagtttttagtgtttggaaaaattatttatgtttggtaatgtttatttttgggttttatttttgttaattgtgtgtttttttagggatttgtttttttgtgtttggtgatttttttattattttaaaaattttttatttttttgttgttagggaaagtggtgtggtggaatttatttgggtttgtaaggttgtgttatgtttgttattagttgtgtgattttgggtaagttattttattgttaggtgttttagggtatgttttttttaagtggggattgtaatagtttttattttataagattgttgtaaggattaaatgagtatatatatatatatatatatatatatatatatttgtatatatttatttataggtatgtattgttgtagggattaaatgttatatatatatatatatatatatatatatatatatatatatatatatatatatatatatatatatataatttttaatatgttttagtaattattatttttatttttttaattttgggttagagaattttatttattttatataataattatatatgtagtattttaaattattggtaattttgttatattttgttataggttgtgtatagtatataatttatgatattggtgtgaagaaagggatgttttaatgaaaatattttttaaatgtttgtgtagttatagatgatttttaattttgaaaattttttttgtttttaattttgaggttataatttatttgtttttttaggtatttttttgttgaggtttagttttgtagttattaaaagatgtttttgttttgtttttttgttttgtagatttttaggttttgaatataagtttagtttttgtttttgatgattatttttaatagagtataaaaaatagagttatgttttatgtttttatggtttttgtatttggtaaaatattttttttgaatggttttatgtgtgttttttattattatgtttttttagttaggtaatgtttagagttatatttgagtggaggttgatgtttttttggaggtgattttagttataaaaagttttgtttggagttggttttagttatagagggttaataaatggttttttttgaatgaggtgtttttgtatttttgtagagtttgttgttagtttttaggatttaattgggttttgatttattgtttttaattttatatttaggtaagtgtgtttagtttttgtttttgtttttattttaagatttgagtttttattttttagaatttggtaggttttgtttgataaggatttgtagttttttgttagttgttatatttttgttaaggtgtgatttggagttttggagttatttttggagatgtgaaaattagtttttatttttagttaaagtgtttggaaagaaaagtttgatttttagttttgatttggtttttaaaaaaattttttaaggggaatattatatattagggtttgttgggggggttggggttgggggagggatagtattaggagaaatatttaatgtaaatgatgtgttgatgggtgtagtaaattaatatggtataggtatatttatgtattaaatttgtatattgtgtatatgtattttagaatttaaagtataaaaaaaatttataaaaaattttttatatgatttatttttagaattggtggtttttttttgtgtggtgttggaattaattttgtttttttttattatttgtggtgtattttgttttttttaatttttaaaaaattagtgttaaatttttttttttttttttgagataaaattttattttgttatttagattggagtgtaatggtgtaattttagtttattgtaatttttatttttagggtttaagtaatttttttgttttagttttttaagtagttgggattataggtgtgtattattatatttaatttttgtattttagtaggggttggttttgaattttttttattgtgatttatttgttttggttttttaaagtgttgggattataggtatgtattattgagtttagtttagttttgaatttttgatgagggaatttttgatttttttgtgtttttattttgggatttttttttgtttattaaatgaatgattttggtattttttggagaaaa

SEQ ID NO: 2700 - DNA, 2270 bp, Artificial Sequence
  chemically treated genomic DNA (Homo sapiens)
gttatattttatgttttttgagagtgttattaatggaattgagaaaataattatttagatgggttatttgggggttgatttttattttggaatttttttggaaggtgaatggtttatgttatgtagttgttatgtaagaggtattatgggatttttttttttgggtgtttatggagttgtggtagagttttgggtgatttagtagtagttgtttgttgtgtggttgtttttattgtttttttttataattgttgttgatttttttgtattgattttgtagatgtttttttggttttgtggtgtttttttggatttttaagggatttttgtgtatttattttagttttttttttgttagtaatgtttatttttttagtttttttaagtagttttataaaaaatttttagtgaaaaatattagttaagaaggtgaaggtatttggaaaatttttagatttggttattgtgtgttgtaattttagtttttttttatagttatgatatgtatattaatgtaggtgtttttgagatttttgtaggtttgagaaagtatgatatgtttttagaattttggatttggattttattttggatagtatatgataaggatgaggatttttattttagttagttaaagttggatagaatttttaaaagtaatgaagttagttttttggatatatttatgggttttgttttgagaaggaattgagtaggtagtgagaagagttgagtgaagtttggtttgtgagtgttttaataattgagatgaatgttgatttgtttgtaggtaagttgttagtaagtatttattaaatatttattgtgagttttgtattttgtttagttattaagaaattaaaagggggaaaaatagttttatttgtttagagtttataataaatttgtattgtgaatatagaatatagaaaaattggattttagtgaggtgttagaaagagtgtattgtttagttgagatagtagatgaaggaaaaatatttttggtttttttttgttatgtaattgtattgggagggtggagtgttggtgtttttagtttatttaatttggatggagttgtgggtttattagtttggggattggttttattgtttgttttgtttagtagttgtgtttttttggattttttgttttagtttgaattttttttttgttttggttttattttaagatgaagattgtgtaatttagaaaatgtagtgtaagtaattatgtttagtgtgatgttaaatattttttaaaggtagtgtagatttgtagaaattgtagtttgggagaagtgatggtgtttttttttttattattttagtttgttttgattatttttatttatatgatttattgtgatgtttttataatgtagtttggttattatttgggaatttgttggaaatgtagattttggtattttgtttaagattttaaattgaagaaggttttagtttttttttgtaattagtaatagatgtaatttgtatggttttgatgtaaattgatttggaagaatggttttggtatttatattttggtttttagatgtaggtaatttgagttgaatatttttaaatttgaggtatagtatagaaaaaagaatataaatagtttatataaagtaaaaaaattttttagaaaggatttaagttggttggggtgtggtggtttatatttgtaattttagtattttgggaggttaaggtgggtggattatgaggttaagagatggagattattttggttaatgtgaaattttatttatattaaaaatataaaaaattagttaggtgtggtagtaggtgtggtagttttagttatttgggaggttgaggtaggaaatttatttgaatttgggagatggatgttgtagtgagttaagattgagttagtgtattttagtttgggggatagagtaagattttgtttttaaaaaaaaaaaaaaaaaaaaaaattaggtttaggtaatataatgaggttttatttttataaaaaaataattgttttaattagttaggttgatggtgtgtatttgtgattttagttatttaggagggtgaggtgggtggattgtttgagtttaggagtttttttttgggatgtttttatttttgtttgtagttttatttgttattttgtgtagatttattttgtttttgttttgttttgttttgttttgtttttgagatagttttgttttgttatttaggttggagtatagtggtataattttggtttattgtaaattttgttttt

SEQ ID NO: 2701 - DNA, 2270 bp, Artificial Sequence
  chemically treated genomic DNA (Homo sapiens)
gggggtggagtttatagtgaattgagattgtgttattgtattttagtttgggtgatagagtaagattgttttaaaaataaaataaaataaaataaaataaaaatagaatgagtttgtatagagtgataaatgaggttgtaggtagaaataagagtattttaagggagggtttttgggtttaagtgatttatttattttatttttttgagtagttgggattataggtgtatattattaatttggttaattaaaataattatttttttgtagaggtggggttttattatgttgtttaggtttgatttttttttttttttttttttttggagatagagttttgttttgttttttaggttggagtgtattggtttaattttggtttattataatgtttattttttaggtttaagtgagttttttgttttagttttttgagtagttgggattattatatttgttattatgtttggttaattttttgtatttttagtatagatggggttttatattagttaggatggtttttattttttgattttgtgatttgtttgttttggttttttaaagtgttgggattataggtgtgagttattgtgttttagttaatttaagttttttttaaaaaatttttttattttatataaattgtttgtatttttttttttatgttatgttttaggtttgaagatgtttagtttagattatttgtatttaaggattaaaatgtaaatgttagggttatttttttaggttagtttgtattagaattatgtaggttgtatttgttgttagttataagagagagttaggattttttttagtttaaggttttaggtgggatgttaaaatttgtatttttagtaagtttttagatgatggttaggttatattgtgagaatattataatagattatgtgagtgagaatgattagggtaggttgaggtggtggggagaggaatattattattttttttaagttgtagtttttgtagatttatgttgtttttgggaaatgtttagtattatattggatataattatttgtgttgtattttttgaattatatagtttttgttttagagtggagttagggtaaaagaggaatttaagttggaataaggagtttgagaagatgtgattgttggatagaataagtgatgaagttagtttttaaattgatgagtttgtagttttatttaaattaaatgggttgagaatattaatattttatttttttggtatgattgtatggtagggaggaattaaaaatattttttttttatttgttattttagttaagtagtatattttttttagtattttattagagtttagtttttttgtattttgtatttataatataggtttattatgaattttgagtagatgaggttattttttttttttttggttttttagtaattaggtaaagtataaggtttatggtgggtatttaataaatatttattgataatttgtttgtaagtgagttgatgtttattttagttgttgaggtatttatgggttaggttttatttgattttttttattgtttatttagtttttttttaaagtaaagtttgtggatatatttaaggaattggttttattgtttttaaaaattttgtttagttttaattggttagaataggggtttttgtttttgttatatgttgtttagaatgaagtttaaatttaggattttgggagtatgttatgtttttttgaatttgtaggagttttaagggtatttgtattgatatgtatgttatggttgtagaagggggttgggattgtagtatataatagttaaatttggggattttttagatgtttttgtttttttggttagtattttttattgaaggttttttataaaattgtttaaggaaattaggggagtgagtattgttagtagaaaggggattaaaatagatgtatagaggttttttaaaagtttaaaggaatattatgaggttagggaaatatttgtagggttaatgtagagaaattaatagtagttgtgggggaggatagtgaaggtagttatatagtaggtagttgttgttgggttatttagggttttgttgtggttttatgagtgtttagaaggaaaggttttatgatattttttgtataataattgtatgatataggttgtttattttttaggaagattttagggtaaagattagtttttaaatagtttgtttggatggttatttttttaattttgttggtagtatttttagagaatatagagtatagt

SEQ ID NO: 2702 - DNA, 2471 bp, Artificial Sequence
  chemically treated genomic DNA (Homo sapiens)
taggttgtgggggtggtttttgtgtggtgttaagaggaagttgggaagttaagtttttatgttttatgtatgttgtgttttaggttttgatgttggtttatatataggtggatatttttgagttatttaagataaagtttaaagaggaaatagttttagtggttggggtaagatttagatggattttttttttgggttttgttttatttgttatattataaggttttaggtagatttgtggttattttttttggtatttaggtataatagttgtttggttgtgggatttttaggtttagtgagtttttttttgtgtttgttggtttttttggttatgggtaggatttttgtggtgtagggagggatatgttagagtttttagtattttatttttaagagagggatagagaattatttagaggggttggggatgttaaaggggtatatgaagattttaatttttagttttttagggttgtagtttagaggtagtttgttttttttttaaaattaaatttaaatttaattgtatttagaagtttttgtattgggaggtgtttgtttaggatgttttagtttggttttgtttttttagatagttagggatttaggttataattggttaatttagtgggtgaatttgagtttgtagtagtgttggttgattgtttttatttagtgttgtaattggtatatttgtagataggaaattttttttattgaagtttttagtttattatttgagatatttggtgtgggtgggtgatttagagataaataatgagtgggggttttttgtatagtaattaattgttttaattgttaatatgtttaatttattatgtggagattaaggttgtgttgaggaaggggttttggtttttttttgtttttagattgtagggtttattttgtaatgttaatgtttatggtttttgttagttgtggttaggtgttaggtatatgggtaatgggtagggttagtatttggttttatatgggagttttgtgtagtatttgggttttttttgtgtgtgtgtgtattgggtatggaggtattttttttttttgttggagtttagtttgtgtggatgtagtgtatatttggtataggaagtagagttggagatgttggtattgttagttgtgttgtttttagggtgttttattttaattttttagagtggattattttttattgtaagtagaaataaagtttggttaaaggtttattgtataaattagtagaaaatgtttgtagttgttgatttgggaagtggtttttgaatgtttataaaatttggttttgagtagtagtgaagttagtatatgtttgagtggtttttagtaggtgtgtagaagttgtgttgtttttgggaagtagggttagaggttaaggattgtgaaaagtttttatttttagtattaattatgttaggtagattgtttgggggatgtttattttgaaagtataaaaaaataaaatagatttttagtaagggaggatgggtgtgtaggttatggtagttttgttgagtagggaggggttttgtttgttgtttgttaggttgatgttttggttttttggggatatagtttttggtttattggtttgttatatttttatgggtttggttgagggttgttttttggtttaatggtaatagtttttttatgttgtgggtgaatggaggtgttagtagatagaggaggagggttagggtgtggtgggagggagaaatttgttattttttttttagagtggagtttatttgggaatgatagtaggaggataaattttgaaagaaaaataaagtggagtttaggatgagaattattagtatattttagagtttaaaatgttatttaattttttgtagtgtttattataataaatttatttaaaatttatttttataatgtggttgagaatattgtttttgttgattgattatttttgggttaagagttttgtgtgtgtttaggtattttaggttttttttggttattatttttgtgtttgtgtttattgtataaaagtgaagttttagttgttttaggttggttttttttttgattttttattttgagtgattgttttagaagtgtattattttatgatatagtttgtgtttttgggagtttttttttaggagatattgatttttggttagttttatgtaagtttggttagttgatggaggtggaggtaggtgatttgagagggattttggttttgattttgggtttttgtaggggataatggattaggtttagtatagaaaggttttggagaattaataatattgattaggttgtttttgtttttaatatgtaagttgatagggtgattgggaaaattaggagtttaaattagatggttaggtattgaggtgggtaggatatttgagtaggtatgttgtgtgtgttgttatttattttgatgaggatttgtagttttttttgtggtg

SEQ ID NO: 2703 - DNA, 2471 bp, Artificial Sequence
  chemically treated genomic DNA (Homo sapiens)
tgttgtaaggagggttgtgggtttttgttagggtgggtggtggtatatatagtatgtttgtttagatgttttatttattttggtgtttggttgtttagtttaggtttttagtttttttaattattttgttaatttgtatgttgaaggtgggagtaatttagttagtgttgttagttttttgaggtttttttgtgttgagtttggtttgttgttttttgtgagagtttaagattagagttagggttttttttagattatttgtttttatttttattagttaattgggtttgtgtggggttggttaggggttagtgttttttgggggagggtttttagaggtataagttgtgttatagggtgatgtatttttgaagtagttatttggaatgggaaattagaaaggaaattagtttggagtggttgaggttttatttttgtgtagtggatataagtgtagaggtgatgattggggaggatttgagatgtttgagtgtatgtagggtttttggtttggaggtgattagttagtaagagtaatgtttttagttatgttgtaaaagtagattttaagtaagtttattatgataaatattatgaaggattaggtaatattttggattttggagtgtattgatggtttttattttaaattttattttattttttttttaaaatttatttttttattgttatttttaaataaattttattttaaaggggaggtggtgagttttttttttttattgtgttttagttttttttttttgtttgttgatatttttgtttatttatagtataagggagttgttgttattgaattgaggggtagtttttgattaagtttatagggatgtagtagattaatgggttgggggttgtgtttttggaaagttggggtgttagtttggtaggtaataagtgaggtttttttttatttagtagagttgttgtggtttgtatgtttatttttttttgttaggagtttgttttatttttttgtatttttaaaatgagtattttttagatagtttgtttggtatgattgatgttgggggtggaagttttttatagtttttggtttttgattttgttttttgagggtggtgtggtttttgtgtgtttgttgggggttgtttgggtatgtgttgattttgttgttgtttagagttaggttttgtaaatatttaggagttattttttaggttagtaattgtgagtgttttttgttggtttgtatgataagtttttaattaagttttatttttatttgtaataaaggatgatttattttgggaggttaaaataaagtgttttaggggtggtatagttggtaatgttaatatttttgattttgttttttgtattgggtgtgtattatgtttgtataagttgggttttgataggaaggggggatgtttttgtgtttggtgtatatatatatagaaggggtttaggtgttgtatagagtttttgtgtggggttgagtgttggttttgtttgttgtttgtgtgtttggtgtttggttgtagttggtgaggattatggatattggtattgtgaagtgggttttgtagtttggaagtagaggaggattagagttttttttttgatgtagttttgatttttatgtggtggattaaatatattagtagttaaagtagttaattgttgtgtagggggtttttgtttattgtttgtttttgaattatttgtttatattaggtgttttagataatagattgggaattttagtgaggaggattttttgtttgtagatgtgttgattatagtgttgagtgaagatagttagttagtattgttgtgggtttgaatttgtttgttgagttaattagttgtggtttgaatttttggttgtttaggggagtagggttaggttggggtattttgagtaaatgttttttagtgtaggggtttttaagtgtagttaagtttagatttggttttaaagaagggatagattgtttttggattgtagttttgaaaaattggaagttgagatttttatgtgtttttttggtgtttttagtttttttggatggttttttgttttttttttgagggtgagatgttgaaggttttggtgtatttttttttgtattataggagttttgtttatggttagaagagttagtagatataggaggggatttgttaaatttgggggttttatagttaggtagttgttgtgtttgagtgttagggagggtggttataggtttgtttggggttttgtgatatggtaggtgagatgagatttagggaaggaatttgtttggattttattttagttattgaagttattttttttttgggttttattttagataatttagagatgtttatttgtgtgtaaattagtattagagtttgaaatataatatgtatggagtatgggagtttggttttttggtttttttttggtattatatagaggttatttttatagtttg

SEQ ID NO: 2704 - DNA, 2343 bp, Artificial Sequence
  chemically treated genomic DNA (Homo sapiens)
ttgtttgtataagtttatgaggtgtgggtgggtttttgggagtgtgtttttagggttaagggtgggttttttatggtattgattatttatttttatttatggttttttattgtttttagaataaagtttttttgttgtagtttatttggtattgtatttttgatttttgttgtttgtgtgggtttttttttttgttgattttatttgtttttttgtgttttaggtgtatttagttttatgtatttatttatttatttttgtaggttggggtataggggttgaagattggataggggagtttgagttttagttttatttttgttgtgtattgaatttaaattttggtttttttttttagtagattgtatatatttgattgtttggtttgggggtttttgtgaaggttaaaggagtgaatgtttattagtgtgttttttgttatatatttttttagtattgagttttattgttttagtttggaatttgtttattgttttttatttataggtttttgtttgagttaggttattgaaggggtttaggatatgttattttagaatatattattttggtatattgatttttttgtattaaaggtattttagaaatagtaggtgtagaaagggggttttgatttttttttttttttttgaaagtaggagttaaaatgttttgtgaaagatgttttttttatgttaggaggaggaaagatattattagataaggagagttgaggttaaaagaaatttgtatgaatagattttttaatttttatttttttagttatataattgttattttatgtttaatttggtataaaagtttttatgtttagttatttttttgggttttggttatttgggtgggaggtgggggggtttttttgtatatgtaaatgaaatttgtatgttttttttttgttgatttgttttatgttagtttaattttttagtttagttagagattttaagatagtaaagaagggtttttttttttttattttattattattttgtatttttttgtttttatttttgttttttatttagtagagagagtgagtttattataaatataagttattttagttgtttttttgagaattttttatggttatttgttttttgttaaataaaatttatagttttgattgtggtttagggattttatgtaatgagttttagtttgtgtttttgttatttggttttttttttgttttaaagtattagggtttttatttgaaatttattggtgttgtgagtttttagtaggttattttgggtttttttttttatttttagtttggttaggtattttttgttttggtagttttttttagagttttttttttttttaatatttttttttttaggattttttatttgtaatgtaatgattttttaatttgtttttattttattaaagtattgtttgtaagtaaatttagaaattagtagaatagtttttgttttatgttttttatgttttggtgtatatattttaatattttgagtggatgtttgaatttgtggattatagtgaatttgtatatatatgttattatttttttttgtatgatgttttatatatttatggtaattttttttttaaaagaaatagggtttttttatgttggttaagttagttttaaattttaggttttaagtaatttttttattttagttttttaaagtattgggattataggtatgagttattttgtttagtttgataattttttttttttttttgagatggagttttgtgttgttgtttggattggaatgtagtggtgtgattttggtttattgtaatttttattttttaggtttaagtgatttttttgttttagttttttgagtagtagggattataggttgataatttttttttaaataaaagattttatttatgtattattgaatttagtttattagtgtagagtatatgaataaagagaaaaagtatttttttaattaaatatgtttagttgtttagatagtggtgatatttttagtttgttatggtaatatgattataattttgatataatatgaatatgtgtagtattttatgtttaattttttatagatttagtttggttttttttaatatttttttttggagttgtatttgatgttattattagtttttatatagatttattggggaatgggataattttgtttttgttttttgtgtaggaattatttgattttgaaagttttgtgagaagttgtggtgagaaatggagttaattatatattatgatggtggagaaagataatgtttaatttataaattaggtatagttaagagatgaatagtaataattaataatat

SEQ ID NO: 2705 - DNA, 2343 bp, Artificial Sequence
  chemically treated genomic DNA (Homo sapiens)
gtattattaattattgttgtttgttttttaattgtgtttaatttataagttaaatattatttttttttattattgtggtgtgtggttgattttgttttttgttatagttttttataagatttttaggattaagtgatttttgtataagaaataaaagtaaaattgttttattttttagtggatttgtatgaaaattggtaataatattaggtatagttttaaaaggagatattggaaagaattaagttgggtttataaggaattgagtatgagatgttatatatatttatgttgtattaaggttgtgattatattattatagtaagttgaaaatgttattattatttggatagttggatatgtttgattgggaaggtattttttttttttgtttatatgttttgtattagtaggttgggtttagtaatatataggtgagattttttatttaaaaaaaagttattagtttgtaatttttgttatttgggaggttgaggtaggagaattgtttgaatttgggaggtggaggttgtagtgagttaagattgtattattgtattttagtttgggtaatagtgtgagattttgttttaaaaaaaagaaaaaaattattaggttgggtgaggtggtttatgtttataattttagtattttgagaagttgaggtgggaggattgtttgaggtttggagtttgaggttagtttggttaatatagggagattttgttttttttaaaaaaaaaattattatgggtatgtaaaatattatataggaaaaaataatagtatatatatataggtttattataatttatggatttaggtatttatttagggtattgggatgtatgtattgaggtataaggggtataaagtggggattattttattggtttttaaatttatttgtaaatagtattttgataaaataaaagtaaattaaaaaattattgtattatagataaggaattttgaaggagggagtgttggagaaggggagggttttggagaaggttgttagagtaggggatgtttaattaggttgaaggtgaagagggggatttggagtggtttgttagggatttgtggtattggtgagttttagatggaggttttggtgttttagaatgagaagagggttgagtggtggaagtgtaggttgaggtttgttatatggggtttttaggttgtggttgggattgtggattttatttgatgaagaataggtggttataggaggtttttaaggaggtagttgggatgatttatgtttgtaatggatttattttttttgttgagtagggggtgagggtggaagtaggggagtataaggtgatggtggggtggaggaggaaaaatttttttttattgttttagggtttttggttgggttgaagaattaaattgatataaggtagattagtaggagaaaaatatatagattttatttatatgtataagggagtttttttgttttttgtttaaatgattaagatttaaagaagtgattaggtataaaggtttttgtattaggttgaatatagaatggtaattgtgtaattaggaagataaggattaaaagatttgtttatatagattttttttggttttgattttttttatttggtaatgttttttttttttttggtatagggagggtgttttttataaggtgttttagtttttgtttttaggaagaaaaggggaggttagagttttttttttgtatttgttgtttttgaagtgtttttagtgtagagaaattaatatgttagagtggtgtattttggggtggtgtgttttgaatttttttagtggtttggtttagatgggagtttgtggatggagagtagtggatgggttttaggttggagtagtaaggtttggtgttggggaggtgtgtggtagggggtatattgatgagtatttatttttttaatttttgtaagaatttttaggttaggtagttaggtgtgtataatttattgaaggagaaaattgaagtttaagtttagtgtatggtaggggtagagttggggtttaaatttttttgtttagtttttagtttttatattttaatttgtaggaataagtgaatgaatatatgaggttgggtatgtttggggtatagaggagtgagtgaaattagtagaggaggaggtttgtgtaggtggtaggaattaaggatgtagtgttaggtgggttgtggtgagagagttttattttgagggtagtgagaagttgtgggtaggggtgggtggttagtgttatggaaaatttatttttgattttgaggatatgtttttaggagtttatttatattttatgaatttgtatggataa

SEQ ID NO: 2706 - DNA, 2399 bp, Artificial Sequence
  chemically treated genomic DNA (Homo sapiens)
ttgtaggatatataggtggttaggttgagtttttaggaggtgaaatggttttgtttatattggttatggttttttttttttttgttttgttagttttttgttggtttggggtttttatatatgtttgttggtatagttttgttttttttgaattttttttttttttttttttgttgatttagtgtttttttttgtttgggttgtgtaaggattttgggttttgtttttttatttttttttggtttgtttttagtttttatggtgatgtttttgttgggtggaagttagttttttggggtgaatttaggtttttgttgttttagtgtttggttattttttgttggatatatttatttatatttttttgggatatttttttttttatttttggtttttgaagttggggaaatattttttttggtaggtgaggtttgagtgatttagatttgagtagttttggatattatatttttttagttatatagagatggatgtgaggattgggtatatagaggggatatatggaaatgttggttagggttttggttttttttttgaatttgttattgagaggatagaaagtttttggtttttgttattattttgttagtagagggtatttagatattttatattggaagttggaaagatagtgtgtgtgtttttattaagttatatttgaagtttggtttgtatttggatttgttatttttgtgggttgataaaggtttttttgttttagtgagtttttaattgtatttgtatgagtattagttagtataggttatttaaattatagatttgtaggttgggaaggaggtttattttttttatttgttttttagaagtatttttttagttgaggtatagttttagggaagggttggtggggatagattatgggttaggattgttttgggttaggatttgggattttgttgtagttttgttgatttgtagagaaatgtttggtttgtgtaggtttttagtaattatgttgtagaagtgggtttggtttattttgaagatttttttttgttgtggtattttttggtgttggaggaatgagtgttagttggtgttttttgtttggtttgaaaggttgatatgaattgtgtatttgattttggtagttgattgtgttgattttttagttttaattataatgagtatgagtatgaatgttttgaaatatagatgtatatgagttgttaaatatggtgagttattatatttttaatttttaggtaagtttaggtgttaggggaagtgatttatatattaaagagatgaagttttggtttttgtgggtgggggtggggagagggttggggagttgttggttttggggtgggagtgtatatttttgtttgttagattagaggatgtttgagaggtgatagagatggggttttttagttttgtgaaatttgagataggtttgataaattattttaataaaaagttttttgaagagaataattgggggaattgggtggagttttggtagtttttataggttggtaggtgttgagggataggtgatattattattttatggggagtgtaggtatgtgtgtgtgagtgtgaatatgtgtgtaaatgtgtgtgtagttagtgtgtgtatgtgagtgtgtatgttgtgaggatgtgtgtgtgaagggtgtttgtatgtgaatgtgtgtgtgttagtgtgtgtatgtgagtttgtgtgttgggtgtgtgtggagggtatataagtgtgtgttagtgtaagtatgtatgttgtgggggtgtgtgtgtgggtggagggtgtataagtttgtatgaatgtgtatgtgaatatgttagtgtgtgtatgtgtgtgtgttgtggtggtgtatgagtgtgtgtggagggtgtataagtgtgtatgagtgtatgtgtgtgttttgtggggtatatgtgtgtggagggtgtataaatgtgtatgagtgtgtatatgaatatgtgttaatgtgtgtatgtgagtgtgtgttggggtgtgtgagttgtgttgagggtttataagtgtgtatgagtgtgtgtatggatatgtgtgttagtgtgtatgtgagtgtgtgtgtggatggtgtgtaagtgtgtatgtgtgtgtaaatatgtgtgttagtgtgtgtatgtgtgtattgtgggagtgtgtgtggagggtgtgtgtgaatgtgtgtgtagtgtgtgtatgtaagtgtgtatgtttgtgagtgtgtgaagggtgtataagtgtatgagtgtgtgtatgtgaatatgtgtgtgttagtgtgtgtatgtgagtgtgtgtgttgtggggggtatgtgtgtggagggtgtgtgtatgtgaatgtgtgtgtagtgtgtgtatgtaagtgttggtgttgggtgtgtgtgaagggtgtgtaagtgtgtgt

SEQ ID NO: 2707 - DNA, 2399 bp, Artificial Sequence
  chemically treated genomic DNA (Homo sapiens)
atgtatatttatatattttttatatatatttaatattaatgtttatatgtatatattatatatatgtttatatatatatattttttatatatatattttttataatatatatgtttatatgtatatattaatatatatatgtttgtatatatatatttatgtatttatatattttttatatatttataaatatgtatgtttatatgtatatattatatatatgtttatatatattttttatatatatttttataatgtatatatgtatatattaatatatatgtttgtatatatatgtatatttatatattgtttatatatatgtttatatgtatattaatatatatgtttatatatatatttatgtatgtttataaatttttaatataatttatatattttaatatatatttatatgtatatattaatatatgtttatatatatatttatgtatatttatatattttttatatatatatattttataaaatatatatatgtatttatgtatatttatatattttttatatatatttatatattgttataatatatatatatgtatatattaatatgtttatatatatatttatgtaggtttgtatattttttatttatatatatatttttataatatgtatgtttatattaatatatatttatatattttttatatatatttaatatataagtttatatgtatatattaatatatatatgtttatatataaatattttttatatatatatttttataatatgtatatttatatgtatatattaattatatatatatttatatatgtgtttatgtttatgtatatgtgtttgtattttttgtggggtggtagtgttgtttgttttttggtatttgttaatttgtgggagttgttaggattttatttaatttttttaattattttttttagagaattttttattaagatgatttgttaggtttattttgaattttataggattaaaaagttttatttttgttattttttaggtattttttgatttgatagataggaatatgtgtttttattttagagttaatagttttttagttttttttttgtttttgtttgtagaaattaggattttatttttttgatgtataggttgttttttttggtatttaagtttgtttgaaagttgggaatatgatgatttattgtatttggtagtttgtatgtgtttatattttaagatatttatgtttatgtttattataattagggttggagaattagtatagttaattgttaaaattaagtgtataatttatattaattttttagattagatagagagtattagttgatatttatttttttagtattaggaaatgttatagtagaagagagtttttaagatgggttagatttatttttgtagtatggttgttgggagtttgtataggttaggtatttttttataggttagtagagttgtagtaagattttaggttttgatttaaggtagttttgatttatggtttatttttattggtttttttttggagttgtgttttagttggggaggtatttttggaaggtaggtggaggaggtaagttttttttttagtttgtaagtttgtggtttaggtggtttatattaattgatatttgtataggtgtaattgagaatttattgaggtaaaagggtttttgttaatttatagaagtgataagtttaagtgtagattaggttttaggtatggtttgatggaggtatatatgttgtttttttagtttttagtgtagggtgtttgggtgttttttattgataagatggtagtaggagttagagattttttgtttttttagtgataagtttagagggaaagttagggttttggttaatatttttgtgtgttttttttgtgtatttagtttttatgtttatttttgtgtggttggaggagtgtaatgtttagagttgtttgggtttaaattatttaggttttatttgttaggaaaggtgtttttttagttttagggattagaagtggggggaaggatgttttaggaaaatgtaggtggatgtgtttagtaaagagtaattagatattggggtagtaaggatttaggtttattttagaaggttggtttttatttaataaagatattattatgggagttagagatagattgggaggaggtgagaggatagagtttagggtttttgtatggtttaggtggaagggggtattgagttaatagaaaggaagaaaaagggagtttagaggggatagggttgtgttagtagatatgtgtggggattttaggttggtgaggggttggtaaggtaggaaggagggaggttatggttagtgtaagtagggttattttattttttgggagtttagtttgattgtttgtgtgttttgtgg

SEQ ID NO: 2708 - DNA, 2431 bp, Artificial Sequence; identical to SEQ ID NO: 2098
  chemically treated genomic DNA (Homo sapiens)

SEQ ID NO: 2709 - DNA, 2431 bp, Artificial Sequence; identical to SEQ ID NO: 2099
  chemically treated genomic DNA (Homo sapiens)

SEQ ID NO: 2710 - DNA, 2497 bp, Artificial Sequence
  chemically treated genomic DNA (Homo sapiens)
ggtagtttttttgtttatagtatgggttattaggttaaattttgttattattgtggggaatttgatttggagttttatggttatttggatggattttgtgatgatagttatatttttggatttgtgagatagatagagaagttaggagatagtgtttagtattgatagagtataaattttagagtatattttttgtgtagggttgggttagttttaagtgtgtaggttttgttttttaaatttgaggtatttttgtttttttgattttattttgattaggttattgtgatttttgagagatatgtagtttaaatttatttttattaaagatttttgttggttttgggggtatttgtagtttttgaaaagtagatggggttagaggatttatgggaatagttttatttgtttgtgtttagaggaggttaggtggttttgtttttagttttttttgtatttttgttgggggtgtagatatggatgtagtttaggggtagttttttgtttattgtatatttgtaaagggttataggttatttaagtttttgatgggttggttggatttagtaattatatggttttttgttgattaagttagtaagattttgggtattgtagaattttataggggtaaggtaggtagtatgataataaaagttttaaaatatagggtttggtgtaagtttatgataggtttaaggtttttgttttgttattggtttttttgttttaatttttggttttgtggggataaagtttttttggtttgttttatttatggtttttttttagagtttaggtaaatttgggggtattgatgtatttagtttagtttttatatttttttgttattggttttgggaaggggtatttggtattagggagtttttgagtagaatgtgggtttattttgtaagtttttttttagggggattggtataaagttagagtttagtttttttaggttttaggttttatggaagggaaggggatttaggaagattgggtatgggaggaggtttttggggagttagtgttttttagagtttaggtttgtgggtgagttgagtagagggagttgttgttggatttttttggtgtttgttttgtgtttgattttgagggattttattggttgttgtttttgtagttgtgattatggataggttttagttttagattggttgttttttaaagtgaggggaggggttttgtttggtaaagttagaaggataattaagttgtaaagttttttgtgtttttttgggaaaaagagtgggttttttatttatgtgttaggttatgtatatggtattattggaggtttttatatgtagatttgagttagtgttatttagggtgtttttgtgattaaggatttatatataattatatatagaatttagaggtaaattgaaattaaaaatgggttaattatttaaatatttaggtaaaattattatgtttataaatgagttattaggttaatgtggggttatagttgagaattatttgggaaatttatatattttttattttagtttgggggtgaagatttgaattagaagtggttttaggtagtaatttattgttgggttattgtatttatttaggattgtgtttttatataggtatagtatagttttttggtattagtgttgggttttttttggttttttagttttgttttttatttttttttttttagtttagtagttttgtttgtattttagttttttaatttgagttttttagtaatatttttttttatttgtgatttgaataaatgattttgattttaataaatttagggtgagtttttataaatttttgagttattttttggtaagtttttattgattattttttgttatggtgttttttattgagtttatatatttgggaagaaagtataattaggagttgttaggtgagtagtgagagatgttattttttttttagttatttttgtttagttatttttggttagttatttttgtttaattattttttttttagttatttttttttagttatttttgtttagttatttttgtttagttatttttgtttagttattttttttttagttaatttttttttagttattaatgagttttgggaaaagtagatggggttaggggatttataaaatagttttatttgtgtttggattaggttaagtggttttgtttttaaaagtttagttaggttggatttgtgttttttttgtttaggttttttatggttttgggtattgtttttgttgttgtatggggaatttttagttggttttgggataattttgatgttgatgtttatttgttttttttattgttgggttattgtatttaaaatagtatatggtatatgtgagggtaggtgtttattaagtatttgtataatggttgaagagtaggttatggggggagaggatgaaagttagaaagagtgatttgagaatgatgttattttttattatttgtttattttttta

SEQ ID NO: 2711 - DNA, 2497 bp, Artificial Sequence
  chemically treated genomic DNA (Homo sapiens)
tggggaggtgagtaggtagtggggaatgatgttatttttagattattttttttagtttttattttttttttttgtgatttgttttttaattattatgtagatgtttaatgggtatttatttttgtgtgtgttatgtgttgttttaagtgtagtgatttagtaatgaaggagataggtgggtattagtattagggttattttagagttagttaggaattttttatgtagtagtagagataatgtttaaggttgtagaggatttgaataagggaagtataagtttagtttggttggatttttgggaataaggttatttggtttaatttaaatataaataaaattgttttgtgggttttttgattttatttattttttttagagtttgttgatggttgggaaggagttgattgggaaggaggtggttgggtaagggtggttgggtaggggtggttgggtaagggtggttgggaaggggtggttgggaagggggtggttgggtaggggtggttggttaggggtggttgggtaggggtggttgggaagggggtggtgttttttattgtttatttgatggtttttggttgtgttttttttttaggtgtatgagtttagtggagagtattatgatgaagagtggttagtgaagatttattaggaagtagtttagaagtttgtggaaatttattttgagtttattggaattaaaattatttatttggattataggtgagagagaatattgttgaaaagtttgggttgggaggttgggatgtaggtagagttattaggttgggaggggaggggtgagaagtggggttgggaggttgggagaggtttagtattggtgttaaggagttgtgttgtgtttgtgtgagagtatagttttaggtaagtgtggtgatttaataatgaattgttgtttgaagttatttttagtttaggtttttatttttaaattgaaatgaagaatgtgtgaattttttagataatttttggttgtgattttatattggtttggtgatttatttatgagtataatggttttgtttgaatgtttggataattggtttgtttttggttttaatttgtttttgggttttgtgtgtggttgtgtgtgagtttttgattatggagatattttgagtggtattggtttaagtttgtgtgtggggatttttagtagtattatgtgtgtggtttggtatgtgggtgaaagatttatttttttttttagggaagtatagaaagttttgtagtttaattgtttttttgattttattagataagatttttttttttattttaaagagtagttagtttaaggttgggatttgtttatggttgtagttgtaagggtagtagttagtggggttttttggagttaggtatggggtgggtattgaagggatttggtagtggttttttttgtttagtttatttatgagtttgggttttggagggtattgattttttaggagtttttttttatgtttagtttttttgagttttttttttttttatggggtttggggtttggaggagttaagttttggttttgtgttggtttttttaggagggagtttgtaggatgggtttatgttttgtttagaggttttttggtgttaggtgtttttttttagggttagtggtaggagggtgtgagggttgagttgagtgtattagtgtttttaggtttgtttaggttttggggagaggttatgggtggggtaggttaggaaggttttatttttatagagttgaggattggagtaggagagttagtggtagggtaaagattttgagtttgttgtgggtttgtgttagattttgtgttttggggtttttgttgttatgttgtttgttttgtttttgtagggttttgtagtatttaggattttgttgatttaattagtaagaggttatatggttattgggtttagttgatttattagggatttgggtgatttgtggttttttgtaggtgtgtagtggatagagagttgtttttgagttgtatttatgtttatatttttgatagagatgtagggagagttgggaataaggttatttggttttttttaaatgtagataaataaaattgtttttgtgggttttttgattttatttattttttagagattataggtgtttttagagttagtaagggtttttgataagaatggatttgggttatatattttttagggattataatggtttggttagggtggggttaggagggtaggggtgttttaggtttgggaaatgggatttgtatatttggggttggtttagttttgtatggagggtgtgttttggggtttgtgttttgttggtgttgggtattgttttttggtttttttgtttgttttatagatttaaagatgtggttgttattgtagaatttatttgaatggttatggggttttgaattaagttttttatggtggtggtagggtttgatttggtaatttatgttgtgaatagaagggttgtt

SEQ ID NO: 2712 - DNA, 2272 bp, Artificial Sequence
  chemically treated genomic DNA (Homo sapiens)
ttgaggttaaatatttgagattagttagagtaatatagtgatattataattttgataaaaaaaaaaaaaaaaaaaaaaaatgtgaaaaaattagttatgtatgatgttttatgtttgtagatttaattggttgggagattaaggtaaaaggatggtttggatttaagagtttagggttgtggtgaattatgattaaattatggtatttttgttttgataataaagattatattttaaaaaaatataaaataattttataaataaggattttaatgttataagtttttttataggttgtaaatgttttatgttaatttgaattgtattttaaaaagtaatgatttttggggtaaaggttatagaatatagttttaagaaataaatttatatatttattttataagaaataaatttatatttttgtgttataagagtttttgaaggagatattaaatgtagaaaggaaaaattagtattagttattataaaaatatattgaattgtaaagattattgatattataaagaaattgtaaattaatgggaaaaataaaaagttagtaatattatgataggataaattttatatgtaataatattaaatttaaatgtaaatgggttaaatgttttagttaaaagatatagattggtaagttggataaagagtaaagatttattgttgttttgtatttaggagatttattttatgtgtaaagatatatataggtttaaaataaagggatggaggtatatttattaagtaaatggaaagtaaaaaagagtagggtttgtaattttagtttttgataaaatagatattaattgaaaaagattaagagagataaagaatagtattataaagtagtgttatttgtttttttttaggtttttgttttattagttattaggtggtagttatttaggatgttggaatttggttatttttgttttttttagtgggtgaggttggtggttgttttatttgttttaggtatatttttaatagaggtggttgtttgttttttaagttagtttggttttgtttggtatgtataggttttggggattgatatgttgttttgattgagattgttttgattttgttaaattttatgtttggtttgggttatagaagtataagttttttgggtggtattattggttgttttttggattggaatataaagttttttttaagatgatttgtggtttgttttttggtaattaataagtttgtagtgttatatgatttatgagatatggattgaaggtttaaagggagtgtatattatgttttagagttagttgttttttttttttatatggttttatttgtagtatagttgttgtattgaggtttgtgtatgttgggtaagggtaagttggtttaaagggtaattagttatttttgtatggatgtgttagtagtaggtagattagttattaattttatatgttgttagttaggttaaattagtttttttattataaaggtagggttatagtgttatttggtttttttaaggtttttgtttttttagttattaggtggtatttatttaggttttgggaatttggttattttggttttttggagtgggtgagttggtggttgttttatttgttttaggtgtatttttgtagaggtggttggttgttttttgagttagtttggttttgtttggtatgtatagattttagttatggatatgttattttaagtgagtttgttttgtttatggttaaattttaagtttggttagggttatagaaggtagagttttgagggtggtaattttggttgttttttgtatttgaatataaagttttttttaagatggtttatggtttgttttttggtaattaagaagtttatagtgatataagatttttgaggtaaggattggagtttttaaaggtagtatatattttgtttttgagatggttgtttgttttttttatatggttttatttgtagtatagtagtagtattgaggtttgtgtatgttgggtaaggttaagagggtttaaagagtaattagttatttttgtgagggtgtgttaggagttgggggtatagttattaattttatttgttgtaggatatggaatattagtttttttaataaaaaggtagggttaagggttatttgttttttttaaggtttttgttatattagttattaggtggtagttatttaggttgtgggaatatggttatttatttttttgattgggtaaggttggtggttggtttattttttttagatgta

SEQ ID NO: 2713 - DNA, 2272 bp, Artificial Sequence
  chemically treated genomic DNA (Homo sapiens)
tgtgtttggaggaggtggattagttattaattttatttagttaaggaagtggatggttatgtttttatagtttgagtggttgttatttgatggttgatatagtaaaggttttaggaaaagtagatggtttttggttttatttttttgttagaagaattgatgttttatgttttgtagtgagtgaggttggtggttgtgtttttagtttttggtatatttttgtagaggtgattggttgttttttgagtttttttagttttgtttagtatgtataagttttagtgttattattgtgttataaatggagttatataggggaaatgagtagttattttaggagtaaggtgtatgttgtttttgggggttttagtttttgttttaagggttttatgttattgtgggttttttggttgttaagaggtagattataggttattttgagaaggattttatgtttaagtgtagaaagtagttaggattattatttttgggattttgttttttgtggttttggttaaatttagaatttggttgtagataggataagtttatttggagtagtgtgtttgtagttggggtttgtgtatgttaggtaaggttaagttggtttaaagagtaattagttatttttgtaagggtgtatttagagtaggtggagtagttattagtttatttattttaggaagttggggtagttaggtttttaaagtttgagtgggtgttatttaatggttgaagaaatagaggttttaggaaaattagatggtattgtggttttatttttatggtagaagagttgatttagtttgattggtagtgtgtgaggttgatggttggtttgtttgttgttggtatatttgtgtaaagatagttggttgttttttgagttagtttgtttttgtttagtatgtataagttttagtgtaataattgtgttgtaaatggggttatatagaggaaaggagtagttggttttggagtatggtgtgtattttttttgggtttttagtttatgttttatgggttgtatgatattgtgggtttgttggttgttaagaggtagattataggttattttgaggaggattttatgttttagtttagaaagtagttagtggtattatttaggggatttgtgtttttgtggtttaggttagatgtagaatttgataaagttaggatggttttagttagagtagtatgttggtttttggggtttgtgtatgttaggtaaggttaagttggtttaaagagtaagtagttatttttgttaagggtgtgtttggaataggtggagtagttattaattttatttattgaaagaagtagggatggttaggttttaatattttgagtggttgttatttgatggttgatggagtagaggtttgaggaaaagtagatggtattgttttgtagtgttgttttttgttttttttgattttttttagttaatgtttgttttattagagattaggattgtaaattttgtttttttttgttttttatttgtttggtaaatatatttttatttttttattttaagtttatgtgtgtttttgtatatgagatgggttttttgaatataggataataatgggtttttattttttatttaatttgttagtttgtgttttttaattggggtatttagtttatttatatttaagtttagtattgttatatgtgaaatttattttgttatgatgttgttagttttttattttttttattagtttgtagtttttttatagtgttaatggtttttataatttgatatgtttttgtagtggttggtattggttttttttttttatgtttagtgttttttttaggagtttttgtaatataagaatgtggatttattttttgtaaggtaaatatgtggatttattttttgggattgtattttatggtttttattttaagaattattattttttaaaatgtaatttaaattagtataaaatatttatagtttatggaaaggtttgtggtattagaatttttatttataggattattttgtgtttttttgagatatggtttttgttattgaggtagaagtgttgtggtttgattataatttattatagttttgaatttttgagtttaagttatttttttgttttaattttttaattagttggatttataagtataaggtattatgtgtggttaatttttttatgttttttttttttttttttttttttgttgagattatggtattattatgttgttttggttgattttaaatgtttgattttaa

SEQ ID NO: 2714 - DNA, 2313 bp, Artificial Sequence
  chemically treated genomic DNA (Homo sapiens)
taggtaggggttttaggtttaggggtttttgagtagggaagattttagtaggaggtagggagggtgtttttttttatgtatagtattgtaggggtgtggtggggagggggtttttttttatgtatagtatttttggggtgagtttgaggggagttagtattaaaggttattgggatttagggttttggtagaggaagtgaggtttggggtagaggggatttggtttgggtgggggaggggttgtgattaagtttagggtattaggtggaggagggtagagtttggagatggttattattatttgggagttgtttttgtttttagttttgaggtagatgtttgttttggtggggtatgtttaggttatgggaggtgggtaggattattgtgggtgttgtaggggttgttggtggaggttagggtatagggaggggagaaattatagtttggattttatttttagtttaagttatatggaattgggggtttttgtatagaggtttgttttgtagtatggttttgagtagttgtatatatttaggtttaagtggtttttttaattatttttgtgtttatgattgtgtagggaatggttaggattttagggaaattttttggatatttggtgttgtttgtttattttagatttgtttttttgttttttagtttttttttagttggtttttgaggttttttttaggaggaggaggtttttgaggttttttttgtgagggttgatttgaaggtttgagatgtttttttttatttttgtaggtgattttttagaggattttgggtttttagagttgagggttatggagatttttggggtttatttatggttttgggattgtttttattttggtgggattaagttataatttggagtagtttaaggttggtataatagatatttataaattaataaaaataattgtgaaaatataagtaaaataagtttgttggtatttaagagttttgtagtagtagggttagtttgagagttgttttttttgttttatttggggttttagggtgttgtagtttgttattagagggattagatgtttgtggttttttaagggtttagtgtggagttatttatttttattagtatagagaagatttatgttttgtggttgaagtaggggggtagtttttttgatagttgtaggttgtttggttttgtgtttggggtatagttggtggggttttgttggttttgttttagtgtgggtatttggttataggttagtttttttttgaatggtttttgggttatggtatttggggatattatagttgtgttgaatgtatagttatgtgttattagttttttatttggaataaaattattattggttttggttattttgaggaaattttaataagttgtttttaagaaatattttttaataaaagaaatattgtttatattgaagtgttttaaatttgaagaagaaaatgagtatttgaatttaaaagtgaaaaagaaataatttttttagaaaaatggatttgaatagtttgggtttagggtgagattttatattttaaatgttttattgatttatttgggttttttaggtgtaatatttgataatatttattggtaattttgtttatgaatatattatgttggggatttaagtatgttaaattgttttaattggtagttaaatgagagattgtaaaatatgtttttatttaatggtttaatgtttgagtatttattttttttgttgttttgttgttgggagtattggtttttgggtgagggatttttagtaagaagtatttataaatgaaataaaagtttagtaaatttgagttgaaggtaggggaaggagagttgttttttgaatattaatgaggggaggaattgggtggattgtagaaatgttttgtgttggttgtgtaaattattgttttggagttgttagaatttaattaggaaaggaaggggttttgtttgtgttatttgttatagagtttgggttttttagaagaaagaagtgtttttaagaatagaattttattaagtatatattttgagtaggttttgtttttgaaatgtaattgtttatttgaaggttttttatatttttttaagtagtttttttttattttttatagttatatggtgggaattttttttatatggttatataagtatttatgtatttggtttagttgtgtggttttgggtggttttggatttggttttgtggtttgtgtgggtagtttggatggttggtgggtttggttttgttgttttttttatttttgtttattaagtagagaaaaattata

SEQ ID NO: 2715 - DNA, 2313 bp, Artificial Sequence
  chemically treated genomic DNA (Homo sapiens)
tgtggtttttttttgtttggtgagtagagataaagggggtagtaggattgggtttattagttatttgggttgtttatgtaaattatagggttgaatttggagttgtttaaggttatatagttaagttgagtgtgtgaatgtttatgtgattgtgtgaaggaggtttttattgtgtggttgtgggggatggaaaaaggttatttggaaagatgtagaagatttttgagtaaatagttatgttttagaaatagagtttgtttagaatgtgtatttggtgggattttatttttagggatgttttttttttttgagagatttgagttttgtggtgagtggtataggtagggttttttttttttttagttgggttttgatagttttgaggtagtggtttatataattaatatgaaatatttttatgatttatttgatttttttttttattgatatttaggaagtagtttttttttttttgtttttagtttaagtttgttgagtttttgttttatttgtgaatattttttgttggaagttttttatttagagattagtgtttttaatggtagagtagtgggggaggtaagtgtttagatattaagttgttgagtagaggtatgttttgtaattttttgtttagttattaattggagtagtttaatgtgtttgagtttttggtgtgatgtgtttatggatgaagttgttgatggatgttgttaggtgttgtatttggagggtttagatggattaatgaggtatttaaagtgtagaattttattttgaatttagattatttaggtttgtttttttaggaaagttattttttttttatttttagatttaagtgtttatttttttttttaaatttagagtattttagtatgaataatattttttttgttaaaaaatattttttggaaataatttattgaagtttttttagagtggttaaagttgatgataattttattttagataaagaattggtgatatgtggttgtatatttagtatagttgtggtgtttttaagtgttatgatttaggagttatttagagaggagttggtttatgattggatgtttatgttggagtggggttggtaagattttgttagttatgttttagatgtgaagttgagtgatttgtagttgttgaagagattgtttttttgttttagttataagatgtgggttttttttgtgttgatgggggtgagtagttttatattaagtttttggagggttatgagtatttggtttttttggtgatggattgtagtgttttggagttttaggtgggatagagagagtaatttttagattaattttgttgttgtagaatttttggatgttgatgagtttgttttgtttgtgtttttataattatttttattaatttatgggtgtttgttgtgttagttttgagttgttttaggttgtggtttagttttattagggtagggatagttttagggttatgaatgggttttaggagtttttatgatttttggttttgggggtttagggttttttgaggggttatttgtaaaggtgggaggaggtgttttaggtttttaggttggtttttatagagagaattttagggattttttttttttagggagggttttaggggttggttgggagggagttggggaataaaggaataggtttggggtggatgggtagtgttagatgtttgagggatttttttggggttttggttattttttgtatagttgtgggtatagagatgattggaggagttatttgggtttgagtgtgtgtagttgtttagagttatgttgtaggataggtttttatgtagggatttttggttttgtgtagtttgggttgagaatgagatttaggttgtgattttttttttttttgtgttttggtttttgttggtagtttttgtagtatttatagtggttttgtttattttttgtggtttgagtatgttttattaagataggtgtttgttttggagttggggatagaggtggtttttgggtggtggtggttatttttgggttttgtttttttttatttggtgttttggatttggttgtagttttttttttgtttaggttagattttttttgttttagattttgttttttttgttaggattttgggttttagtgatttttgatattgattttttttagatttattttgggggtgttgtgtgtgagagagagttttttttttattgtatttttgtagtgttgtgtgtgagagagagtattttttttgttttttgttagggttttttttgtttaggagtttttgggtttggagtttttgtttg

SEQ ID NO: 2716 - DNA, 2492 bp, Artificial Sequence
  chemically treated genomic DNA (Homo sapiens)
tttatttattaagtagggtggttattttttattttataggtgggtggtgtgaggtttttaggtgaaagggttttgtatataggaggtgtttaataaatgtttgtggtggttgtaataattttttgggggtgaagtaggaagtttgaggggtttagaaatgagagagatagagatagggagagatagagagagagagagagatagagagagagagagatagagagagagagagatagagagagggagagagagagggagagagagagagagagagagagagagagggagagatagagagagagagggagggtttttttttatttttaggttgggtagttaggttttttttatttagatttaattttttttattttgggttttgggtttttttttgttttgtttagtatttgggagttgggggtttttgttgtatggttgagtgtttttggggatttttatttttgtatttatttttggtttagtttggttttaggtttttttttttaggatatttgtagttttggttggttttttgttttttagagtgggtttgatttttgtgttttgggaggaggggtttaggtttggtttggttatttatgtgtttattttgtagatggttatggtggatttgtaaaattggtttattttgggggttatggaggggttgttttgggtttgagtaggaggttgggagttggtggtgatggtatagttgggagtagtggtaggtagttttttaggtgtttatgatttagttggtagtgaggaagttttggagagggatttggagatggaggtttgttttagaggagtggtagtttaattatttattaatttgggatgttagaatgtgatttggggtgtaattagatttggtagggaaggtattttgtgttgggtaggtttgtgtgatttgttttttaattatttattttttggagttgtgggttgatataagtgtttatgtggatgagtttttttttgggttattttttttttaaggattttaattttggggggttttgtttttttatttgtttatattaggtattgtttattttattgggtgggtgttgtttgatgtttttttttaggattttttttgttagatttagtagtagtagtttttggaggggaatgttgttttattttttattgtttttaggtttgtggtttatagtggggttatgttttttgagtttggtttttatagttgttttggtttgtttagtttttttatttgttggagtaggagtagtataaatgttggagttgtttagttttgggtagattttggttttgtatatgtgttgtttgtttatgtggagtttttggtttttttgggtgataaatggggttttttttggttttttaagatgaagttgaagattgtggttttttttgggtttgttgggggtatgtgggtttggtagttgtttttgtatattttaagggttggtttaggggaggtttagaggaaagaggaggtgtttttgtttagggattttggaaaatagagtgtttgggtataaaggaaaagtttggttaaggttaagggttaaggttgaggggagttgggggttaggggaataggtggattttatattattgtatatataatataggtgaatttgaatttaaatgatttattttagttttggtttttaagttatttttattgggaagaagaaatttttaggagtgatttttgagagttgagggtttttggggtggggtagtgtgaggggttgggttagtgtgaggggtaaagtttaatgggtattttatttttgtggtttgggtttttttagttgatggggtgggggatatttatttttttagttttagtttttagggaatggagtagagggtagagggagtgggttgtatttattaggaagtttgggagtgtttttgttgggggttggggtagaggtagtttggtaggtttttagggaggttggggttgggggtaggggtatggttgtgtttgggtatttttaatgtttgagttgatgggggagttagttgtttttgatagttagggaaaggggttaaagggggttttagatttttttagtttggaatgatagaaagtgttggaaggtggggttagtgggagataggtttttaggattagttttgggtaggtagtttggtatttttttaggtttggtttatggatttagaggtgtttgggtttagatttgtttgggagggtagtggttgggtttggtttggtaggggttgaatggatgaggttagttggggttggtgagaggttggggatttttagggtgagagtagtagttggatgagtttttggaattttttgtggtgtttatagatgtagattttggttttttagagggtgttgattagtattgtgttattgattttatttagtatgatgtttgtttttagttgggggtttaatttgtttgggttagggaggagggggttattttaggatgtttaggttgggtagg

SEQ ID NO: 2717 - DNA, 2492 bp, Artificial Sequence
  chemically treated genomic DNA (Homo sapiens)
tttgtttagtttgagtattttagggtgatttttttttttttggtttgaatagattgaatttttagttggggatggatattatgttggatgaggttagtgatatagtgttggttaatgttttttgggagattgaggtttatatttatgagtattgtgaggagttttagaagtttatttagttgttgtttttattttgagggtttttagttttttattggttttagttgattttgtttatttagtttttgttaggttaagtttagttattgtttttttgggtagatttgggtttaggtatttttgagtttatagattaggtttgggagaatgttaagttgtttgtttgaggttggttttgaaggtttgttttttattaattttgttttttagtattttttgttattttaggttgggaaagtttagagttttttttggtttttttttttgattgttaaggataattgatttttttattagtttaaatattaagggtatttgggtataattgtatttttgtttttagttttagtttttttgagggtttgttgggttgtttttgttttagtttttagtaagggtatttttaggttttttggtgggtgtagtttattttttttgttttttgttttgttttttgggggttgggattaaagaaatgggtgttttttattttattagttgggaaagtttaggttgtaggagtgggatgtttgttggattttgttttttatattggtttagttttttatattgttttattttgagaatttttagtttttaaaggttatttttgggagttttttttttttaatggaagtggtttaagagttaaaattgaaataaattatttggatttaagtttatttgtgttgtgtgtgtagtggtgtgagatttatttgtttttttgatttttggttttttttggttttgatttttggttttgattggattttttttttgtatttggatattttgttttttaggatttttgggtagggatatttttttttttttttaggttttttttaaattggtttttagggtatgtagaggtagttgttaggtttatatatttttggtaggtttaaggagggttataatttttaattttattttggaggattagggagagttttatttgttatttagagaggttggggattttgtgtggataggtagtgtgtgtgtagggttgaggtttgtttagggttgggtaattttagtgtttgtgttgtttttgttttggtaagtggaggagttgggtgggttagagtggttgtgggagttaagtttagagggtgtggttttattgtgagttgtaggtttgaggatagtgagaagtaaagtggtgtttttttttaggggttgttgttgttgggtttggtagagagagttttgggggagggtattgggtagtgtttgtttagtaaggtgggtaatgtttggtataggtaggtgggagggtggggttttttagggttggggtttttgaggagggggtgatttaggagggggtttatttatatgggtatttgtattagtttatagttttaaggggtgaataattgaagggtaggttatatgagtttgtttggtataggatgttttttttgttggatttggttatgttttagattatattttgatattttgagttggtgaataattaagttgttatttttttgaggtaggtttttatttttaggtttttttttgaggtttttttgttgttagttgagttgtgggtatttgagggattatttattattgtttttggttgtgttattgttattagtttttagttttttgtttagatttgggatagtttttttatggtttttgagatggattagttttataggtttattatggttatttataaggtgagtatatgggtggttaagttaggtttgagtttttttttttagggtatagaaattaggtttgttttggaggatggagggttagttggggttatagatgttttggaaagggaagtttggagttaggttgggttaggggtgggtatgggggtaaggatttttgagagtatttagttatatagtgggaatttttaatttttagatgttggataaggtaggagggagtttaaggtttagggtggggagagttgagtttggatgagaagggtttggttgtttggtttgggaataaagaaagattttttttttttttttttgtttttttttttttttttttttttttttttttttttttttttttttttttttttttttgtttttttttttttttgtttttttttttttttgtttttttttttttttttgtttttttttgtttttgttttttttatttttgagttttttagattttttattttatttttggggggttgttgtagttgttatagatatttattgagtgttttttgtgtgtaggatttttttatttggaggttttatattatttatttgtgaggtggaaaatgattattttgtttgatagatgag

SEQ ID NO: 2718 - DNA, 2410 bp, Artificial Sequence
  chemically treated genomic DNA (Homo sapiens)
ttataaaagtaatatgaaaatattaatgttgttggtttttattttttgggattaattaagagtaatagaataatttggatagattagaattatatatttaaagagatttggttttttaagaaatgttatttatagaaataaaattattttattatattttagttgttttaaattttatttttgttagtttagtaaggggaagaaatatgtatttttttttttttttttttttttttttttttttttttgtttttgttttaatatttttagttatttgtttttttttgttttagttatatatgggtaaattgttgtttgtttagatgtgggtttaatgtaggtagttttgagttattatttttagtatttgtgatgttattttggtttgtgatgtgggtgtgggtgggtgttatattattagattttatagttaaattatgtgggaagaagttttatatggttttgtttttagttttagaaatttttgaagtttttattttttttaaaatggtttggatgaattttgaagatttttatgtttttaagaagtatgttttgtaggaaatgtagttaaatatgtagattagatttggggatatgggtagtgagatgtatttttatatgtgtaaaagtgtttttttttatgtatataaaggaggtattgttaagtttttagaatagttgttaaggttagggattaggaatgaaagaatatgtttttgtagatttgggtatttttttttgtatgttttttttgggaagattatatggtttttggaatgtgggttttttttatattttatggtaaatgtagtaattagagttgttagtagtgttaagggtttgaaaggagaataaagttgtttttttttgggaatttttgggtaatgttttattgtttattaggtgtttgttttgttggtgggtttgatttttttatttgtaaaatgttttaggagttttttttttgagggggaggttagtgaaatgatggaaaaatagagtatgaatttggtaggggtttttggaattgtatgtgttgtttgtttgtgtttttaagtgttgtttttggagtgaattagagtttgtaggtggattgtattataggttgtggtggaattatttttaggtttatggtagttggatttatagatagttgagaggataattgtttttttttagtggtgagttttggttttattttttaagagttgggttgattttagagtagggttttggaaagggtttgtttttgggaagagtttgtgaatgtttggagattgggtaggtaagagtttttttaaagttggttagttttggaaaaatggtattgggtttttgggttatttggaaattattatttgtttttattttgtaaagtagggataggagggaaatgttaagtaaaaaaaggtataataggagtaggttatttgttttttttttttttttttttattttgagtttggtttttttgtattttatttttttatatatttatttgttagatttattttgttaggttttttatttaatgattttgtttggttttttatttattttgttttttaggttggagtgtagtggtgtgattttggtttattgtaatttttgttttttggggtttaagtaatttttgtgtattagttatttaagatgttgggattataggtgtggattattaagtttagttaatttttgtatttttagtagagatgagtttttattatgttggtttagttggttttaaatttttggttttaagtgatttatttattttggttttttaaagtgttgggattataggtgtgagtttgtgtttagttttaattttttttttttagtagagagttgtttatatgggtagtatttgatatatattttttaagttttattaaattttgttttttttgtttttattgtaatttattttaattgattatgttataataggtaatttttagttttttttagaattaatttagggtattttgttttaagttattttttttatgttaataaaattaatatttattgaatgttttttgaaggttaggtattgttttagttattttattagtattatgttatgaaatgttattaattattttatgagtttgagtattgttttttgttttatagataaagaaattgaggtataagttgtttaagtattatgttttaagtaattaataaaggttgaatttaattaaagtttatattgtttttgtttttgtttttgtttttgagatggagttttatttttgttatttaggttggagtgtagtggtatgattttggtttattgtaatttttattttttaggtttaagggatttttttgttttagttttttaagtagttgggattataggtatgtattattatgttgggttaatttttgtattttt

SEQ ID NO: 2719 - DNA, 2410 bp, Artificial Sequence
  chemically treated genomic DNA (Homo sapiens)
aaaaatataaaaattagtttggtatgatagtgtgtgtttataattttagttatttgggaggttgaggtaggagaattttttgaatttgggaggtgggggttgtagtgagttaagattgtgttattgtattttagtttgggtgataagagtgaaattttgttttaaaaataaaaataaaaataagggtagtatagattttggttgggtttagtttttgttggttatttgaggtatgatatttgagtaatttgtgttttagtttttttatttgtaaaatagggaatagtgtttaaatttataggatggttggtagtattttatgatatgatgttaataaagtggttagaatagtgtttggtttttaggaagtatttaataaatattagttttattgatataggagaaatagtttagaataaagtattttgggttagttttaaggaaggttgagggttatttgttgtggtatagttaattgaagtgagttataatgaaggtagagaaggtagaatttgatagaatttgaagagtatgtattaagtgttgtttatgtgaatagttttttgttggaagaaggagattgaggttgagtataggtttatgtttgtaattttagtattttgggaggttaaggtgggtggattatttgaggttaggagtttgagattagttgggttaatatggtgaaaatttatttttattaaaaatataaaaattagttgggtttggtggtttgtgtttgtaattttagtgttttgggtggttgatgtatgagaattgtttgaattttaggaagtggaggttgtagtgagttgagattgtattattgtattttagtttgggggatagagtgagtaaaagattaagtagagttattgagtaaaagatttagtagagtaaatttaatggatgagtgtgtggaaagatgaggtgtaggaaagttaaatttaagatggagaaggagaaaagagaaatagatgatttatttttattatgtttttttttgtttgatattttttttttgtttttgttttgtagagtaaagatagatggtaatttttaggtagtttaggagtttggtgttatttttttaagattgattagttttgaaaagatttttgtttgtttagtttttagatatttgtaaattttttttaaagataaattttttttaaagttttgttttaaaattgatttagtttttaggaggtgaggttagggtttgttattgaaagggagtaattgtttttttaattgtttgtgggtttagttgttataggtttggaggtggttttattatagtttgtggtgtggtttgtttgtaggttttgatttattttagggataatatttaaaaatgtaagtaggtaatatatgtgattttaggagtttttgttagatttatattttgtttttttattattttattggttttttttttaggagggaggtttttgaggtattttataaataaaagaattaaatttattaataggatgagtatttgataagtagtgaggtattgtttaagagtttttaggaagaggtggttttgttttttttttaagtttttgatattgttaatagttttaattattgtatttgttatgggatgtaaaagaaatttatattttagaaattatgtagtttttttgggagagatatgtagggaaaggtgtttaggtttgtaggaatgtgtttttttatttttggtttttaattttggtagttgttttgagaatttaatagtgttttttttatgtatatgaaggagggtatttttgtatatgtagggatgtattttattatttatatttttaaatttggtttgtatatttgattatattttttgtaaaatatattttttaagaatatgaagatttttaaaatttatttaagttattttgggggaaatgaggattttagaagtttttgaggttagaagtaaaattgtatagaatttttttttatataatttaattataaaatttgatgatgtaatatttatttatatttatattataaattaaagtgatattataaatattagagataatggtttaaagttgtttgtattgagtttatatttaaataaatagtaatttgtttatatgtgattaaggtagagaaagataggtgattagaaatattaaaataaaaataaaaaaaaagagagagagagaaaaaggaaagagaaaatatatattttttttttttattaagttagtgaaaataaaatttaaggtaattgaaatatggtaaggtgattttatttttatagatgatattttttagaaagttagatttttttaaatatgtgattttaatttatttaaattgttttgttgtttttagttggttttaggaaatggaggttggtagtattaatgtttttgtgttgtttttatgg

SEQ ID NO: 2720 - DNA, 2327 bp, Artificial Sequence
  chemically treated genomic DNA (Homo sapiens)
taggttgggtgtagtggtttatgtttgtaattttagtattttgggaggttgaggtgggtggattatgaggttaggagattaatattattttggttaatatggtgaaattttttgtttattaaaaatataaaaaattagttgggtgtagtggtgggtgtttgtagttttagttatttgggaggttgaggtaggagaatggtgtgaatttaggaggtggagtttgtagtgagttgagattgtgttattgtattttagtttgggggatagagtgagattttattttaaaaaaaaaaaaaaaaaaaaaaaaaaaagtttggtagggagtaggatatttggattttattttgttgtttttttggttgtgtgatatttaggttatgttgtttttttgggttttggtttttttatttgtttaagaggggttgatagttgtatttgtttttttagtttttttttaggaaggtggtagttataattagtatttgttgaggttgattttgtattaggtttaggataggtggggtttagggaggtttgttttttgttatgtttttttgttaggggagttttgaggtttttttagtgttatttttatgttatattttgttttagttttgtgtgttttaagttagggtattgagtgtgttagtatttgtagggataggtattggattttgggtggatttgagggtttgtgattatttttttagttgtttttttttagaggttattttttttaaggaaggaaagaatttttttgttattttttgtagtgtggttagtttaggttagtttgtatagtagggttagaattagggtttttggggagggatgtttgtttgtttagtgggaggagatggtatgtttgtgaagttgttatttagttagtttgggggttatgagtgttgtttttggtggtgttgtgtggggagggagggggttgagtagggtgggtatttgtatgtttgtgttttgttggtttttgatagatgatagttttttttttagggtttttagtgtagagttttttggggatattatggttatttttgtttagatgagagggagttggttgtttgtgatagtgttgtaaaatgttgttagggtttttttttttttttttttttttttttttttgtttttttttggttggtggttttttgtaggtttttgtttttgttggtgttggttataatgtttttatttttagggttttggtgttttagttttttgtgtttattgtgtttgtttgttagaatttttgtgtttttggtgtgtgtggtttgttgagttttgagtttttgttttttttagttttttttttttttgtgtttttaggaggtgtttttggaagttatggagttttattggtattaagattgattgttttttggggtgaggtagtaggttgtatagtttggggttttgttttgttatgggataattatataatttattgttttttttgaagtggttgtaatatttgtggtggatagagtgtttggaattttggttgggagtgggtagggttaggtttgggggtagttttggtagtagttgggggtaggggttgtttatattgagaagtttgataggtttaggtgttatttgttgtgtgattttggataggtttttgatttttttgggttttagtttttttttttgtaaaatggaggtaaatgaggatggaaggagatgtagtgtggagtattgagggtagaggagagttgagttgattttattttttgttttagttgtattgagagaggtgatttatgtagttgtttgtttgatttttgttttttaatattttttaatattttttttgttattaggtttaggtttatgggtggttttgagttgtattttttattgagtattaggagaaggtattgtggggttaggggtggttgagatgtttggaggttatagggttgtgagtattggtgttgtttattattttaggtttttagtatgtgttttagtttggttagtttagtggtagggtttttgtttgtggaggaagggaggttaaggtattttttttgagtaggaagtgagaggaatagttttgtatatattgggttttatatggtataatttgaaggtagatagtggtttttttgtatttggggaaattgaggtttagagagttagggattttttaagattagttagtagtagttgtttttttttggggtgttattttttttgttttttttgttttgtgtttgtttagtttttttgttttggtgattgaggattgttaggtaggggttggtgttgggtggggggtggtgggtttttttgtagtgtaaggttgggtt

SEQ ID NO: 2721 - DNA, 2327 bp, Artificial Sequence
  chemically treated genomic DNA (Homo sapiens)
ggtttggttttgtattgtgggagggtttgttgttttttgtttagtattagtttttgtttggtggtttttagttattagagtaggagggttgggtaggtgtagggtaggagggataggggagatggtattttaggaaggggtagttgttgttggttggttttgggaagtttttggttttttgggttttagtttttttaggtatagaggagttattgtttgtttttagattgtgttatgtgggatttagtgtatgtagagttgttttttttattttttgtttaggaaaggtgttttggtttttttttttttataggtagaggttttgttattgagttggttaggttggggtatgtgttgggaatttggggtgatgggtaatgttaatatttgtagttttgtgatttttaaatgttttggttatttttggttttatggtgtttttttttggtgtttagtggagggtatggtttagggttatttatgagtttgggtttgatggtggggggagtgttggggagtgttgggagatagaggttagataaatagttgtgtggattgttttttttagtgtggttggggtagagggtggggttggtttagtttttttttgtttttgatgttttatattgtatttttttttatttttatttgtttttattttatagaggaggaaattgagatttagagagattaggggtttgtttaaggttatatagtaagtggtatttaggtttgttagattttttagtgtaggtggtttttgtttttgattgttgttaaggttgtttttaaatttggttttgtttgtttttagttagggttttagatgttttgtttattgtagatattatagttattttaggaaagatagtagattgtatagttattttatagtagggtagagttttaaattatataatttattattttattttaaagggtagttggttttggtgttgatgggattttgtggtttttagaggtattttttggggatgtgggaggaaagagggttgaggagaataggggtttgaggtttggtaggttatatgtattaagggtatagggattttggtgggtaggtgtggtgggtgtagggggttgggatgttgaaattttgggagtggggatattgtggttagtattagtagggatgggagtttgtaggaaattattaattagagagggatgaggaagagagaaaggaggagggagggaaagttttggtggtattttgtgatgttgttataggtagttggtttttttttatttggataggagtggttataatgtttttaaggaattttgtattggagattttaggaggagggttgttatttgttgaaggttagtaagatataggtatgtgagtgtttattttgtttggttttttttttttttgtatagtgttattagaagtagtatttgtggtttttaggttggttgagtagtggttttatgggtgtgttgtttttttttattgggtaggtaggtatttttttttaggggttttggttttggttttgttgtgtaggttggtttgagttgattgtattgtaggaggtggtgggaaggttttttttttttttgagggaagtggtttttaggggagagtagttgggggggtagttatagatttttaggtttatttagggtttagtgtttgtttttgtgggtgttggtatatttagtgttttagtttgggatgtatagggttgggatagagtgtagtatgaggatgatattgagagggttttggggtttttttagtaggggaatgtggtgagagatgggtttttttaagttttgtttattttgggtttggtgtagggttagttttaataaatgttaattgtggttattatttttttggggaaaagttgagggggtagatatgattgttaattttttttaaataggtgaggagattgaggtttagagaggtaatgtgatttggatgttatatagttaagggggtagtagagtgaggtttaaatgttttgttttttgttaagtttttttttttttttttttttttttttttgagatggagttttattttgttttttaggttggagtgtagtggtgtgattttggtttattgtaagttttgttttttgggtttatgttatttttttgttttagttttttgagtagttgggattataggtgtttgttattatgtttggttgattttttgtatttttagtagatagggggttttattgtgttagttaggatggtgttgattttttgattttgtgatttgtttgttttagttttttaaagtgttgggattataggtatgagttattgtgtttggtttg

SEQ ID NO: 2722 - DNA, 2426 bp, Artificial Sequence
  chemically treated genomic DNA (Homo sapiens)
taatttttttggggttgttagattgttgatatatatgtatatatatatagagtgtatatatatgtatatatgtgtagttgtattttttggtgtgtttgttgtgagggtataggggtgggtaggttggtaggtatgtgaagttgttattagttttgagggattgtgagtgagttgggatttgggggagaaaaaaatgggggtggatgttagttttttgggtggttgttgttattgtttttgtttttttgaggttttttttgtatttttgggtagtgaagttttttgttaagatgggggttgatgttattttgggttgtttagttaggggatttgggggttttggtggttgtttttggaagtgagttagttgtttgttggttgataggtttggaatttttagttagaggatagaaaatttgtatgggttaggtgagtggggtttggttgagggtagttgggtagggggtagtagggtgtggtagtttgtttattggaattttttagggtgtattttaggggggttgtttatttgaagggaagtgaggatgagggtgtttaaaggttgttttttttatttttatttttatttttattttttgttttttgggattgttatgttttggagtgagtgtagttggtttgttttttaaagttttttgttttggttgattagttgggtgagttttggaattggaatttggattgtttagtgtgttgattttataattttgttggggtggatttttagtttggtatttagttgttttttaattttgagtggtatttgtggatgtagttggtttttggtttagggatgtttatttatttttggtttgtttgaagaaagttgttgtttttaatttttttttttttaagtaagtttaaaatttttatgagtaaaagagtttaaagaggtaagaggatattggtgttttaattgttttttttttttttaattttttttttttttttttttttggttggttttatggattatttgggagataaatttatagtggtttagatttatatgatttagtggatgggtattgtgaggaggtttttttaggaagtttttaatttggtgattattatggtgggttatgaatggatgagtgtagagttggttagttggattttttttaagtgtattttttttttttgatatttggttttttggagttgggaatttttttgttgtttttttgtttgtagttaatagagattttttttattgaggaaaaggtatatagatttggaattgttagatattgtaagtttattatgttttaaaaaatattaaaataatattgaaagttttttttttttagtttttttagggagggggttttagatattaaattggggaagttattttttttagaatagttgttagttaaagtttaggtattttttgttttttgtatttgggaaagaggtatgtagtaataattttttttttttgaagttagttaggatatttttgttggagttgatgtttgtgtggatagggttagtatgtgagttgggttgaatttgttagttgatttatgtttaagtgtgaatattttaatttttgatatgaaagtttatttttttttttatttttagggtggattagtggtatttgttttatttttttttatttttttaggaagtataagtggtggtgttatgtgtatgttgagttgtagtttttgttgttttattgagtttttattggattgttaaggaaagggttttaggagattgaggtgtggtgggtgagtttgtttgttggttgtgaattttgggtttggtgtgagtgggttagggagggaggttttgattttttatttaggtaggtttgggagggtttggattgggatagtagggtggaatgatagttaatgattaaaattttggtttgtgttttgttaggtgatagtgtagaaataattgtaaggtttttttgatgatttggagaggtgggattgggtttagaaagtgaaagtgtttattgtgggggaagtatagtgagtgagtggtagagttaggttttgaattttaggttttgatttttttatttatggttttttgtagtttagtttttagtagatgttttttttagatttttttaattaatttagggttgtttaggttattgattagatttgagtttaaagagagggtttgttatttttatataggagatttttgttatttgattgtgttggtttagtttatgggagtatttgaggataggtgaagggttaagttagtttttttttttgggttttttttagttaggagtgttatagttattaagggatttagtatttagggaggagttttgagttggttttttttatatttgaggtggtagggtttatagttgttttgttaggtgtaggggtttagtattttttttgttgatttagaggtgt

SEQ ID NO: 2723 - DNA, 2426 bp, Artificial Sequence
  chemically treated genomic DNA (Homo sapiens)
atatttttgggttagtagaggggatattgagtttttgtatttggtagggtagttgtgagttttgttattttgagtgtagggagggttagtttagggtttttttttaaatgttgggttttttaatgattatagtatttttggttaggaggaatttagaaaaaggggttggtttagttttttgtttgtttttaagtgtttttataaattgggttaatatagttaggtggtagaagttttttatgtgaaaatggtaggttttttttttaggtttaggtttggttagtgatttgggtagttttgaattaattgggagggtttggggagaatatttgttgggagttggattgtaaagagttgtgaatggggaggttagagtttggggtttgggatttggttttgttatttatttattgtgttttttttatagtaggtatttttgttttttgggtttagttttatttttttaaattattagaaggattttatgattgtttttgtattgttgtttagtaggatataggttaaggttttaattattagttgttattttattttgttgttttaatttaagtttttttgagtttgtttgagtaagaaattaaggtttttttttttggtttatttatattaaatttaaggtttatggttagtgggtaaatttgtttattatattttggttttttaagattttttttttggtaatttaatgaaagtttggtggaatgataaaagttataatttagtgtgtatatgatattgttatttgtgttttttaggagggtgagaggagatgaggtaggtgttattaatttattttaaaaatagggagaaggatgagtttttgtgttgggggttggggtgtttatatttaaatataaattaattggtaaatttagtttaatttatgtgttggttttgtttatatagatgttgattttagtaaaaatgttttgattgattttaggagagaggaattattgttatgtgttttttttttaggtataggggataggaagtgtttgggttttgattgataattattttggaagaagtaatttttttggtttgatgtttgggattttttttttgggaggattggaggggaggagtttttagtgttgttttaatattttttaaaatataataagtttataatatttggtggttttgaatttgtatgttttttttttagtgaagaaaatttttgttggttgtgagtagagaagtggtggaaggatttttgattttgggaagttaggtgttggaaggaggaagtatgtttgaagggggtttggttggttgattttgtatttgtttgtttgtggtttattgtggtggttattaaattgagggttttttggaaggatttttttatggtgtttatttattgggttatgtgggtttgggttattgtgagtttattttttaggtaatttatggggttagttaggaggagagggaagaaggaagttagggagggagagagtaattaaaatgttagtgtttttttgtttttttggatttttttgtttatggaagttttgggtttgtttggaggaaaaaaaattaaaaatagtagttttttttaggtaaattaagggtaagtaaatatttttgagttaggagttggttgtatttatgggtgttgtttagaattaagaggtagttaagtgttaggttgggagtttattttagtggagttataaagttaatatattgggtagtttaggttttagttttagggtttatttagttgattggttgagataaggagttttgaggaataagttggttgtatttattttagggtgtgatggttttgaaaggtgggggatggggatgggggtgggggtggagggggtggtttttgggtatttttgtttttatttttttttaggtaggtagtttttttgaggtgtattttgggaggttttggtgggtaagttgttgtattttgttgttttttgtttggttgtttttggttagattttgtttatttgatttatgtaggttttttgttttttggttggagattttaaatttgttggttggtaggtggttagtttatttttggaggtagttattagggtttttgggttttttggttgagtagtttgggatgatattagtttttgttttagtgaggggttttgttgtttaggaatgtaggaggggttttggggaggtggaggtggtggtggtggttgtttagggagttgatgtttgtttttattttttttttttttaagttttaatttgtttatggttttttggggttgatggtaattttatgtgtttgttagtttatttatttttgtgtttttatagtaagtgtattaggaaatgtggttgtatgtgtgtgtatgtgtgtgtattttgtgtgtgtgtgtgtgtatgttggtgatttggtagttttgggaaggtta

SEQ ID NO: 2724 - DNA, 2397 bp, Artificial Sequence
  chemically treated genomic DNA (Homo sapiens)
aatattttgaggataattgattagagggaggaggggttgtattgttttttagtaggttgagttaattattagtttgtattagtatttgatttgtggtatgtgttaatttattattgttaattgtagggatttagtgatttttttgaatttttgttatttttgttatggtttttgttttgtggaggtttgtggaatgggaagtggggaggggaaggagaagggggtggagttagttggagttttttggttaggtttggagttattttgttttgttatagtttttatgggtttagagtgggttttggggtagagggtttgtaaggataggggtgggtggttttgttgagggtggtgttttgagtaggttttattttttagtttgtttagtttggttttattttagttttgttgttttgttattttgtttttttgtgtttattttttattttttgttggggatattttaaggtttgttaaggttggagtaggggtgggatttagttatttaataaatgtttttttggttatgtagggttgggtattggggtggggggttgatttggattttttaagatattagattgtttaattgtttagtttttattggggtaagtgttttgttgagggtgaagggggttgtgagtgtttattagggagtttggataggttttgttttttatagttgttttattttttggagttgttttggtggtagatggtattgttttagaaaggtgaggttggagttgttttttttattaggggtggttaaggatgtttttagggttttttatgtaggtttttagggttattttgggtgtggttgagggtatgtagattatgttgtgtttttttttattttttatgtttgttgtttgtttgatatgttttttagttgttttgttttgtagaagttgtgtggttttttttgtgagtagagttgggttttatgattttttggagtagtgttagggattttttttaggtataattttaaagggggttttaggatttgttaggtttatggaagtggtttttgtaattttttttttggtggtagtttttggtgtattttggtaggggtagtttttttttattatagggattttgtgtgttaggttttagttgtgttgttgttgaattatggatttaatagtagagaagttttgtaggttgtttgtgttggtttgggaaattggggtttagttggggtttgttatggttttggtgttgttttgttttttgttggtgttatggagtaagtggagagatttatttttttggttttaagaggtattaatggaggaggttgagaggtaggagttgaataattgatggttttttttggtttaggatttgttgaaaatgatatggtgtaaggtagaggggttgagagtgttgattataaaatgttgagaagttattttagggtggttatggttagaaggaggatttttatttaggatggggttataggtatttggggtgggtgttagaggtttttgttttgggttattttagggggttaggatatttagaagttgggtttagaggtttatagggttggtttatttttattttttttttatatgtttgttattattggtgttttagtttagtaattttatggtttgttggttttgtttatagtttttattgttttttgtgtgttgggtgtgggtttttgagttttatttttagtttttttagttttaggagaggagtggaggataggggtttaatgtggggtgtggtgtggagtggggagggttgtggtgtttttttagtttttttttttttaatagttttagttttttttttggagaattttttatttgttgggtatatttggtttttttttattattttgtttttagttgggagatttttatttagtgaaatagtgaaataggaagggttttttggttattttgtgtagggtgtagggtatgtagtgggggagtggtttgtttttttagtgttttattgtttatatttttaggggagtatatagatgggtaggttgtggggttttgattttatggtagtgtttgggggtgaatgtttatagtttttgaaattttagtgggagtgtgttattgggtggttttttagtttagtggtttgtaggtggttggtgagagtgagtttaattagatttttgttttataataaggatagaggaatttttgtattttagggttttttgttttggtgtattaaaaaattggattatatgtgggtttggagaatgagtgtaaggttttattgagtggaagtagtttttagtagatgggggagttagaggggagatggtttttttttggagttaggtaatatttttgggatgtttagtagtttgtttttttttattagtgtgtttttttttttatatag

SEQ ID NO: 2725 - DNA, 2397 bp, Artificial Sequence
  chemically treated genomic DNA (Homo sapiens)
ttgtgtggggagaggaatatattggtggaagaagataagttgttggatattttgagaatgttgtttgattttaggggaaaattattttttttttggtttttttatttgttgagagttatttttatttaataaaattttgtatttattttttaagtttatgtgtgatttaattttttggtatattaaggtaagaaattttgggatatagaaatttttttgtttttgttataaggtaggggtttaattgagtttatttttattagttatttatagattgttagattaaaagattatttggtaatgtatttttattggggttttaagagttgtaaatatttatttttagatattgttatggggttagagttttatagtttgtttgtttgtatgtttttttagaggtgtgagtggtggggtattgaagaagtgagttatttttttgttgtatgttttgtgttttgtgtggggtaattagggaattttttttgttttattgttttattgggtagagattttttggttggagatagaatggtggggagaggttagatgtgtttagtaggtaggggattttttaggggggaggttgaggttgttaggaaaggaggggttgagggggtgttatagttttttttgttttgtattatattttatgttaaatttttgttttttattttttttttggggttaaggaggttgagagtagagtttagaggtttatgtttagtatataggaggtagtgggggttgtggatggggttaatgagttatggggttgttgggttgaagtattggtgatggtaggtgtgtgagagggaagtgggggtgagttagttttgtgggtttttaggtttagtttttgggtattttggttttttggaatgatttagggtaggagtttttgatatttgttttaaatgtttgtgattttgttttgagtgggggttttttttttggttgtgattgttttggagtggttttttagtattttgtggttagtatttttagtttttttgttttgtattgtgttatttttagtagattttgagttagagaaggttattaattatttagtttttgttttttagttttttttgttagtattttttaaagttgggaagataaatttttttgtttgttttgtggtgttgataggaagtagggtggtattaggattgtgataggttttggttgggttttggttttttgagttagtataggtggtttgtaaggtttttttgttattaaatttataatttagtggtaatgtagttggggtttggtatatagggtttttgtgatgaggaggggttgtttttgttggaatgtattagaggttgttattagggagagagttataaggattatttttgtggatttggtaggttttagggttttttttaaaattgtgtttggggagagtttttggtgttgttttggaggattatggagtttgattttatttataggggagattatatagtttttgtggggtaagatagttgaggagtatgttaggtaagtgatgggtatggggggtgggggggagtatagtgtggtttgtatgtttttagttatgtttagggtgattttggaggtttgtatggaagattttggaagtgtttttggttatttttggtggaagagatagttttagttttatttttttaggatagtgttatttgttattaaggtagttttagagagtgggatagttgtgagaggtgggatttgtttaggttttttgatgggtatttatagttttttttatttttagtgaggtatttgttttaatgaaaattgagtagttggataatttgatgttttggagggtttaggttagttttttattttaatgtttagttttgtataattaaggaagtgtttgttgaatggttgagttttatttttgttttaattttggtaggttttggagtgtttttggtaggaagtggagggtgaatatagggggataaagtaatagggtagtagagttggggtggggttaggttgggtagattggggaatgagatttatttagaatattgtttttggtagagttatttatttttatttttgtaaattttttgttttagggtttattttaaatttatgagagttgtggtaggatagggtgattttaggtttggttaggaggttttggttgattttgttttttttttttttttttttttattttttattttataggtttttatagggtaggggttgtgataggggtgatagaagtttggagaggttattgagtttttgtaattagtagtaatgagttgatatatgttataggttaagtgttaatgtaggttgataattaatttaatttgttaggaagtggtgtagttttttttttttttgattaattatttttaggatgtt

SEQ ID NO: 2726 - DNA, 2354 bp, Artificial Sequence
  chemically treated genomic DNA (Homo sapiens)
agatattttgtataggtgtgtgtttttattttggttgttgtgtgagttgaggataaaattttggttgttgtgggagttgagtttgtgggtaggttgagttaggggtgggagtgagagggaggggtgagaggggtttgagtatttatttagtgtatgttttatagaattagtttgttttaggaagttttggtgtttagtgttataatgtatattttagttttgtgtttgtatattagattttgggtttgttttatatgggtgttttgagttgattttttttgttggagttgttgaagggttttgtaggttttaatttatagttagtttttaattttgttattagtaggggttttagtttatagtaatgtagttgtttttattgtaggttaattttgttatagtgttgttaatttgaaatatttagtttagagtgagtttttggggaggtgggaggttgtttaagtattttatttgttgtgtgggtaagaagtggtttgtattttattagagtttggggatttaggatttagatttgttgttttgtagttgtgtgattttgggaaggttaggttttattttgggtgtgttttttttttttgaagatttaatttggtttgtgtgttaggagtggagggtttgttggagtttgaggaagatggtagttgggttggtagtagggtgagtagggtttgagtggggttaggttttttatattggataatgatgtttattgtaaagtttatgttttggatttttgataaatattttagtaattgatttgatattttattatgtttaagttgatttgtttttatgttggatatgtgtttattaggatgtgtttttggttgttattggtagggtttggaatgaggatatttgttgtgtattttgttttggagttttagataggtaaaaaaatatttatgtggttttatttaggttatttttttgtttgtatgaattttaggttatttttagaaagggttttatagttttggtgttttattttttgatttttgttaagttgtttttagtagtagttggaattttttgaagtggttgttatagatgttggtaaagtttggtttgggatgtttttattttgtattaggtatggggttgtttttgttgtatatttatttggaaattatttatatgttaagtattgtagaggtaaggggagtttgttattggattgtgtttaatatggttgtagggatatagataagtatattttttggtagaggtatgggtttggttggttggagttgtagtagttgtgtgtggttatagagtttttaaatgagggagatggatggttttgttttatagtgtgtttagagtatgtttatggtgtttgggaagattagggatttattatgtttggttttggttttttttatagtgaagtttttttgttggtaggatttatggttaagtatgggggtaggggttgggggagttttgttagtgattttttgtaggtagtaaggtttttgggagttggttaggaaaatagaaattttattttggagtaggtgtgtaaattaatagtttagaaattaataaggtttttattaaggattatgagttatttgtgttgttttgtttgttttggtatttgtgtaggatatggggtggggggtgggggaagtatatgttaatagggagttggtggttgttttgagagttagttttttttttataatttgtttgaaatttttttttttgtagaagatggaatttagtatattttgagagtttattgtataggttaggtgtatttatgtttattgtttttattagtaaaagagtaaaattaaaattaaataaatgaagattttggtaagattgtttgattttgttttgaggtgagtatatagtagtattgggaaagtgtgtaatttataaagatggtgtagtttgtaggttaggaggggttggggtttgttgagggtagttggggttttgtagtttgatttataatattgtatttagagtggggaggtgttgtttttaggtttatttgtgatttttgaggtataggtagagggttgggtgtgtatgatattgtataggagttttttttgtagtgtggaatttatttatgttgtttgtttttttagtttttaaatgtatttggggtttgagattagaaatagtagaagttttggtggttagtggaatagttatttaagtggatttttattttttgggtattttttgagtatttttttgttaggtattgttttaggggttggtgatgggaagtttattttgtttatgaggtttttttggtatagaggtggatattgagggattgttggtttatatgtatgttgaaatatgtg

SEQ ID NO: 2727 - DNA, 2354 bp, Artificial Sequence
  chemically treated genomic DNA (Homo sapiens)
tatatattttaatatgtgtgtgagttagtggttttttagtgtttatttttgtgttgaaagagttttatgggtaaggtgggttttttgttattagtttttgaaatagtgtttagtagggaggtgtttaaagaatgtttaggagatgagggtttatttaggtaattattttattaattattagagtttttgttgtttttgattttagattttagatgtatttggggattgagggagtaggtgatgtgggtgggttttatattgtggagaggatttttatgtagtgttatatatgtttgattttttgtttgtattttaggagttataggtgggtttggagatagtatttttttgttttgagtgtagtgttgtggattaggttgtaaagttttagttgtttttgatagattttagttttttttgatttgtaggttgtattatttttatgagttatgtatttttttgatgttgttgtgtgtttattttaaggtaggattaagtaattttgttagagtttttgtttgtttgattttggttttgtttttttgttgatagaaatagtaaatataaatgtatttgatttgtgtagtgggtttttgagatgtgttgggttttattttttgtaaagagaaggattttaagtaagttatgagaaaggagttggtttttagagtggttattagttttttgttgatatgtgttttttttgttttttattttgtgttttgtgtaagtattagaataaataggatagtataggtggtttatggtttttggtgggaattttgttaatttttgagttgttggtttgtgtatttgttttaggatggagtttttgtttttttggttagtttttagaggttttgttgtttgtgagaagttattgatagagtttttttagtttttgtttttatgtttggttatggattttattagtaaggaggttttattgtgagggaaattagagttgggtatggtgagtttttggtttttttaggtattgtggatatgttttgggtatattgtgaagtgaggttatttattttttttatttggaagttttgtgattatatatagttgttgtagttttagttagttgggtttgtgtttttgttagggaatgtgtttgtttgtatttttgtagttgtgttgaatgtagtttaatggtagattttttttgtttttgtggtgtttggtatgtggatgatttttaggtgaatatgtagtagaggtagttttgtgtttggtgtagggtggaggtattttaggttgggttttgttaatatttgtggtagttattttaaagagttttagttgttgttgaagatgatttggtaaaggttagagagtgagatattggggttatgagattttttttaagggtggtttgaggtttatataagtaaagagatgatttgggtgaagttatatggatatttttttgtttgtttggggttttaaagtaaggtgtataataagtgtttttattttaggttttgttagtggtagttaagagtatgttttggtagatatatgtttagtatggaaataaattaatttggatatagtggagtgttaggttgattgttaagatgtttgttaaaaatttaggatatgggttttatagtggatattattgtttagtgtgggaagtttggttttatttagattttgtttattttgttattgatttagttgttattttttttagattttagtaggttttttatttttagtatataggttggattgaatttttaggaaagaagagtatatttagggtgggatttgatttttttaaggttatataattgtggagtagtagatttgggttttggatttttaaattttgatgagatgtaggttgttttttgtttatatagtaggtaagatgtttggatagttttttgtttttttaaaaatttattttgggttggatgttttaggttggtaatgttgtggtagagttagtttgtagtgaaaatagttgtgttgttgtaagttggggtttttgttgatgatagggttgggggttgattgtagattgaggtttgtagaattttttagtaattttagtagagggaattagtttaaggtatttatgtggagtgggtttggggtttggtgtgtaggtatagggttggagtgtgtattgtggtattgggtattggaattttttggagtaggttagttttgtgaagtatgtgttgagtaggtgtttaggttttttttattttttttttttatttttatttttggtttagtttgtttataggtttagtttttatagtagttaggattttgtttttagtttatatagtagttaggatagagatgtatatttgtgtaaagtgttt

SEQ ID NO: 2728 - DNA, 2382 bp, Artificial Sequence
  chemically treated genomic DNA (Homo sapiens)
ttttagttttataattaattaaaataaagaataagtaaatataggttttttttaaaaaaggtttaaatgtaaatatattatatgatattaagtttaaattttgatataaaatatttggaataattatttagaaaattataaattttaaaaaataaattttattttataaaataaaaagtgtgtatatattattaattagtgtattaggtttattaagattatgattattagtaaattatatttaagttttattaaaattttaagagtattgtgtgttgttagaggtaaagtattgtgtgaaatgtttgttgagaattgttattttttaagaaggttattaattttattttttgggaattttttatttaatgttattttttgaatagtttttatatatgtttgaaattattaattgtaatagtgtttgtgatgttgattagatggtatatgtgggttatttaattttttttagaatatattttgggggtataaatattttaaaaagttatatttatagtagtttgtattatatagaaattaagattttttttgggagtgagaaattataataataaagtataatatattaggattatagaaggtaggatttggatgatggatgtgtgaatagagatgatggatggtgaattatagagataggttgggtttttaggtttttgggttatggaaggagtgtgttttgtaattagtataggatatagtttagtaagaattatatattttaaggagtttggggtttggagttgggttttgtgtttattgatggggatttagtagttgtgttttttttggtttggtagagttttttgagtagggatttgtgtatggttttagtaggtgtttttttttagggtttttttaaggtgggaagtaaattttttttttttttaggttgtagtgtgagttgagttttagttttagggtttagggaggggttgggtagttttttgatggaaatatatttgtatgagtagttttttttttgtagagggtggggaagaaaaggatgtttggggtagtttagttttatggtgtggtggggttaggggttgtgtttattatggatttgattttttttttttttgtgattttgttttattgtatgtgttgggatgggttttaaagattagtttatattagaaattttgattgaggtttttgagaaatgttattttgaattttgttttagtatttggatgtgtttttttatttgatagagttataaagatttttttagttaaaaataaaagtaaagttttgttagatttgtgtttgtggttttaaatttgttttagttattgagtaggagttgagagggaagagagagagaagaatataagatttatatggggaaggatttttatgagggtgtggtagtgagagtgggtggtaagttgttaaagaggtttaagttatagaagtgggttttatgtgggatttttggaatgagtaggagggtgatgggtggagggtgagggttagaagattttaattagaggtgagaatttaaagatgagttattggttatttaagttaaatagtgaaattattttggtttgtgtttttagttagtggagtagggaaggggttaggatgtgttttttgtaggtgttattggaaaggggttttgatttagattttaagagagggtttttggattttatgtaagaaataatttgggaggagtttataaagtggaaataagtttattaagatagtaaatgaataaaggaatggttattttatagatagggtagtattaaatattgttggttggttatttgtatagatagtttttgattatatgttaaataaggagtggattatttattagttttttaggaattttttttaaaaatatagattatataaggtaatttgtggatgttgttatagtatttttaattgtgaggataattagaggttattttttttattgttttggttttagtaggttttggttggtttttttagtgtattttgttttattagtagggtttttatgatttgtattttgtgattttagtttggttgattttttagtttattttgtgattaagaatgtttaattttttggaaatgtaggttagtatgtttaagttttatttaattaagtttttatttaatatggagttattttggttttaatatttttgatttagggtggttgtagagttggaggtgtagattggggtagattagttttttgagaaaagtatatagagttattgtggggttgtgaggtgggagagatgaatttatattggtatttgattagtgattttttagttgtaatgagaatagaatggagaggtttgggataggaagataggatgtggttgtttatgttattttggtggg

SEQ ID NO: 2729 - DNA, 2382 bp, Artificial Sequence
  chemically treated genomic DNA (Homo sapiens)
tttattaggatggtatgagtaattatattttgtttttttgttttaggtttttttattttatttttattatagttggagagttattgattaaatgttaatgtgagtttattttttttattttatagttttgtagtggttttgtgtgttttttttaggaggttgatttgttttaatttgtatttttagttttgtagttattttaagttagaggtgttagaattagagtgattttatgttgaataggggtttgattaaatgaggtttaggtatgttggtttgtatttttaggaggttaggtatttttagttataggatgagttaggaagttaattagattgggattataagatataggttataaagattttgttgataagataggatatgttaaagaagttggttaaaatttattgaaattaagatggtgaggaaagtgatttttggttgtttttatagttagaaatgttatggtaatatttataagttattttatgtggtttatatttttaaaaagaatttttgaaaagttaataaataatttattttttatttagtatatgattaaggattatttatataaatagttgattagtagtgtttggtgttgttttgtttatggagtagttatttttttatttatttattgttttaataaatttgtttttattttatagattttttttaaattattttttgtatgagatttaagaatttttttttgggatttgaattaggatttttttttagtaatatttgtaggaagtatattttggttttttttttgttttattgattggaggtataggttaaggtaattttattgtttgatttgaatgattaataatttatttttgggtttttatttttgattagaattttttgatttttattttttatttattgtttttttgtttattttgaaagttttatatgaaatttatttttgtggtttaggtttttttggtaatttgttatttgtttttattgttatatttttatagaaatttttttttatatggattttgtgtttttttttttttttttttttttagtttttgtttagtggttgaagtagatttggagttatgaatatgagtttggtagagttttgtttttgtttttaattgggaaaatttttataattttattaggtgaaaagatatatttagatattaaggtagagtttagggtaatattttttaggggttttagttaaagtttttgatgtaggttggtttttgaggtttgttttgatatgtatagtgagataggattataaggaggggaggagttaagtttatggtggatatagtttttgattttattatattgtggggttggattgttttaggtattttttttttttttattttttgtagaggaggggttgtttatgtaagtgtgtttttattaggggattgtttagtttttttttgagttttggagttggagtttagtttatattgtagtttgaggaggaggaaggtttattttttgttttgggagggttttgggaggaagtatttgttgagattatatataggtttttgtttaggggattttgttaggttagaaaggatatagttgttgagtttttattagtgagtatagggtttagttttaagttttgagttttttggagtatatggtttttattgagttgtgttttgtgttggttataggatatattttttttgtggtttagagatttgagagtttagtttgtttttgtagtttattatttattatttttgtttatatatttattatttgaattttattttttgtgattttgatatgttgtattttattattgtagttttttatttttaaaaggagttttggtttttatgtggtataaattgttgtgaatgtaattttttaaggtgtttgtatttttagagtatattttggaaaaagttgaatgatttatgtgtgttatttggttagtattatagatattgttatagttgatggttttaaatatgtgtaggggttgtttagggaatggtattgaatggaaaatttttaggagataaggttggtggtttttttaaaagatggtaatttttagtaaatattttatataatgttttatttttaatagtatataatgtttttagagttttgatagggtttagatgtgatttattaatagttatggttttggtaggtttaatatattagttaatagtgtatatatattttttattttatgaagtgaggtttattttttaaagtttgtagttttttaaatagttgttttagatattttatattagaatttggatttagtgttatataatgtgtttatatttaaattttttttaaaaaaaatttgtatttgtttattttttgttttggttaattatgaagttaaga

SEQ ID NO: 2730 - DNA, 2369 bp, Artificial Sequence
  chemically treated genomic DNA (Homo sapiens)
gtttggggttgaggttggtttttatttattggttaggttttgagtaaatgaattggtttttttgggtttttttttttttgtttttaaaatggtgtaggtgaggataataggagttttaaggggtgttgtgagggtggttagtatgtgttttgttaagggttttataaagtttaatttgtggttatgagagggggtgtagtaggatagggtgggggtagtttttgaaagttttataaattaagagaatagaaaggaaggtattttgtttttatagtggaggttatttttttggttagagggagggttggttgttgtttggttaaggaggggtagagagaatttggtagaatttattgagtttttgtgttggtagttttggaatgggatttttttgggttgtttttggtttgatgaattggttttgaggttatttattttatagtttggtttggattttggttatttagtttttaagaaagtttggaattaggaaaggagtgttgttggtgtggaaagatatatttgtattttaaaatatttggtttttggttgtgttttaggaattgggaggtgagattttttttggtgattgatagttttgtgtttttgggtgtagagttttgtggttggttttggtattttttttttttttttttttttgttttttttggttaatgttagtaataatttagagggtagttttattatttgttaggtttaatgtagtgttttttgtagtagttatgtgaggttttttggatggggagttgttttttttttttgttttgtttttggttttagttatatagtgtttattttttttgtttaagggttaggaggttagattgttggggtaaagttgttatagtagtgagggagagagtgttgttttttttttttttaaaagttattttggtaaggtattagttaaatatttttttggttttagaaggttttttttgtgaagtttgtagtgtttaaatgataattagtaaatttttagagataggtttttgggaattagttgtgttgggtgggatgaaagttgttttgatgttttggagtgagagagtagagagaaggaggaagatagatattatttgttagttgtagggttttgggtagtagtagtatgttaaggaggagttagggggttgtggggagtttaggagggtgtgggaggtttggtagggtttgttattttataggttggttttttatttgggggtttgtttgtttgtggtgattttttagtttataggaggggatggttggtgttgatagttttttttttgttttttttatgaagtttttttttggtagtttttgattttttgtttagaagtaaagttggaatagtttagtagggtggttgttagatgaggaatttggtattgagattggtttaggttatataattagaagaagagttggagatgggatttaagtttttttattttaatttttggtgggttttattttgttttggtttttttttagtaggggttttgtttaggagatattggtaattgtgtagagggattatgggatttttatgagtgattttgggttttggtttagttttttatttttgaaatatttttaaaatgattataagtatgtttatataaatttttttaaaatattttgagaattttttaataatgtgtttattaaaggtaggttttttggtgaggggtggtagggaggttggggtgaagggtaggagttttatgtttttagttttagagagggttaaatatttagggtaggtgaaaggtaggttgtttattatttatttagtgagaatttttgtgggttttttgtagaggtttaggagatgttttttttttggtttatttttaatgttagtttttttttgtggttgttttaaagtttagtttatttggttttttaattgtgagatttttgaattgtttttttattggttgtaggttatagtttttgtttttatttttagtagtattagttggggataggaattgtttgttgttgggatttttttttttagtagattgggagttttttatttttggtatttatatatttgtttgtgtgtttggagtggtagaggaaaggggttggggtgtggtgatggttggtggagttggaggtatttggtatatggaagatgtaggtgggaaggtggttgagttttagtgtatgttgagtgtttattttttttttttgtaggtgtttttttatttattagataaatgtgatgattttagttgtataaaagagaagattttggttttaggaggtaaaataatatgtttaggattagggtaggtttgtggggtgggtatttgaattgttagtggtatgatgtttgagtttttttttat

SEQ ID NO: 2731 - DNA, 2369 bp, Artificial Sequence
  chemically treated genomic DNA (Homo sapiens)
gtgggagaaggtttggatattatattattggtagtttaaatgtttgttttatagatttgttttgattttaggtatgttgttttgttttttggggttgaggtttttttttttgtataattgggattattatatttatttggtgagtgaagggatatttgtagagaagggaggtaagtgtttagtatgtgttgaaatttagttatttttttgtttgtgttttttatgtattaggtgtttttagttttattagttattattatattttagttttttttttttgttattttagatatgtaggtagatgtgtgggtgttaagggtgaggggtttttagtttgttggggaagggggttttggtagtaaataatttttgtttttggttgatgttgttagaagtgagagtaggggttgtgatttgtagttaatggggaagtagtttgagggttttatagttgggaggttgagtgagttaagttttagggtagttatagggaggagttgatgttagagatggattagagaggaggtgttttttgggtttttgtaggggatttatagaggtttttgttgggtgaatgatgggtagtttgttttttatttgttttgggtgtttggttttttttagggttgggaatatgaggtttttgttttttattttagtttttttattattttttattaaaaaatttatttttggtaaatatattattaagggatttttagaatattttagagaagtttgtgtgaatatgtttgtggttgttttaaaagtgttttagaagtgagaggttaaattaaggtttgaagttatttatggaaattttatgatttttttgtatagttattagtgttttttggatggggtttttgttggaaaggggttgagatagggtgaagtttattaggggttggagtggggaggtttgggttttgtttttagttttttttttggttgtgtggtttggattagttttagtgttaggttttttatttggtggttattttgttgggttgttttagttttgtttttgagtggaaggttaggggttgttagggaggagttttgtggggaaagtaaaggggaagttgttagtgttggttgtttttttttgtgaattaaagagttgttgtagataagtaggtttttagatggagaattagtttgtgaggtggtgggttttgttaggttttttatgtttttttgggttttttgtagttttttggtttttttttggtgtgttgttgttgtttgggattttgtgattggtaggtagtgtttgtttttttttttttttttatttttttgttttagaatattagagtggtttttattttgtttggtgtagttaatttttagggatttgtttttggggatttgttggttgttgtttgaatgttgtagattttataggggaagttttttgggattgagaagatgtttagttaatgttttgttaaggtggtttttgaaggggagggggatagtgtttttttttttgttgttgtgatagttttgttttagtagtttggttttttggtttttaaataaggagggtgggtgttgtgtggttggggttaggggtggggtaggggggagggatagttttttatttgaggaattttatgtggttgttgtgggggatattgtgttgaatttggtaagtggtggggttattttttgggttgttgttggtattggttagggagagtggggagaggggggagggggggatattagggttagttatagggttttgtgtttagaggtataaaattgttagttattagaaagggttttattttttagtttttgaaatataattagaggttaagtgttttaggatgtaagtgtgtttttttatgttagtggtgttttttttttggttttaggtttttttggaagttgggtggttgggatttgagttaagttgtggggtaggtagttttagggttagtttattaggttagggatggtttaggagggttttattttagggttgttagtatgagggtttagtgaattttgttagattttttttgtttttttttggttgggtagtagttaattttttttttggttaaaggggtggtttttattgtggagatagggtgtttttttttttatttttttagtttatggggtttttaagagttgtttttattttgttttgttgtatttttttttatgattataaattaggttttatggagtttttagtagggtatgtattggttatttttatagtattttttggggtttttattgtttttatttgtattattttaaggatagggaaaaggaggtttagggaagttagtttgtttgtttaagatttagttggtaagtagaggttagttttagttttaggt

SEQ ID NO: 2732 - DNA, 2425 bp, Artificial Sequence
  chemically treated genomic DNA (Homo sapiens)
tgtattttagggtaattagtttttgtatgggaggagaggggtattttttgtattattttatggtgttattaaaagttgaattatgggttggtttaattttgtagagaagagattatttaatttatttgtggaaatttattttttagtgatattgatgttttttaagaaatttaattttgggtttgagtgatggttggtgtaaaaaataaatttaagattttagtgttttttagaagtttggatttttagggattttgttgtgagttataggatgttattggtttttttttttttgtgggttgagtgtgggggttatgtggatttttttatgagtagatgttattagggttattggttttagtttttttttttatagttgtagtgggggttggggttggggtattttagggagggtttttgtatgagtttgtgttatagtgtgtggtatttggtggagggattaagttgattgttttaggtgagtttttttttttttttttttttttgtttttgggataatttttgttgtttttgtttgtttttgtattttgttttaatttgtggttagtttttttttttgtattttaggtttgagtaaggatttttgttttttttgtttagatttttgtttgttttagtaggttattataattattttatttttgattataggggtaggggattagatagaatgatttattgagttttgtttgtttgtttgtttgtttgtttttttgtttgtttttttgtttttttgtttgtttttttgattgtttgataggtgtaggttgggtttttaagttttgttttgttttggtttttttagtttgggtttttgttggaatagttttgtttttgggttatttgggttttattttttggggaattgggaataaggggtttgagggaggtattttttgggagattttagaaggatttagtgtttttggggttgatgtttgggaattatagagttgggatttagagttaggatttagatttagaatgaggtaggaggtggaggggttgttttgggtgtttgggggttgttagggattgagttttgagttagtttgagatttaggaaattttgttaggagggagaagggagaagtagattttggatattagaaagttaggggaagggttataaaaggagtggatgtgatggaagggtgggtttttgggtttttttagaatatattttttgtgtttagggggattagaggggtagagtttattgtgtgaaagttttattgttatgattaggtagttgggatgtggggtggatgttagaaaagattttatggaataagagagagtttaggatagtaggtaggttttttgatttttttaggtttttgttttatatatgggttttagaatatatatttggttggaatagtttgagggattaaaaggttttagtattttatagagttgaggagttaggttagaaaagtaattttagagtttgttgtgtaggggagatatagagttttttttatttgttaggatggtaggaggggatagggttagggtgttgagggttagatgttggtgttgggggttaaggttttgagagattttaggataggtggttaggtgtttaaggtaaaatagttttttgtgtagattagggtatagtggaaaatattttgatttttttgtttggtatagatttttagatatagagtttttgaataagggtattttaatattttattatatattgaggttaggggttttttaggtggatattaggattttgattttttgttttttatttattttgtaggttagtttaaggttgtttttttggttattttgtttttgtttttttttgaggagttttaagttaataaggttatattggtgtgttttataagtgatttttatttgggagttgtgatagtggtttggaaggtagatagtagttttgttaaggtgggagtggagattattatattttttaaataaagtaataataagtatgtggttagtagttatttgagtttgatgtttgagtagtggaagttttatagaagttatagttgttaggttatgtatgaagggagtattgtggagaagatagtggtttttatagaatgtttataggtttttaatttttattttttattatgggagattagagttgtaggattttaggggaggggtttttttttttattttaaggtattaagtttttttttttgtatttaataaatttttaataaatatttttattgttaattagaaattttgttttattttattttttttttttttatatataatttttagttttttttgggtttttaatttgtggtggaaagaattttgaatttagtgggaaagttgtttatgtgaaggggtttttagttttttgggtatttttgtaggtaaggttttttttatttagata

SEQ ID NO: 2733 - DNA, 2425 bp, Artificial Sequence
  chemically treated genomic DNA (Homo sapiens)
tgtttgggtgaggaaggttttatttgtagagatgtttagggaattgagaatttttttatataggtaatttttttattgggtttagggttttttttattataaattgagaatttaggaaaggttaggaattatatgtgagaaaagaaaaaatgagataaaataagatttttgattgataatgagaatatttattgagggtttattgagtgtagggagaagggtttgatgttttggggtgggaggagagattttttttttgggattttgtagttttagttttttgtggtggggggtgagggttgagaatttatgaatattttgtaggggttattgttttttttatggtgttttttttatgtgtgatttggtagttgtagtttttgtgggatttttattgtttaggtgttaggtttagatagttgttggttgtgtatttgttgttgttttgtttggagggtgtggtggtttttatttttgttttgatggggttgttatttgttttttaggttattgttatggtttttgggtagaagttatttatgagatatattagtgtggttttgttggtttgaagttttttagaggagggtgggaatagagtgattgagggggtagttttgggttgatttgtggggtggatgaggggtagggggttagagttttggtgtttatttggggagtttttgattttagtatatgatgaggtgttggggtgtttttgtttaggggttttgtgtttgaaggtttatgttaggtagaggggttagggtgttttttattatgttttgatttgtatggggagttgttttattttagatatttgattatttgttttgagattttttggggttttggtttttaatattgatatttgatttttagtgttttgattttgtttttttttgttattttgatagataaagagagttttgtgttttttttgtatagtgaattttggggttatttttttggtttggttttttagttttgtgggatattggggttttttggttttttaggttgttttagttaaatgtgtgttttggagtttgtgtatggggtaagggtttggggggattggagagtttgtttgttgttttgggtttttttttattttgtggagttttttttggtatttattttatgttttggttatttggttatagtagtggggtttttatgtagtggattttgtttttttgatttttttgggtataggggatatgttttgaagagatttaggagtttgtttttttgttatatttattttttttgtgattttttttttggttttttggtgtttagagtttgtttttttttttttttttttgatggggttttttgagttttaggttggtttagggtttagtttttggtagtttttagatgtttagggtagtttttttattttttattttattttgggtttggattttggttttgggttttagttttgtgatttttgagtattagttttgagggtattgggtttttttaaagttttttaggaggtgttttttttagattttttgtttttaattttttaggagatggaatttaggtaatttaaggataaagttgttttgataagaatttagattgaggaggttagaatagaataaggtttagagatttagtttgtgtttgttagatagttagagagataaatagagagatagagagataaatagagagatagatagatagatagatagatgaggtttagtaggttattttatttagttttttgtttttgtggttagaggtgaagtggttgtagtgatttgttgaggtaagtaagggtttgaatagggagggtagaggtttttgtttaggtttgggatgtagggagaaaggttgattataagttgagataagatatagaaataaataaaaatagtagaaattgttttaagagtggggaaggagaggggagaagagatttatttaggatggttagtttggtttttttgttgaatattatatattgtgatataggtttatataaaaattttttttgggatgttttagttttagtttttattgtagttgtgaaggaggaagttggggttagtggttttggtggtatttgtttatgagggagtttatatggtttttatatttaatttataaagagaaggggattggtgatgttttgtgatttatagtaggatttttggaaatttaggtttttggaggatattgggattttgaatttgttttttgtattaattattatttaggtttaggattgaattttttagggagtattagtattgttaaggagtgaatttttatagatgggttaggtggttttttttttgtaaagttgaattaatttatggtttaatttttggtaatattatggggtggtgtagagggtgtttttttttttttatgtagaggttgattgttttagagtgta

SEQ ID NO: 2734 - DNA, 2425 bp, Artificial Sequence
  chemically treated genomic DNA (Homo sapiens)
ggtttttagaatattgtattttagggtaattagtttttgtatgggaggagaggagtattttttgtattattttatggtgttattaaaagttgaattatgggttggtttaattttgtagagaagagattatttattttatttgtggaaatttattttttagtgatattaatgttttttaataaatttaattttgggtttgagtgatggttggtgtaaaaaataaatttaagattttagtgttttttagaagtttggatttttagggattttgttgtgggttataggatgttattggttttttttttttgtgggttaagtgtgggggttatgtggatttttttatgagtagatgttattaggattattggttttagtttttttttttatagttgtagtgggggttggggttaggggtattttagggagggtttttgtatgagtttgtgttatagtgttgggtgtttggtggagggattaagttgattgttttaggtgagtttttttttttttttttttttttgtttttgggataatttttgttgtttttgtttgtttttgtattttgttttaatttgtggttagtttttttttttgtattttaggtttgagtaaggatttttgttttttttgtttagatttttgtttgttttagtaggttattataattattttatttttgattgtaggggtaggggattagatagaatgatttattgagttttgtttgtttgtttgtttgtttgtttttttttttttgtttgtttttttgtttgtttgataggtgtaggttgggtttttaagttttgttttgttttggtttttttagtttgggtttttgttggaatagttttgtttttgggttatttgggttttattttttggggaattgggaataaggggtttgagggaggtattttttgggagattttagaaggatttagtgtttttggggttgatgtttgggaattatagagttgggatttagagttaggatttagatttagaatgaggtaggaggtggaggggttgttttgggtgtttgggggttgttagggattgagttttgagttagtttgagatttaggaaattttgttaggagggagaagggagaagtagattttggatattagaaagttaggggaagggttataaaaggagtggatgtgatggaagggtgggtttttgggtttttttagaatatattttttgtgtttagggggattagaggggtagagtttattgtgtgaaagttttattgttatgattaggtagttgggatgtggggtggatgttagaaaagattttatggaataagagagagtttaggatagtaggtaggttttttgatttttttaggtttttgttttatatatgggttttagaatatatatttggttggaatagtttgagggattaaaaggttttagtattttatagagttgaggagttaggttagaaaagtaattttagagtttgttgtgtaggggagatatagagttttttttatttgttaggatggtaggaggggatagggttagggtgttgagggttagatgttggtgttgggggttaaggttttgagagattttaggataggtggttaggtgtttaaggtaaaatagttttttgtgtagattaggatatagtggaaaatattttgatttttttgtttggtatagatttttagatatagagtttttgaataagggtattttaatattttattatatattgaggttaggggttttttaggtggatattaggattttgattttttgttttttatttattttgtaggttagtttaaggttgtttttttggttattttgtttttgtttttttttgaggagttttaagttaataaggttatattggtgtgttttataagtgatttttatttgggagttgtgatagtggtttggaaggtagatagtagttttgttaaggtgggagtggagattattatattttttaaataaagtaataataagtatgtggttagtagttatttgagtttgatgtttgagtagtggaagttttatagaagttatagttgttaggttatgtatgaagggagtattgtggagaagatagtggtttttatagaatgtttataggtttttaatttttattttttattatgggagattagagttgtaggattttaggggaggggtttttttttttattttaaggtattaagtttttttttttgtatttaataaatttttaataaatatttttattgttaattagaaattttgttttattttattttttttttttttatatataatttttagttttttttgggtttttaatttatggtggagggaattttgtatttagtgggaaagttatttaagggaggaggtttatagtttttttgagttatttttttggaaggtttttttttttttagtt

SEQ ID NO: 2735 - DNA, 2425 bp, Artificial Sequence
  chemically treated genomic DNA (Homo sapiens)
gattggaagaggaaggattttttagagagatgatttggggaggttgtaagtttttttttttgggtgatttttttattgggtgtagaattttttttattataaattgagaatttagggaaggttaggaattatatgtgagaaaagaaaaaatgagataaaataagatttttgattgataatgagaatatttattgagggtttattgagtgtagggagaagggtttgatgttttggggtgggaggagagattttttttttgggattttgtagttttagttttttgtggtggggggtgagggttgagaatttatgaatattttgtaggggttattgttttttttatggtgttttttttatgtgtgatttggtagttgtagtttttgtgggatttttattgtttaggtgttaggtttaggtagttgttggttgtgtatttgttgttgttttgtttggagggtgtggtggtttttatttttgttttgatggggttgttatttgttttttaggttattgttatggtttttgggtagaagttatttatgagatatattagtgtggttttgttggtttgaagttttttagaggagggtgggaatagagtgattgagggggtagttttgggttgatttgtggggtggatgaggggtagggggttagagttttggtgtttatttggggagtttttgattttagtatatgatgaggtgttggggtgtttttgtttaggggttttgtgtttgaaggtttatgttaggtagaggggttagggtgttttttattatgttttgatttgtatggggagttgttttattttagatatttgattatttgttttgagattttttggggttttggtttttaatattgatatttgatttttagtgttttgattttgtttttttttgttattttgatagataaagagagttttgtgttttttttgtatagtgaattttggggttatttttttggtttggttttttagttttgtgggatgttggggttttttggttttttaggttgttttagttaaatgtgtgttttggagtttgtgtatggggtaagggtttggggggattggagagtttgtttgttgttttgggtttttttttattttgtggagttttttttggtatttattttatgttttggttatttggttatagtagtggggtttttatgtagtggattttgtttttttgatttttttgggtataggggatatgttttgaagagatttaggagtttgtttttttgttatatttattttttttgtgattttttttttggttttttggtgtttagagtttgtttttttttttttttttttgatggggttttttgagttttaggttggtttagggtttagtttttggtagtttttagatgtttagggtagtttttttattttttattttattttgggtttggattttggttttgggttttagttttgtgatttttgagtattagttttgagggtattgggtttttttaaagttttttaggaggtgttttttttagattttttgtttttaattttttaggagatggaatttaggtaatttaagggtaaagttgttttgataagaatttagattgaggaggttagaatagaataaggtttagagatttagtttgtgtttgttagatagatagagagataaatagagagagagagatagatagatagatagatagatgaggtttagtaggttattttatttagttttttgtttttgtggttagaggtgaagtggttgtagtgatttgttgaggtaagtaagggtttgaatagggagggtagaggtttttgtttaggtttgggatgtagggagaaaggttgattataagttgagataagatatagaaataaataaaaatagtagaaattgttttaagagtggggaaggagaggggagaagagatttatttaggatggttagtttggtttttttgttgaatatttaatattgtgatataggtttatataaaaattttttttgggatgtttttagttttagtttttattgtagttgtgaaggaggaagttggggttagtggttttggtggtatttgtttatgagggagtttatatggtttttatatttaatttatagagagaggggattggtgatattttgtgatttatagtaggatttttggaaatttaggtttttggaggatattgggattttgaatttgttttttgtattaattattatttaggtttaggattgaatttattagagggtattagtgttgttaaggagtgaatttttatagatgggataggtggttttttttttgtaaagttgaattaatttatggtttaatttttggtaatattatggggtggtgtagagggtgtttttttttttttatgtagaggttgattgttttagagtgtagtgttttgggaatt

SEQ ID NO: 2736 - DNA, 2473 bp, Artificial Sequence
  chemically treated genomic DNA (Homo sapiens)
aaagtattaattaatgatagaataaggaaaatggtataattggtttaaaggagaatttaagtattatatatagatatgtaggtaaatataaatgttggtatttatttataagtagatatgaaattggttaataatttgaggataataattaattgtattttattggatataatttatttgtatttttatggtattaagtatttgtattattattggttttttttttaagttttgagagttaggaaatagtttaaagatgatgaaaggtatagatattttggagagttatgttagatagaatatttagtaatttttatagattttttggtttatattaatattttttataattttttttgatagtatagtgtagttattattattttagagaagaagtgaggggttatgttgtgttttttggatttttgttttttaatttgtaaaatgggtatgataagagtttttgataatttagagatatgaggttttgttgggataagtattgtgggaaatgtgaagtgttaagggatagtgttttaaattttagtgtggtttttttttttgatttagtttatatttttgttttattttggaagatttatttttttttttttatattaattttgatttgataatatttttgaaattagagaatgaggtgttgattttgtatgttttttttttttaatatatatgaatatagataaaaagttattgagataagaaaggtaagtttatttttgtattaattaatttagtgttttgtgggaagtataggattaggaagaaattaaatgatagtttataaatatatatatatatatatatatatatatatatatattttattaattattattattattattgttgttattattaatgtattttgtaaatttatatataatttgtaaatttttttttgaaataagagagagagggtaattgaaattatttaaggtagtatttggaatatgtaggttaaagattgagttagggagggattgttattatatgggttgtggggaggtagagtttttttgtgtttttgagagtatttttttttggggttttattagtttttaatttgttttttgaatttttatttttttttttgttttgtgtttttggaaatttagatagtggttttatttttgtgatttatttagtaggaatgtgggagtttttgaattgttttagttaaagttttttaatttttttttggtgatgaatgggtgaggtttttaaatgaaatgtggaggtttttagttttagtttgtggttttttttttttttggtgtaattatttttgtgtagaatatgttaagtgttttgttttttgggaatttgttttgtatgtaaatatttggtgattaagtgaggtttatttaattaagtattttgtaatgatttttaaattaaagaatagtggattaggagtttagtttgtgttggtgatgggaaaggtagttttatattataaggaggtagatagtgatttggtgtggggaggtggttgggttaagtggggtagagtaggtgttttgggaattttgttagaattatttatttatttatttaattaatttatttttggagtattttttggagttagagtagttggtgaataataataataataataatagggttaggtattgtgttaataagtttgttgaataataagagtgaggaggagttagagatagttattgagagttgattttattaggtatgaattgttagtagtagtgatggtaataataagtatttttattgtagtagtaaatttttgaataggattttgttgtggttttgtgtgttttgaaattgttgggtttttgttatggatttggtttttggaaatagtttttatttttgttgttgttttattgatttattggttttttatttattagtggtttattttttatatttgtgtaatgggtagttggatttagattttttttaagatgtttttgggttttaggagtttagggtgttttttttgtttttgggggttataggaatggtggtgttattttgggggttttagttgtaatattgtagaaggttttagagtttagttttatatagttttaggatagagtaagggtgatttttagtttagatttttataaattgtgggatttttattaggtagtttgttttttttgatggataagttttttattttttaattgaaataatttttttatttgtttttagggtttttgtaagggaattatatagatttatggatatagatgttttttgaaaattatttatttggtggtagaagttattatgttttaaatttggatttatgaatatattttaatgtatttatttgtttatttgttttggtttttttatttttattataatttggaaaagggttttaattgttttttaatttgggagattattttagaataaagggtttttatgtgattttagtgtttgagttgat

SEQ ID NO: 2737 - DNA, 2473 bp, Artificial Sequence
  chemically treated genomic DNA (Homo sapiens)
attaatttaggtattgaagttatatggaagttttttgttttaagatgattttttaggttagaaggtaattagaatttttttttgggttatggtagaaatgagaaaattaaagtaagtagataagtgaatatattggggtgtgtttgtgggtttaagtttgagatatgatggtttttgttattaggtagatggtttttaaagggtatttatgtttatgagtttgtgtgatttttttataggagttttggaagtagatggaagggttattttaattgagaggtgaaggatttgtttgttagagaggataagttatttggtgaaggttttataatttatgaaggtttgagttgagagttatttttgttttgttttggagttgtgtagggttgggttttgaagttttttgtaatattgtagttgaggtttttaaagtggtgttattatttttgtggtttttagaagtagaggagatattttaggtttttaagatttaaaagtattttagagaagatttagatttaattatttattatatagatgtgggaagtgagttattggtgggtgagaagttagtgagttagtaagatagtaataaagatgggggttgtttttaaaggttaagtttatggtagaaatttagtagttttagggtatgtagggttatagtaaaattttatttaaggatttgttgttgtaatgaaaatgtttattattgttgttattattattagtagtttatgtttagtagagttagtttttaataattatttttggtttttttttatttttgttatttagtagatttattagtatagtgtttggttttattattattattattattgtttattagttattttggttttaagaagtgttttaaaaataaattgattgaatgaatgaatgagtgattttagtagagtttttagagtgtttattttgttttgtttggtttggttgtttttttatattagattattgtttgtttttttgtgatatgaagttgttttttttattattagtatgaattggatttttaatttattgttttttggtttaagagttattataaagtgtttaattaagtaagttttgtttaattattaaatgtttgtatgtgaaataagtttttgggaagtagggtatttgatatgttttgtatagaaataattatgttgaggagggggagggttgtgggttgggattgggagtttttatattttatttgagggttttatttatttattattgaaggggaattaaaaggttttagttggagtaatttgagaatttttatatttttgttggatgaattatgggagtggggttgttgtttgggtttttaaaggtgtagagtaaggggagaggtgggaatttgagaggtgagttgggggttggtggggttttggggaggggtgtttttggggatataggggagttttgtttttttatagtttatgtgataataatttttttttggtttagtttttggtttgtgtgttttaagtgttgttttagatagttttaattgtttttttttttttattttaggaggaggtttgtaaattgtatatgaatttgtagaatatattggtggtggtggtggtggtggtggtggtggttagtggagtgtgtgtgtgtgtgtgtgtgtgtgtgtgtgtgtgtttgtaggttattatttaatttttttttaattttgtattttttatagagtattggattagttggtataagaatgaatttattttttttattttaatggttttttgtttatatttatatgtattagaaaaaaaaaatatatagaattagtattttattttttgattttaagggtattattaaattaaagttggtataaaggaaaaaaaataaattttttaaggtagaataaggatgtgaattaaattaggaaggagggttatattgaggtttgggatattgttttttagtattttatgttttttatggtatttgttttagtaggattttatgtttttggattgttaaaggtttttattatgtttattttgtagattaagaaatagaggtttaggaaatataatatagttttttattttttttttgggatggtggtggttgtattgtattgttagaaaaaattataaaagatgttgatatgggttaaaaaatttataaagattgttgaatgttttgtttagtataattttttaggatatttatgttttttattatttttgagttattttttaatttttgaagtttaagaaaaaaattaatagtaatataaatgtttggtgttatagaaatgtaaatgaattgtgtttagtggaatgtaattgattattatttttaagttattgattgattttgtatttatttgtaaatgaatgttagtatttgtgtttgtttgtatgtttatgtgtggtgtttaaatttttttttgaattagttgtgttattttttttgttttgttattaattaatgtttt

SEQ ID NO: 2738 - DNA, 2439 bp, Artificial Sequence
  chemically treated genomic DNA (Homo sapiens)
aggaggtggaggttgtagtgtgttgagattgtattattgtattttagtttggatattaagagtaaaatttagttttaaaaaggaaaaaaaaaaaaaaagaaaaaaggaaatagataaagatggtgatttttttggggaggtgatatatggttaagtattaaggatgagtaggttagatggaggagatagtggtggttttagatttttgtaagtattatgggaataagtatttagggtttatttgtattttttttttttggtatttagttaggtttttagtatgtagtaggtatatgggaaaatggtttattttgatttatttatttaatagttagtaggatgttttataagtatattagttatgttatttttagtttagattttgaatgatatgaggttttgatttattgggttttatgtgtttttttgattttatgttttgtttttttttttgttatttgtgttttagttatatttggttgtttgttttttaggttttaaatggttgttagggttttggtatttgttgtttttttgtttggagggttttttttttagatgtttatttaaaagttttttttttattaggttttttttgggttttttgaaattttaattttttttattattttagagtttttttgtttttttatttttgtatttattttaatatatggtatattttatttatttgttttggttgtttgtttagaatataattttatgaggataggtatgttttgtgttttgtttagttttgaaatggtagaatggtgtttagtttttagtatgtggttaataaataggtagtgattttatgagttaattaatgagtgaattaatgaatgattagtaaatgaatgaatgagtgaatgagtgagtgattagtaagagtgaattaatgagtgtgtagattgttgtgtgattaagtgggttagtgtgaaaggtggggggtagaggttgggtgagttttttgggatgtgggtagtaaggatagggttgtggtgtgaattaagatatggtgttttttgtttttgttttttttttgtagggagaggggttattttggttttgagtatttttaattttatgtgaattatgtggatgggtggatagttggagggttagtagtagtagtaggagtttttgtttatttgggggttttgagtgttggtatgatttgattttatggtgtgggtggggtttgggtttatttggaggagtaggatatgttgttggattatagttgggggtgttagatttaggttatgttatatttggtgttagagtttaagatttaggaatagaaattgtgtatggggttaagttggttgtagtttaatatttaggtgattttaggtttaaagtatgtttttggtttttgagatgggttttgtagttgtagtttatgttttggattttgttagttgggtttggtatatttttgttgtttgtttttgtttttaggtttattattttttgttttgttattagggagttatttttagttagtttgttattgtggttatttttttgttttaagtttttttatggtttttattgttaggattttttatgatttattttaggtaggaagtgaggagagaggagaggtgtagggtatggttgggtgtggtggtttatgtttgtaattttggtattttgggaggttgaggtgggtggattatgaagttaggagattaagattattttggttaatatggtgaaattttatttttattgaaaatataaaaattagttggtatgatggtgtatgtttgtagttttagttatttaggaggttgaggtagaagaattgtttgaatttgggaggtagaggttgtagtgagttgagattgtgttattgtattttagtttggtaatagagtgagattttgttttaaaaaaaaaaaaaaaaaattgagaggtgtagggtaatggagatagaaggttaaaggttgggttagatttttattagttaggtttttggtattagttttgtagattttaattaggggtattagtattaggggttaggtttaagggtttagaaaaggttttttaagttggtgttttttatttttatataaattgtatttttatttgtttttatagtaagggtgttatttttttagttttgtgtttagtttagtttagtttagtattggttaattatgatttaataaaatggagtttgtattgagttttttatttaggttgagtgttgatagagaggtttttagagtattagggttatgtttttggagattttgatgttttgatgggaatatagaggttttgagaggtaaaggtgttagaggtgtgtgagttagattaatattattttaaataggagttgagtaaaatgaggttgatatttattgggttgtatttttagatgggtaaggtattttaagttatagggtgagataggagttt

SEQ ID NO: 2739 - DNA, 2439 bp, Artificial Sequence
  chemically treated genomic DNA (Homo sapiens)
gaatttttattttattttgtgatttagaatgttttatttgtttgggaatgtagtttagtaggtgttagttttattttatttagtttttatttaagatggtgttggtttggtttatatgtttttgatatttttgttttttggggtttttgtgtttttgttaggatattggaatttttaagggtataattttggtgttttgggagtttttttgttagtatttagtttggatggagggtttagtgtggattttgttttgttgggttatggttggttagtgttaggttgagttgggttggatatagggttggaggggtagtgtttttattgtagggataggtgggggtgtaatttgtgtagggatgaaaagtattagtttggagggttttttttaggtttttgggtttagtttttgatgttgatgtttttagttggggtttgtagagttggtgttaagaatttggttggtaggggtttgatttagtttttggttttttgtttttattgttttgtattttttgattttttttttttttttttgagatggagttttgttttattgttaggttagagtgtagtggtatgattttagtttattgtaatttttgttttttgagtttaagtgatttttttgttttagttttttgagtagttgagattataggtgtgtattattatgttagttaatttttgtatttttagtagagatggggttttattgtgttggttaggatggttttaattttttgattttatgatttgtttattttagttttttaaagtgttgggattataggtgtgagttattgtgtttggttatgttttgtattttttttttttttttattttttgtttaagatgagttatggggaattttggtgatgggagttatggaagggtttagagtaggggagtggttatagtaataggttaattgggagtagttttttggtgatagggtgggaagtagtgagtttggaggtaggggtaggtagtaggggtgtgttaagtttagttgataaggtttaggatataggttgtaattgtgaggtttgttttgggggttaggagtatgttttgggtttgaggttatttggatattgggttgtggttaatttggttttatatatagtttttatttttgggttttgggttttgatattaaatatggtgtggtttgagtttggtatttttaattgtggtttgatgatatattttgtttttttaagtgggtttggattttgtttatattatggagttagattatgttagtatttggggtttttaagtgggtagaggtttttgttgttgttattggttttttaattgtttatttgtttgtgtggtttatatggggttaaaagtatttaggattaaaatagtttttttttttgtagaagaaagataggggtagggggtattatgttttggtttatattatagttttgtttttgttatttgtattttagggagtttatttggtttttgttttttattttttgtattggtttatttggttatatagtgatttatatatttattggtttatttttattggttatttatttgtttatttatttatttatttattgattatttattaatttatttattggttaatttatggaattattgtttatttattgattatatattaagagttggatattgttttattattttagagttgaataaaatataaaatatatttatttttatggggttatgttttagatagataattaaagtaaataagtaggatgtattgtgtgttagaataaatgtaaggatgaggaaatgagggggttttgaggtgatggggggagttggaattttagggggtttagggaggatttggtgggaaggggatttttgagtgggtatttgagagaagaattttttaagtagaagaatagtaggtgttaaggttttagtagttgtttgaggtttgaaaaataggtggttaggtgtggttggggtataggtggtggggagagaagtagaatgtgaggttagggggatatatggggtttagtggattagggttttatgttatttagggtttgagttgagaatgatgtggttgatatatttgtaaagtattttgttggttgttgagtgaatgggttagagtgagttatttttttatgtgtttgttgtgtgttgggaatttagttgggtgttggggagagaagatgtaggtgaattttagatgtttatttttatggtgtttgtagaggtttggagttattattgttttttttatttgatttgtttatttttggtgtttaattatgtgttatttttttaagggagttattatttttgtttgttttttttttttttttttttttttttttttttttgaaattgagttttgtttttgatgtttaggttggagtgtagtggtgtaattttggtgtattgtaatttttgtttttt

SEQ ID NO: 2740 - DNA, 2188 bp, Artificial Sequence
  chemically treated genomic DNA (Homo sapiens)
ttgtgaaaatgtttttgagagaggggaaggagttgggaggttttgatgtaaagatattgaagagtagttttggaagtttatagaaaatgtgagtttttagaaaataagaaggaaggttggtgtagagggtgggtttggggtattgtagtgggattggtttttggttggagggaatttgtggtagggaaggtaggggaggggaagatgtgagtgggtttgtatatgtattgttgtgagatgagagggtttgtattagttagggttttgtagagaaatagagttaataggatatatgtatataggaagagatttgtaaggagatattttgtgtaattttggaggttgagaagttttatgatttgttgtttgtaagttggatatttaggaatgttggtagtgtaagttttaagatttgagggttgggatttaatggagtggatgttagttagagtttgaatttttgagaattaggagtattaatggttagagggaatggatgtttgttttgggttaggtagagagaatttaaatgttttttatttttttgttttgttttggtttttatagattggatgaggtttatttattttggggaggggttagttgttgtgtttagtttgttattgtaaatatgaagtttttttagaaatgtttttatagatattttggaagttatgtatttattttgtaggtgttttggggtataggtaagtggatgagttagttattttttagagtttttgttgttttgtttgtttttttttggaaatgtgaagtgtggttttagttgaaagtgaggtgagtgtgagtgtggatatgtgttagtgtgtgtgtgtatgggaggagtgtgtgtgtgtttgatgatgatgatggagtttagtgagttattgtttgtggagtgttagagttttttaggatggttatgttgaaggtgtggaaggaggtggttggtttagtgttagatgtttttagtatttgtgggagtgaaatggaggttggtgggtggttgtgatgtgtttttttaagaatggattttgtaggttttttttttttttggtttttggtgttggaaggaggatattgtgagtgttgtttgtttgtttatagagagtgtgtagtagtagtagtagtagtttggggttagttttgggaggattaaggatattttagggttttaagttaggggatgatatagtgggtttaaatttaggaaaaaaaaaaaaatgtttttggtggtaaggatagggagagattgaataagtttggggtaagtggtaaaattagagaaagaaaattttttaggaggtttgagtttaggaaagtaattttaaggatttgagttgataaagttattttggaggtggaggtattaggtttagttggagagattgtgagggtgaagaatttataggattttttgtgaaagaaaagaaataagtttagttttgagtattttgtattttttatttggggggaaaaaggagttataaaaattgtaggtaggtgtgtattatgttttggtaatttttaaaggattgtttttaatatgataggtatataaaagattttaaaagtaattgttttatgtgtatattattgattgtttttggagttttatggtattaaggtagagttttgttattaattatagttttatggtagtagagttatgttggtaggtagttgagggaatgtgaggatattagaattggggtttataggaggtaaaaatttgtagttgtttgtaggaggttttaggttttttgtatttgtttttgttattttgtggattggggtagttagtatagtaaagagttggtttttggagtttatagtttgtagggagatagataggaaaatagatgatgagatgtttttttattatagtaggtattattttattatggtatggtaggaaaagtatttagatttgttggggtatttgttgaaatgaggtagagaagtttttttttgtatagttttttgagttttttttaggggaagtgatgaaggggtgatgttgttgttgtttagaaattttttgatagtttgtttggggtagaatgtggggatttgaagggtgtaagtgtgagtataattttttatggattgttgtgtgagatgatgagaaaggaatttatttatttttttggagggaggaggagatatgggggtagggggggagtta

SEQ ID NO: 2741 - DNA, 2188 bp, Artificial Sequence
  chemically treated genomic DNA (Homo sapiens)
tggttttttttttgtttttatgtttttttttttttttagaaagatgggtgagttttttttttattattttatataataatttatgaagaattgtgtttatgtttgtattttttagatttttatattttgttttaagtaggttgttaagaaatttttgagtaataataatgttatttttttgttattttttttggaaagaatttaggagattgtgtagaaggaaatttttttattttattttaatagatgttttagtaaatttaagtgttttttttgttgtgttgtggtaaaatagtgtttgttatgatgagagggtgttttattatttgtttttttgtttgtttttttgtaggttgtgggttttgggggttggttttttgttgtattggttgttttaatttataggataatagaggtgggtgtaggaagtttgaggttttttataagtagttgtaggtttttgttttttgtgaattttagttttgatgtttttatgtttttttagttatttgttggtgtaattttgttgttatggagttgtggttaatggtaaagttttgttttggtgttataaggttttaggagtagttgataatgtatatgtaaagtagttgtttttaaaattttttatgtgtttattatattaaaagtaattttttggaaattattaagatatgatgtatatttgtttgtaatttttatagtttttttttttttttaagtgaagaatgtaaaatatttaaaattgagtttgtttttttttttttataaaaggttttgtaggttttttgtttttataatttttttagttgggtttgatgtttttatttttaggatgattttgttagtttggatttttaaggttgtttttttgggtttagattttttggaaggttttttttttttgattttgttatttattttaaatttatttagtttttttttgtttttgttattagaagtattttttttttttttttgaatttaagtttattgtgttattttttggtttaaaattttgaaatatttttagtttttttaaagttggttttgggttgttgttgttgttgttgtatattttttgtaagtaaataagtaatatttgtggtgttttttttttggtattggagattgggaggaagaagaatttgtaggatttatttttaaagaaatatattataattatttattagtttttgttttatttttgtggatgttggaaatgtttgatgttgggttagttgtttttttttgtatttttggtgtggttattttaggaggttttgatattttatggatggtggtttattgggttttattattgttattaagtgtatatatattttttttatgtatatgtatattgatatatgtttatatttatgtttattttatttttagttgaggttatattttatgtttttgagagaaagtgggtgaggtagtaggagttttgagggataattggtttgtttgtttgtttgtgttttggggtatttatagagtgggtatgtgatttttggggtgtttgtgagggtgtttttggaagagttttgtgtttgtaatggtggattgaatatagtagttggtttttttttaaggtgggtgggttttgtttaatttgtggaagttggaataggataaaaaggtggagggtgtttggattttttttgtttgatttaaggtagatatttgttttttttggttgttggtatttttggtttttagggatttagattttgattggtgtttattttattggattttggtttttaggttttggaatttgtattgttagtatttttgggtgtttggtttgtggatagtagattgtgggattttttagtttttagaattgtatgaagtgtttttttatgaatttttttttatgtatgtgtattttattggttttgtttttttgtagaattttgattaatgtaaatttttttattttatagtagtgtatgtataaatttatttatattttttttttttttgttttttttattgtaagttttttttgattagaggttaattttgttgtggtgttttggatttattttttgtattagtttttttttttgttttttaaaagtttgtgttttttgtgggtttttaaggttgttttttagtatttttatgttagagttttttagttttttttttttttttaaaagtgtttttatag

SEQ ID NO: 2742 - DNA, 2449 bp, Artificial Sequence
  chemically treated genomic DNA (Homo sapiens)
gttttttttgttttttgagtaggggttgagggtgtgttgggagaggagggttggggttagggagggagtgggtatgtagattttagaagtttgggagttagtggttgggttttggattttgttatagtattgtggaggtttgagagggttaggttagtttttgagttttttggtttggaaagggtttttatgtgggtgggttaggaggtagagatggatattatgtttaggtttggttttatttatttttaatgttaggaggattgggggaggttattgagttttttagagttttagggatttttttgtgtttttttatattttggtttttaagggatttagaaagggaggtatagtttatgagttttattttattttattttatttattttttgagagggagttttgttttgttgtttaggttggagtgtaatggtataattttggtttagtgtaatttttattttttgggtttaagtgatttttttattttagttttttaagtagttggaattataggtgttagttattatgtttggttaatttttgtatttttagtagagttagggttttgttatgttggttaggttggtgttaaatttttgatttaggtgatttgtttgttttagatttttaaagtgttgggattataggtgtgagttattgtgtttagttatgagttttgttttatagatttgagagttgaggttttgagaagtaaggtttggttaggttttttggtttagggaggtttagggttaggttgtttttaaggttaggttataggattgtttggggtatagggtttgttgttgggttaatatttttttttttgtttgttagtattgagggggagtatgtgttagtggagggtgatgaggtgatttataagatgtgttttattttttttaagaattagaagttttaggttgtggaggtggtgtttatttagttggttttttatattttttatgagatgtggtttggttaggttgtgggtttttaggttgagtggtttataggttagttggttgggggttggggagttatatagggtgaatgggtagtagttggttttatgttttattgttttggttgatgagttttttggtggttttagtgtgtatgtttgtttgtttgtttgtgtttgtggttatgagtgtgtgtttttatttattttatgatttgtgattattgtgtaagttggttaggaggtaggtggagggtaaggttattagatttggttttgtgttgtttattgtttttttttttttttttttgttgtagatatgtaggatttgtttgtttttttgtttatttgtttttatggtgattgagttgtgagagtttgtgttgggtttattttttggtttttgtttttgagttgttttgtgttagtttttggtttggagttaggttttttgtgttatttatattttttttttttggttgaggttttttgttatagtttggattttttttttagaagtttggttgatgggtgtttttggggagttttttagtttttggtaggggaggaggattgatatggaggtatataggttttttattgttgaggttagtttttttttttgttttgtttttttagtgttatggagaggtaggaagaggggtttgagggtggaaggggtttggggtttttattttgttggttagttttttttttttagtttggtagtggtgttgggtttttttttttgggttgtattgagttgagtttaggggtttgtagagggtgggggtttatttttttagtttggttgtagattttttttattttgatttataagttttattgatgttttgggttatgtttggttgatggttgttgtggatgttgtgagggatggatatatgtttggggtatttatgaggagggtttttagtttgggagattggttttgtggtttttatgttaaattttttttttaaagttttaatagattagtggttgaggtgtggtttttattgtatttatttttgaagatgtgtggttgttgttgttatttggagtttttttggggttaagatgtgtgtgtatttggggttgtggttatttatttttaggtaggggtgagggtggtttggtttaggaggttaggaaggagggttttgtttgtttttatttttgggtgtattttttgtttattatttttttttttagagagtatattgtttgattggggagaagtggggttgtggtttgagggagggttggttaggggtgggatttttatgagatttagtttgtgagtaaaattgggggtttaaatgtttaggatgaggggattagtgattgtttaggaggattttttgttttgtaggtgttttaagattgtagggtagaaattagttgggatgtttgtattttatttttggttttagggtttattatataaaatttgggagtttagagttgttgaggtgt

SEQ ID NO: 2743 - DNA, 2449 bp, Artificial Sequence
  chemically treated genomic DNA (Homo sapiens)
atattttagtagttttgggtttttagattttatgtggtgggttttggggttgggggtgggatgtaggtattttggttgatttttattttgtggttttggggtatttataaggtaagggatttttttagatagttattgatttttttattttgggtatttgagtttttagttttatttatagattgagttttataagggttttatttttggttagtttttttttgaattatggttttatttttttttggttaggtgatgtgttttttagaagggagggtggtaggtagggggtgtatttagaggtggaggtagatagggtttttttttttggttttttgggttaggttatttttatttttgtttgggagtgaatggttatgattttgggtgtatatatattttggttttaaaaggattttaggtgatagtaatagttatatatttttagggatggatgtaataagagttatattttggttattggtttgttagggttttgggaagagagtttgatgtggaggttgtagggttagttttttaggttgggggttttttttgtgggtgttttggatgtgtgtttgttttttgtggtatttatagtagttgttagttgggtatggtttagagtattagtggggtttgtgagttagggtaaaggaggtttgtagttaagttggagagatggatttttattttttgtaaatttttgggtttggtttagtatagtttaggggaaggagtttagtgttattgttaggttgaggaggagggattggttggtgaaatgggagttttaaattttttttgtttttaggtttttttttttgtttttttatggtattgagagagtagagtaggaaggaaggttggttttggtagtgagaggtttgtgtgtttttgtgttagttttttttttttgttagaggttgagaggttttttaaaagtatttattggttaggtttttgagggaagggtttaggttgtggtgggggattttagttaagggagggagatgtaagtagtatagagagtttggttttgggttagggattgatatgggatagtttaggggtggaggttagggagtgagtttagtgtaggtttttgtagtttagttattgtggggatgggtaagtaggagggtgagtgggttttgtgtgtttgtggtagggaggggaggagagaggtagtggatagtgtgaagttaggtttggtggttttgttttttatttattttttggttagtttgtatagtagttatgggttgtggggtgggtggaggtatatgtttatagttataagtatagatggatagatagatgtgtatattgaggttattgaaggatttattagttagggtagtggggtatggagttggttgttgtttgtttattttgtgtggttttttaatttttggttagttggtttgtgaattatttagtttaggagtttatgatttggttagattatgttttgtggggagtgtggggggttagttgagtgagtattatttttatggtttggaatttttggtttttgggagggatagggtatattttgtaggttattttgttgttttttattggtatgtatttttttttgatgttggtgggtaggaagaggggtattagtttagtagtaggttttgtgttttagataattttgtggtttggttttgggggtagtttggttttaagtttttttaggttaggaggtttggttaggttttgttttttagaattttagtttttgaatttgtaaaatgggatttatggttgggtatagtggtttatgtttgtaattttagtattttgggagtttgaggtgggtggattatttgagttaggagtttgatattaatttggttaatatggtgaaattttggttttattaaaagtataaaaattagttaggtatggtggttggtatttgtaattttagttatttgggaggttgaggtgggagaattgtttgaatttaggaagtggaggttgtattgagttgagattgtgttattgtattttagtttgggtgatagagtgagatttttttttaaaaaataaataaaataaaataaaatgggatttataaattgtatttttttttttgggttttttggggattgagatgtgaaagggtatggggaggtttttaaagttttgagaagtttagtgattttttttggtttttttggtattagaagtgggtggggttaggtttagatatgatatttatttttattttttggtttatttatatgaaggttttttttaggttaagaggtttaggagttggtttagtttttttagatttttatgatgttgtaataggatttagggtttagttgttggtttttaggtttttggggtttgtgtgtttattttttttttggttttagttttttttttttaatgtatttttagtttttatttagaggatagaaaaggt

SEQ ID NO: 2744 - DNA, 2488 bp, Artificial Sequence
  chemically treated genomic DNA (Homo sapiens)
aattttagggaggtggggtggagatggtggtgaggaggaggttgtggtgtgggatgtatagagttgtggtttgggtggtgtttttttgtggtggtttggtttggttttggtttttgttggggtaatgttttttggggttgtgggatgagttaggtgagtgtggagatttttagtattttttgtttggtgtgtatggatgggggtggggaggtggggtgggaagtggtgtttttggtttttgttttttggggttgtgtgattttgggtggttttgtattttttttgggtttagagttttagtattggtagggtttgtggaggttgttttgagttttggttttgtaggtattggtttggagtgttggggaggttttttggaggaggtggggtttggttttggttttggattgttgagattggttatgttgtgttgtttggatgttgggtttttttatttatagttttgtgatttttatgagtttgattttttttgtgttttagtttttttatttataaaatggagataatgtttttgtgtgttgagtttgagtgtggttgtgttgttatattattgttgttgttatgttgttaatgatggtatagtttttatggaaggggggttaaggaaggtatggggatttttttgtaggatatggggtgggtattagttttaagttatgtatataatttattttgaggttaggatttgggttttttttgtgtttattgggggttttagttgttgtttttatttttttaggttttagttttttataatgggtgtgtttttttgtttgagagggaggttttagttaagttttagtttttattgtaaaaagttatatagtaaatatttaatggattttaaatttataaaaattattttatagagttttatgaggtagggaatgttattgtatttattttgtagatgaggaaatttggggtattgatattttttagagttaatatgtaaattaggtatttggtttgagtgatagattggtgtaggtggttagtagtttaatttgtattgagtgtttattgggtttttatagtgattttgaattgtgtttttgtttatagtgatttggttggtttgggtatggtagatttagtggtgggtattgtgggtttggtggttaagagtgtgtggttattttgttttagtgaggtttatgtggaggttatgaaggaggatttggttgagtggtttaatgttttgtatggtttgggttttttgggtggtggtgatggttttttgatagggttggttatgggtatgattttgtgttaatatgttaatgttgtgattgaggttgtttgtgtattggtagttgtttgtttggtttgaggtgtggttttttaggtgtatagtgtagtgtttggtttttttatggtgtgtgataatgtggttatttttattggttggtgttgtgtggagttgggtgtgttggaggtgtttatgtttgagattgaggatttggtgttgtgtaagaatgagaagagtgtggtgttgtgtttgttggaggtggtgtggtgtggggtatgtttgggtttgttggttttatgttttgtgtagtttgagtaggagattgagtgggagttgtgtgttgtatttttagtttttaatgtttttgttgttggggaggatattattgaaattgtttttgtattagggatttttgtttgtggtttttgtatgatatttagtgatttgtgtaattttgatgagttggtgagttttttagtattaggtgttagggatttgatagtatagttagtgtttgtaatttgtttttgaattttttagggtttattttgttatttgtagaatagtttgttttataaaaagagtgtatatgttgagtattaaattgaggaatgtatatttgattttaaggaaatgggtagtttatagagagggaggtgttggggagatgatgtagtttagttgggtttgggataggatgtgggtttttggtatgatttttttttattttgtgtgttaattgtgttttaattgagtttgtgtatttttttttttggggggttgtatgattggggtgttttttttgtgttttttttgtagttagttttaggtagatgtatttataattttatggaggtttgaggttgagtgggtgttgtgatgtttggttgagatgaggtatggaaaaatttgggtaaggtgtttggtatatagtaggtgttttagggggttttgtaggtttttttattttttaggtatttttgggaagtttagttgggttgttgttgttgttgggagtagggattttgtttggaattataggatttgttttattttaagtataggtgttgttgggttttgtttttaagtttttttttttttaggatttgggtggtttttgttatttttgagggttggattaagagttttttttttattagaaggttaggattataatgtgtttgtttgggaggtagatagtggatggtagtgggt

SEQ ID NO: 2745 - DNA, 2488 bp, Artificial Sequence
  chemically treated genomic DNA (Homo sapiens)
gtttattgttatttgttatttgttttttaggtaggtatattgtagttttgattttttgataagaaggaaatttttggtttagtttttaggggtggtaggggttatttagattttgggagaggagagatttgggggtagggtttagtaatgtttatgtttagagtagaatgaattttgtaattttaaataggatttttgtttttagtaatagtagtaatttagttaggttttttaggggtgtttggggagtggggagatttgtagagttttttggggtatttattgtgtgttaggtattttgtttaggtttttttatgttttgttttaattgagtattatagtatttgtttaattttgagtttttatgaggttgtgggtatatttgtttaagattgattgtagggagggtatagaggaggtgttttgattatgtggttttttagaagaaggaatgtataagtttagttgaggtatagttagtatataaagtgagggaagattgtgttaggagtttgtattttgttttaggtttggttgggttgtgttatttttttggtatttttttttttgtgggttatttatttttttggggttaggtatatattttttggtttggtgtttaatatgtgtattttttttgtggggtagattgttttgtagatagtagggtggattttgggaggtttagggatagattgtaggtattggttgtgttgttgggtttttggtatttggtgttgggggatttattagtttgttgaggttgtgtaggttgttgggtgttatgtgggggttgtgggtaggagtttttggtgtgggggtggttttagtggtgttttttttagtggtaggggtgttgggggttgggggtgtagtatgtagtttttgtttaattttttgtttaaattgtatgaggtgtggggttagtaggtttaggtgtgttttatgttgtgttatttttagtaggtatagtattatgttttttttgtttttgtgtagtattaggtttttagttttaaatatgagtatttttggtatatttagttttatgtggtattagttgatgaaggtggttatgttgttgtgtgttatgaaggagttaggtattatattgtgtgtttggaaggttatattttgggttgggtgggtggttgttaatgtatgggtagttttggttatggtgttggtatgttggtatagggttgtgtttgtggttagttttgttaggaagttattgttattatttgggagatttaggttgtataaggtattgagttatttggttaggtttttttttatggtttttatgtaggttttattggagtgaaatggttgtatgtttttggttgttgagtttgtgatgtttgttattgggtttgttatgtttggattggttgagttattgtgggtaggaatatagtttaggattgttgtggggatttagtaagtgtttagtataaattaagttgttggttatttgtattagtttgttatttaggttaaatgtttggtttatatgttggttttgggaaatgttggtgttttaagtttttttatttgtgaaatgggtatagtaatattttttgttttataggattttatgggataatttttataaatttagggtttattaagtgtttgttgtgtggttttttgtggtggaaattggggtttggttggggttttttttttaggtagggaggtgtgtttattgtgaagggttgggatttagagaagtgaagataatggttaaggtttttagtggatatgaaaggaatttaggttttgattttagagtgggttatgtgtatggtttagggttggtgtttattttatgttttgtgggaaggtttttgtgttttttttggttttttttttataagggttgtgttgttattaatgatatagtagtagtaatagtgtaatagtatgattgtgtttgggtttagtgtgtggaggtattatttttattttatagatgaggaaattgaggtgtagaaagggttgagtttgtgaaggttgtagagttgtgggtggaggagtttggtgtttaggtggtgtagtgtggttggttttggtgatttggggttagggttaggttttgttttttttaagaagtttttttagtgttttaggttggtgtttgtggggttaggatttagagtggtttttgtaggttttgttggtgttggggttttgggtttagagagggtgtggggttgtttaaggttatatagttttggggaatagaggttgaggatgttgttttttgttttgtttttttatttttgtttatgtgtattaggtagggagtgttgggggtttttgtgtttatttggtttattttgtggttttggggagtattgttttagtgggggttggagttgggttgggttgttgtagggaggtgttgtttgagttgtagttttatgtgttttgtgttgtggttttttttttgttgttgtttttgttttgtttttttggaatt

SEQ ID NO: 2746 - DNA, 2379 bp, Artificial Sequence
  chemically treated genomic DNA (Homo sapiens)
ggttatttgtttagttatggatttttgtgtttaattatgagtttttttatatattatttattttttatttatttgtttatattttattttttgtgtagttatgaatttatttagtatttttttattatttatatttttttaattatttattagtgtttgtttattatatttgtgtatttttttatgtttttaattatttagttagtgattttttttttgttatttaaggttatttatttgtatatatagatttttatttatttagatgtatattttttggtttatttatttgtttgtttattatttattaagtataggattatttatttatttgtgggttggtgtgggtagttattatttgttttgtttatgtatgtatttattttgtgttgttttttttttgtagtaggagtgggtattgtatattattttgtttatgaagttttgagggggtattgtttggttttagttagttttatttgttttgtttttttttgtaggatagtggtgtttgtttattttttttgttagttgttagttttgttgttttttgtattttttggtaattttattgtatgaaattttttaaatttttttttatgttaagtgttaaaatagtttagtttaagtgtttttaggatttttatggagtttgattgtaaagaggtgagtatatttaagtttttatttttagtttagttttttgtattagagttttagggttgattttgtagaggggaagtagtttttttttagaggtaggtatatagtaggtgtttaagtaataggatttttgttatttttatatttttggaagaatttgtttattttttattttttgtttgtttttaaggattgttattttgaatttggtaaggtggttttttttatttttattgaatgaatgaggaaattgaggtagggtgtgggggttgggaggagaggagtattgtttgaggtttttgggggaggttagggaaattttagtttggtaggtttttgggtttttggtttttagggttttttttttaatttatttttggtttttttaaggtttttatttatgtggatgagttttttagtttgttgtagagttagttgttttgggttttgggtattaatatttttattatgtttttagtggagaagtgtagtagtgtgtggttggtgttttttgagtgggagattagggtgtggatttttttggtgtttttgttgttgtttgggtgtttgttaaaggagttggagtgtgagttttgggtgttgttgttgtagagtgaggttgtgggtgggagagtgtggtggtatgtgggtaggaagttttttttggtgtttgtttttgattttttttgttgtagttttatttttgtgttttttttggtttttttgttgttttggggtgggggtatttataggttgatggtgtgtggggtagggagtgatggtttggttttagttgggatgtgggttttgtgttgggtttggtgttgtaggagttggagttgtgttggttgtggggggagttgaatttttttaggggttttgggggttgtgggggagatgggtaggggagggtggggtgggggggggggggggtggggttgtgttttagtttagtttttatttttagttttaggtgttggtgtaggggttttgggggtggagattgggttattatgggggtgtggagaatgtgttggggtggaagggtaggttgggggatgtagtgtagagtgggagtttggggggtaggaggttttaggttgggggtttgaggttttgggtttttgtggggggtggtgggggtgtgaatggtggtgggggtgtttagggttttattatgtttaggtaggtgggtgttaggtggtttgaggggtagggtggttttagtgtggggtttagtaggttgggggagtgggtgtgtgatgggttgtggttggttttagattgttttttttatagtagtatgtggttttggagtattttttgggtttggttgggtggggatatgggggttagttaggtttgggtggttttttgaattttggggatttaaaatgatatttttgatttgagagtttaggttttattagtttgggatgattggattttttagttggaaggagttagaagttagtttattgtttaatttgtattttttatttttggtaaaggtatttttattttttatgaagagttttttttgattttttgttttttgtgttaatgtgtgtgttttgagtggggttgtttttattgtttagttttaggggtaggggtggtatttaggtttggttatttaattattttatttttttttttgtagtgataggtttaggaatggtgtttagatagaaattatgattaaagaatttagtt

SEQ ID NO: 2747 - DNA, 2379 bp, Artificial Sequence
  chemically treated genomic DNA (Homo sapiens)
gattgggttttttggttgtagtttttatttaagtgttatttttgagtttattgttgtaggaaggaggatggggtgattgagtggttaggtttgggtgttatttttatttttgaagttgggtggtgaggatagttttgtttaaagtatatatattgatgtgggaagtggggggttagaggaagttttttgtggaaaatggaggtgtttttgttaaaagtagagggtgtgggttggatggtgagttggtttttggttttttttagttagaaaatttggttgttttgagttggtagggtttgagtttttaggttgagggtgttattttgggtttttaggatttagggagttgtttggatttggttgatttttgtgtttttgtttggttaggtttgggggatgttttagaattgtgtgttgttgtggaaggagtagtttgaggttagttgtagtttgttgtgtgtttatttttttggtttgttgggttttgtgttggggttgttttattttttgggttgtttgatgtttatttgtttggatatggtgaggttttgggtgtttttgttgttgtttgtgtttttgttgttttttgtgggggtttggggttttaggtttttagtttggagttttttgttttttaggtttttgttttatgttgtattttttggtttgtttttttgttttggtgtgttttttgtgtttttgtggtggtttggtttttgtttttagaatttttatgttgatgtttgggattgggggtgggggttggattagggtgtggttttgtttttttttttttttgttttatttttttttgtttattttttttgtagtttttgaggtttttgggagagtttagttttttttgtagttggtatggttttggtttttatggtattgagtttgatgtgaggtttgtgttttagttagagttagattgttgttttttgttttgtatgttgttggtttgtgagtgtttttgttttggggtggtaggagggttgggagaggtgtgggggtggggttgtagtaggagggattgagggtagatgttaggaagaattttttgtttatgtgttgttgtgtttttttgtttatagttttgttttatagtggtagtgtttaaagtttgtgttttaatttttttggtgagtgtttgggtggtggtgggggtgttaggagagtttgtgttttggttttttatttggagggtgttaattatatgttgttgtgtttttttgttggggatgtggtggaggtgttggtgtttgaggtttagaatggttggttttatggtaagttggagggtttgtttgtgtgagtgggagttttggaggggttgggggtgggttgagaagaaggttttgggggttgggaatttggggatttgttggattgaggtttttttggttttttttgggggttttggataatgtttttttttttttgatttttgtattttgttttagtttttttatttatttagtgggagtaggaagagttgttttattaagtttaggatgatggtttttgagagtgggtagaggatgggggatgggtaggtttttttaaaagtgtggaaatggtagaaattttattgtttgagtatttattgtgtgtttgtttttgggaggaggttgttttttttttgtagagttagttttggaattttgatgtagggggttgggttgggagtaggggtttaaatgtgtttatttttttgtggttaggttttgtggaaattttgaaagtatttaaattgggttgttttgatatttgatgtggaggaggatttggggagttttatatagtgaggttgttagaaagtgtggaggatagtagggttggtagttagtagagggaatggataggtattattgttttgtaggggaaaatggggtagatggggttggttggagttaggtagtgtttttttggggttttatgggtagggtagtgtatggtgtttatttttgttgtaggagagaagtagtgtaggatgaatgtgtgtatgggtagagtgggtggtggttgtttatattagtttatggatggatgagtggttttgtgtttaatggatggtggataggtgaatgggtggattaggggatgtgtgtttgggtaggtggaggtttgtgtgtgtaagtggatggttttaaatggtggggggggggttattgattgggtggttagggatatgggaggatgtgtagatgtggtggatagatattgatgggtgattggagaggtgtgagtggtgagggggtgttggatggatttgtggttatatgggggatggagtatagataggtgagtgggggataggtgatgtatggagggatttatagttaggtgtgaaggtttatagttgggtgggtgatt

SEQ ID NO: 2748 - DNA, 2385 bp, Artificial Sequence
  chemically treated genomic DNA (Homo sapiens)
tagggaagattttttgggatttaatggtttaggtagttgtgtttttattttttgtttgggtagggaaggatttattttagttataagtagtttggagatggatggtttggtagagaaggggaaattttagtattaatttagttttaggttttattttgtagttaggtttgttttgtttagagtttttgaggggtttagtttgattttgataggtagaagagattttattttaggtttagaagtgagggagtagagtaaagggtttttggtttattgtgtgattattatttgttgttttgtttagtgggatagggatgttttgtatttagtttttttattatttaggtggtttgggggtatttaaggttttgggtagtttttgagttgggtttaggttttatggtggttttagggtaggtagggtgagagttgatagggaatagatgagggaagagtattttatatatttgggggttttattataagatttttttagtgtttttttttttttttaggttttttatttttggttatttttttaggtgatgtttgaagtttaagggattgtgtttatttttaggttagtatagtttgtgaatgttgatgaaaattggggttttttatattttttttttttggttttattttttgttgggtgtgtttgaaattggatatatatatatatatagtatatatgtgtatatgtattagttttagagttttgggggttaaggagttaggtaggtgtttgttgtttattggtatgggtttagttggatttagtttggttttttgttttttgtttttattagtttttttttgtggttattagtttttttttttttgtaattgagggattagggttttaagtagttgggtttggtttaggtttggttttgttttttgggtttttttttgtttgagttgggtgatatttttgtttgtaaggatttagttgttttaagggttttgggaggggaggttaggggtagtttaggggattagtgattatagggtaatttgtagtatttgttgggggtttagtaggtaagatgttttttgtttgttgttgtttgttatggttgtttggtggttatggttgggggtgggtttgttatgttgggaattgtttagaggttgtggttagtttgaggttttttgttttggtgagttagtttttgagtgtagattgttgttgatgatttttgttttttggggtatttgtgtggttatgtgggttgggtaggattggtatttttttttttttattgttgttatggttaggggtgggtttattttttgaggttgtgtggagaggattttaggttgttgtatgtgagtagagtagttggtgtttggtttggatttttttgttatttggggtttggtgtgtttataggttggttttgtttgttagattttgtagatgttgttttggggtttttgtgtttgtatgtagggttgagttattagttgagtggagagtggggagggatataggtggggagtagggggaggtttttgggggaattagggaggaggggtaggatagaagagaaaggggatgaagggtaatagaggaaggagaatagtgtggggataggagaggggtagggattggggaagaggagatataaggtaggatagggtagggtagtttttggaattgtggggttgttatagggatattagtttgggggagtagttaattttaggtatttgatagggatttagtgggttttggttaaggtgatttggttaatggaattggggtttttttggtatttattataagtttaggtttgtttgtgggattttattttatttgtatttagttttttttgtatatatagttggttattatttaatgtaatttttttgatattttataggtagtagtgttggtttttagggtttaaatgaaatagattttataggtgtgttttttatataggattgagtatggaatgtgtttttttttgagtttttgatttttaagtttggattgatatgtttagggaggttgtaagggtgtgttttttggattatgggtagggggtattgtgtgtagttgttgaggtttaggatgtgtgggaaagggtttggagtggaggagaagaggtttgtaggggagtggatagtttagggttgggattagtattttaatatgtatgatttgtggaagatgaggttggttgtatatagaaggtgtttatttagtgtttgttagatgttagatgttggtgtaattattataggggttatatattttttgttaggattattagtaaggtagggttattgttttatattgtttttgtagagatggagattggggattaggagtttggttttattttggtttgtagttttgggggttgttgg

SEQ ID NO: 2749 - DNA, 2385 bp, Artificial Sequence
  chemically treated genomic DNA (Homo sapiens)
ttagtagtttttaaggttgtaggttagagtagggttaggtttttgatttttagtttttgtttttgtaagaatagtgtgggatggtggttttgttttgttggtggttttaatggagggtgtgtgatttttgtggtgattatgttagtatttggtatttgatgagtattgagtaagtattttttgtgtgtgattagttttattttttatggattatgtatattggggtgttggttttagttttggattgtttatttttttgtaggtttttttttttttattttaggtttttttttatatattttgagttttagtagttgtatatggtgttttttgtttatgatttaggggatatatttttgtagtttttttggatatgttagtttaggtttgggagttagagatttagggaggggtatattttatgtttagttttgtgtgagggatatgtttgtggggtttgttttatttggattttagagattaatattgttgtttgtgggatgttagagggattatattaggtggtggttagttgtgtatatagggagggttgggtataggtgggatgaggttttatgggtaggtttgggtttatggtgggtgttaggaaaattttagttttgttgattagattgttttggttaagatttattaggtttttgttagatgtttggggttagttgtttttttaggttggtatttttgtgatagttttatagttttaagggttgttttgttttgttttgttttgtgtttttttttttttagtttttgttttttttttgtttttatgttgtttttttttttttgttattttttatttttttttttttttgttttgttttttttttttgatttttttaggggtttttttttattttttatttgtgtttttttttattttttgtttggttggtggtttagttttgtgtgtagatataaaggttttggggtagtgtttgtagagtttggtgggtaaggttgatttgtaaatatgttgggttttagatggtagaggggtttgggttagatattggttgttttgtttatatgtagtagtttggggttttttttgtatagttttgggaggtgggtttgtttttggttatggtaatggtggggaggggagaatgttagttttgtttaatttatatggttgtatggatgttttaggaggtaagaattattggtgatagtttgtatttgggggttggtttgttagggtgaggggttttaggttggttgtagtttttgagtagtttttagtatgataagtttgtttttggttatggttattagatagttatgatagatagtagtaggtaggggatattttatttgttgagtttttagtaggtattgtaaattgttttgtagttattggttttttaggttgtttttggtttttttttttagggtttttgagatagttggatttttgtaaataggagtgttatttaatttaggtagaagggagtttaaaaaatagggttagatttggattaaatttagttgtttggagttttggttttttagttgtagaaagaaagaggttggtggttgtagaaagaggttggtaggggtaaggagtaggaggttgggttagatttagttgagtttgtgttaatgggtagtaagtatttgtttggttttttggtttttagagttttggggttggtgtatatatatgtgtgtgttgtgtgtgtgtgtgtgtttagttttaggtatgtttggtagagggtggagttagaagggagggatgtggggagttttaatttttattaatatttataaattgtattgatttgagggtggatatagttttttgagttttaggtattatttggggaggtggttaagggtggaagatttggaaggaaagagaaatgttgaggaagttttatggtggaatttttgggtgtgtggggtgttttttttttatttgttttttgttagtttttattttgtttgttttgagattgttatgagatttgggtttagtttaggggttgtttgaagttttgggtgtttttaggttatttggatggtgaggaggttgggtgtggggtatttttgttttattgggtagggtggtaggtagtggttatatagtaggttagggattttttgttttatttttttatttttgggtttggagtggggttttttttatttgttagggttaggttgagttttttgaggattttgggtagggtagatttggttgtaaggtggggtttggggttgggttggtgttggggtttttttttttttgttaaattatttatttttaggttgtttgtgattggagtgagtttttttttgtttaggtggggagtaaagatgtagttatttgggttgttaggttttggaggatttttttta

SEQ ID NO: 2750 - DNA, 2452 bp, Artificial Sequence
  chemically treated genomic DNA (Homo sapiens)
gagtggagttgggtgttttaggaggatgttagtttttattaggtttttataattgtattgagaggttagttttgtttagtttatagatagggatattgaggtttaggtaggggaggtttggggtaggtaggttgtgtggtattggtggggttaggtgggtgtgtttgattgggagttattgtttgtgttttggatttgagatagtaataataatgattattataattatgagagtggtattttttaggatttaggttatagttttagtgatgatgatagtatagtatgtggtaggaatgtggtaatatttttgggtttggtttaattttgggggtatagtagttttttttggtgttttttttattgtttgtttttttagtttgaggtgggttttggttgtatagaggtgagatttgggttgttagggtgaggggattagggtttgttatttgaggggagagaaggtttagtttagattttgttttagatttttagtgttgatgtttttgttgtattttttatatgggatttgttgagtagttattatgtgttggggttttgagttgggttgaggttttggttgggggagttgtatattattgtataattgataagggtagggagtttagtaggaggatggaggtttagatagtgaggttaggttggggattggtgggagggtttggttgggttgaatattggtggaagtgtgtgtgtgtgagtgtgtatgtgtgtgtgtttgtgtttgtgtgtgtagggggtagtgttgttttttgttgtgttgtgaattgagtgtgtaattgtgtaaggagggttaaggtgtttagagaggttttttatgtttgggaggaaaatttaggatttttatagtgtgaaggagatattgttaggtgatgaaggtattttgttgtaggtgtggtgtttttggggtgtttgttgggttatattgggttttgggtttttaggggttgttttgattatttttaggaggaaatgatgggtggagttttggggttattagagaagatatagtttagagaatttgagtaagaaattttatagtttgagtttagtagttattaagtggagggaaagttttgtttttttgtgaaattaaatgaaggtagttgagtattgtgattattgtattatttttgatgtttttgttggtttttaatttagttataaattttatgggtgggggatggtataatgttttatttgtttggttatgtgatttggtagtatttggattttgtttagttagttggtaggaaaattatattttttatgattgatggagtgtgtgtttgtggggattaagaggtgggggttgtgtggggttgagttattgttgttagggtttttaatattgttgtttagtggtggtttgggggttgttttggggtttttatttattaaatttaaggggtttttgagaggggaggttgtgttggtttttgttggggagttgaaggttttgaggttgggtttagtagttgtttagtttatttttttgttttagttttgggatttgttttttgtttattgtgggtttttttgttgtagtagttagggtgggagttaggggtagggaatttttgggtattgaggtagttttggtttttagtatagttgttttttgtttttattttttttggtattatttgattgttttgttttggtagtgttttggttttttgtttttgttttttttgtggtggtttttgatttattgtttgggttttattaagtttttttagaagtggttggttttattaggagattttaggagtttaggggatgtgggtgtgtttgtagttgttttttttttgttgtttttgtatagggagttttgaggagttggagaagttggatttatttgtaggagaaagagttggggtgggtaggggagaaaggtagagaagttatagaggttgggtttataggagatttttggaggtgaaagtagaagtgaagagagattttgaagagtagtggtatttagtaggaggtttttgagagggttgtgaggggaatagaagtttttttaggggttgatgagtgtttaagaatttttttggtttatattttttgtttggatattttttagtgtgtttgaggagggttgtagagggtgtttgtaatggttgtttgggtgttaagtggtgttttattgattgggatattatatggaggttgggttatttggggattagggatttagttgggttatagttagagttataatgttggagatgttttgggttatatagttgggaggattttggagtggtaggaaaggaggtttttttttgatttttaaatgaaatttttttttatgttggttttttaattggtaaaattgaagtttaaaaaggaagttttttatttagagttatgttgtgtgttaaagagtatagtgggagtgggatggtgtttgtgaatttag

SEQ ID NO: 2751 - DNA, 2452 bp, Artificial Sequence
  chemically treated genomic DNA (Homo sapiens)
ttggatttatgggtattgttttatttttgttgtgttttttgatatgtagtgtgattttgggtgaggagttttttttttgggttttagttttgttagttgaggaattaatgtgagaggggattttatttggagattagggaggagtttttttttttgttattttaaggtttttttagttgtgtgatttaggatatttttagtattatagttttgattgtaatttgattaggtttttggtttttgggtggtttagtttttatgtggtgttttagttaatgaaatattatttggtatttaaatagttattataaatgttttttgtggttttttttgggtatattggagaatgtttaggtaaggagtgtggattagggaggtttttgaatatttattagtttttggaaaggtttttgttttttttatagtttttttaggagttttttgttgagtgttgttgttttttaaaatttttttttatttttgtttttatttttagaagttttttatgagtttagtttttgtggtttttttgttttttttttttgtttattttagtttttttttttgtgaatgaatttagtttttttagttttttagggttttttgtgtaggggtagtaggaggaagatagttgtagatatatttatattttttgagtttttggagttttttaatgaggttagttatttttggggaggtttagtgggatttaagtagtgggttaaggattattgtaggggggatagagataggaggttaaggtattgttaggatagggtagttaggtgatgttaggggaggtggaggtaaggggtagttgtgttgggggttaggattgttttagtgtttaggagttttttgtttttggtttttattttggttgttgtagtgggagggtttatggtgggtggggagtagattttagagttggggtagaggagtaagttgggtgattgttgggtttagttttaaggtttttggttttttagtggaggttggtatagtttttttttttagaaattttttgggtttggtgggtgagggttttgaggtagtttttaggttattgttgaatagtagtattgaaggttttggtggtagtggtttagttttatatagtttttgttttttggtttttatagatatgtattttattaattataagaaatgtgatttttttgttagttggttgggtaaaatttaagtgttgttgaattgtgtggttaggtaggtggggtgttgtgttgttttttgtttgtgggatttataattgagttaggagttagtaggggtgttaggagtggtgtaatggttataatgtttagttgtttttgtttaattttatggagaagtggggttttttttttgtttagtagttattgaatttagattgtgaagttttttgtttagattttttggattgtgttttttttggtgattttaagattttatttgttatttttttttgaaagtagttaggataatttttgagggtttagagtttagtgtgatttagtaggtattttagggatattgtatttgtgataaagtgtttttgttatttaatggtgttttttttgtattgtggaggttttgggttttttttttaggtgtagagagtttttttaagtattttggttttttttgtatagttgtatatttagtttatagtgtggtaggaggtagtattattttttatatatatagatataaatatatatatatatatatttatatatatatatttttattagtatttagtttagttaggtttttttattaatttttgatttgattttattatttggatttttgtttttttgttggattttttatttttgttagttgtgtagtggtgtgtagtttttttgattagaattttagtttgatttagggttttagtatatagtagttgtttagtaaattttgtgtaagggatgtagtaggagtattagtattaggggtttgggatagggtttgggttgagttttttttttttttaggtggtgggttttggtttttttattttgatagtttaggttttatttttgtatagttagggtttattttaggttaaaggagtaagtagtggagggggtattgagggaagttgttgtgtttttagggttaagttaggtttgaggatgttgttatgtttttgttatatgttgtgttgttattattattgaggttgtggtttgggttttgggaggtgttgtttttatggttgtgatggttattattgttgttgttttaaatttggggtataggtagtggtttttagttagatatatttatttggttttgttagtgttgtataatttgtttgttttgagttttttttgtttgagttttagtgtttttatttgtaaattgggtagggttggttttttagtgtagttgtgaggatttgatgggggttgatatttttttgggatatttagttttattt

SEQ ID NO: 2752 - DNA, 2482 bp, Artificial Sequence; identical to SEQ ID NO: 2278
  chemically treated genomic DNA (Homo sapiens)

SEQ ID NO: 2753 - DNA, 2482 bp, Artificial Sequence; identical to SEQ ID NO: 2279
  chemically treated genomic DNA (Homo sapiens)

SEQ ID NO: 2754 - DNA, 2499 bp, Artificial Sequence
  chemically treated genomic DNA (Homo sapiens)
gggaggggtaaagtgagagttaaggattttgttttttttgggattttattttatttttaattatattataggagaggtggatgtttagggaggttagtgagttgtttaggggtttatatttttgagtggttgtaatagtattgaatatttatagaggtttatttattatattgagttgtttggtggtattgttattttttagtatttgtaaattatgttttaggttatatagtatttttatattttagttttatgagaaaggagggtatttttatgtaatagaggttgttggggttggtagaaagtaggaataggattagaatttaggatgagaattaaaggggtttagagattttgaattagagagattttgtttaagttttagttttgtttattatgttttttgaaattttaggtaagttattgttagaggttttagtttttttatttttagtggaattggtaaggtttttttttgtttttgtgaagtttaaaatggtatataggaaaggattaatagagatgaattattattattattattattatgttagttattatttttattattggatagtgtttagaagttgaatttttttgtaatttgagggtataatgaggttttttagagaattatttgtgggtgggggagggggaggtggaaatttgttgaaaattttgttgttatttgagatttagtgtatttttttaaaatgtgtgtgatgaggatgtttttttttttggtaggtgtttgtggtagtggagatattagtgtgttataagatttttttttttttttgtgagtggtggtttaggttggggagtagttttgttttttttgtttaatatgtgtttttttaatttttagtatttttgattgtgaggattaggttagtttatgggttggtagtttggtggtgtttgagaaatggtaggttgagaagaagaaagagttgatgaaggtgtagagtttgtttaagattttagttttttaggtgtgtaaggttatgattgagaagttggagaaggagggtgtggttgggtgagttgtagaagtgggttgggtagtggggggtggggtgtgataggtagtggggggtggggtttgatagttggtttggtagaggtgggaagattgtgtggttagatttgtggtgtaaaggtttgaaggttatggaaggtggggtttgggatttattgggtgggtttattgaggtatgttttttatagttgtgtgatttggttttgatattgtttttatagtagttttggtggattttgtgtagttgtgtagtgatttattagttttggggtttttaatgttaatagtattaagtagatgttgttggattggtgttgagttaagatttgtggttatgaggtgagttttgggaggttagggggtttggaggtttttttagattttagtttaatattttttttttagtagagtttttattatttagtatattttttgttattgtgtggttttatagggaatatggaaaggtttttggggtgaggaaattgaggtttaaagaggatataaggtaagttttagattttagaattagtgatgaagtaatagggttttttgggtggtgggtagggtttaaggttggattttatttttggagttttttttttgttgttttgtaggaggttttgagttaatttttttaaatgagggaaggagtgatgaggtatgattatagttttagttgggtggtgttgggttttttagtagttttgttttttgaaattgtaaatatgggagttgataggttgatttggaggaggtttatgttttaattatttatttattgtgtaagttatggggtttttttgtgtttagtgttttaggtttggaataatagaatgttgaggggtagatagtaggggggagttgtttttaggtttttgattagtttttttatggtttatagtatgttgatatttagaattttttttttagttggagtgatgggatggttttttgtgttttggtgtataattttttttttgaggtttttgattatgggtagtttagtttttagaattgatgttagaattttgaggtggtttttttatttgtggagtaagtgtgggttttggttttgttaatgttgttgtatatttggggttggatattgggattaggtttagttgttttgagaatttttggagtgggttagttatattgttagttagtggttgagatttttttttttagagagtttttgtttttttttatttttatttttttgttgttgagtgtgttaggtgtttgttggaatgaaggagttgtaggttggtttattagtttgggttaaagtttattaggtggttttgtttatattttttttattttttttttgtttttttttttttttttttttttttttttgttttgttttttttttattattattagagttttttgtttttatgggattttggttggagattttaaaaggaggtttttggtttgggtattgt

SEQ ID NO: 2755 - DNA, 2499 bp, Artificial Sequence
  chemically treated genomic DNA (Homo sapiens)
atggtgtttgggttaggagtttttttttggaatttttagttgggattttgtgggagtaggaagttttggtgatagtgggaggagagtaggatagagaaagggagagagagggagaagggggtagagggaggatggaggggatatggatagggttatttggtgggttttggtttgggttggtaggttggtttgtggtttttttgttttggtgggtatttggtatgtttagtagtgggggggtggggatggagaaggatggggattttttggggaagggggttttagttgttgattgataatgtggttggtttgttttaggggtttttagggtaattgggtttggttttgatgtttagttttagatgtgtagtaatattagtagggttagggtttatatttattttgtagatgagaaggttattttgaagttttggtgttggttttgagggttaagttgtttatagttgaaggttttagggaagaagttgtgtattagggtatagaaggttattttattattttagttggaggagaagttttggatgttgatgtgttataagttgtaggaggattggttaggaatttgggggtaatttttttttgttgtttattttttagtattttgttattttagatttagggtattgggtataaagaggttttgtagtttgtataatgagtgaatagttggaatatgagttttttttaagttagtttgttaatttttatatttgtaattttaagggatagagttattgagaggtttagtgttatttagttaaggttatggttatgttttattatttttttttttatttagagaaattgatttagggttttttatagagtaataaggaggggattttaagagtgggatttggttttgaattttgtttattatttaagaggttttgttattttattattgattttggaatttagggtttgttttgtgttttttttgagttttagtttttttattttaagagtttttttatgttttttgtgaggttatatagtggtaggaagtgtattgggtaataggagttttgttaagaaggaggtgttgagttggggtttggggaggtttttaggttttttggttttttggggtttattttgtagttgtgagttttggtttgatattagtttagtagtatttgtttgatgttgttggtgttggggattttgaagttggtggattgttgtatggttgtgtggggtttgttagggttgttgtaggggtggtgttaggattaggttatatgattataaggggtatgttttggtgggtttatttagtggattttaggttttgttttttatgatttttgggtttttgtattatagatttagttgtgtggtttttttgtttttgttgggttaattattaagttttgttttttattgtttattatgttttgttttttattgtttagtttatttttgtagtttatttggttgtgttttttttttttagttttttaattatggttttgtgtgtttgggaggttgaggttttgggtagattttgtgtttttattagtttttttttttttttggtttgttgttttttgagtgttgttaggttgttggtttgtgggttggtttggtttttgtggttgaagatgttaggggttggggaggtgtatgttaggtagggagagtagggttgttttttagtttggattattatttgtgaggaggagggggggttttgtagtatattagtatttttattgttataaatgtttgttagggagggaggtgtttttattatatgtattttagaggagtatattgagttttaaatgatagtaaggtttttaataggtttttgttttttttttttttatttatgagtagttttttgagaagttttattgtatttttaagttataggggagtttagtttttgggtattatttgataataaaaatgatgattagtataataatagtaataataataatttatttttgttgatttttttttgtgtgttattttaaattttataagagtagggaggggttttattaattttattaaaggtgaggaaattgagatttttggtagtaatttgtttaagattttagaggatgtgatgggtggaattagaatttgaataaggtttttttgatttagagtttttggatttttttggtttttattttggattttgattttgtttttgttttttgttagttttaatagtttttgttatatgggggtattttttttttttatggggttaaggtataaaggtgttgtgtgatttgggatatggtttgtagatattgggaagtggtagtgttattaggtagtttagtgtggtaggtaggtttttgtaagtgtttaatgttattgtagttatttagagatgtgagtttttaagtaatttattggtttttttgagtatttattttttttgtggtgtggttgagaataaaatgagattttaaggagagtaggatttttaatttttattttgtttttttt

SEQ ID NO: 2756 - DNA, 2397 bp, Artificial Sequence
  chemically treated genomic DNA (Homo sapiens)
gggaggtagaggtggaggtggagttaagagtgtattgttgtgtttgttgtgttgggtttgagttggagttgggtgtgagttgtagtaggagttgtagttggagttatagttgtagttagagttgtagttaaagttttagagagtaggagttggagtgtaggttttgttggatttgtgtttagtttgttgttaggtattggttggaggatgggttgtggtgttagtttattgtttgggtgttgtgggaggtagtgagtttgtgattttttgggttgggtattgttaggtgtggagtttagattgtttttttgttaggtttggttatggttagagtatgtaggagtttttagggtttggatttgtgtgtattttaatgatttggggattgaagagaaaaaaggaatgaggattttatttaaaagtataatgtgggtattaggtgaggaggaaagtggagattatttggtatggggtagaggtgtttggagtttatgtttgagtattggagattttggtattttagtagttgtgattttggttttgttttgtttgagttggaaatatagtttagtttttagatattgttggtataggtttggtataagtaagtagtgtttttatttgtttgaaatgggatatggggttggaggaattaggatttagtttggttttaagtggaattttttggtggtttagaggttgttattggggagtttgttttttgttttagttttattggtgtggatgtgttgttgtttgttggagtattatgatggtaggatgattttagttgaagtaggagtagtagttggtggtgtttaggtggttgggttttttgagtggttttttggtagtttttaggttttttggtagtttggttgggtttgagtggttatggtagtattggtgtggttgttggtgggagttagtatgttaagttttaataagtggatttttatagtgtatggttttgggtggtttttgttgttgttggttttgtatatgttggtggtagttttggtatgttattggggggtatggtgttttatgttaggtggtatttgttgttgagttttattgtttagttttatttttggtatgtttatggtttgtggtaatgtgggtttaagggttgtgtttttggatttggtataattggttattattattatatttttgtttattttggttttgttggtgttgttgttgggttgttgttattatttattttagttggttgttatgggtttgttttgtttgggggttgtttgtagtttggttggagagttttggatattttttattggttgtggttttttgtttgtagttatttgtttttgtggatttaagttggtttagtaaagtaagtgtttgggtggttaattgagaaggtgggggtttgggtgggtgtatggtttggatggttttgtgaggggtatggttgttgttttattttataaatgaggaaattgaggtttatggttgtggaggaagtagaattgaggtttagagagggttaatagtttagtgagttttaggttttagatttaggttttggaggtttaatttgtgtttatttgtttatttatttatttagatagggtttggttttgttatttaggttgtattggtgagattttagtttaatatagtttttgtattttgggtttaagtgatttttttgttttagttttttaagtaagtgggattataggtgtatattattatgttaagttaatttttgtatttttagtagagatagtattttattatgttggttaggttgattttgaatttttgattttttaaggtgttaggattttaagtgtgagttattttatttggttagttaattttttttttttatagatatagagttttgttatgttgttaaggtaggttttgaatttttgtttttagtgattttttttttttagttttttgaagttttggaattataaattagtatttagtgatagttagtgatttgtgtttgattagttttttattttattgtattgtttttatttgatagatgaagaggtttgttttgggttatgtggttagtgagtagtagaggtaagatttaaatttagatagttagattttatgtttttaagagatgtggtttgaggttttggatataaaggaaagttagaaagtatgggttagggagagaaaaggagggtttgggatgagttgggatttggaaggttaggggttaggtttaagtttggggagggttgttgtttattgggagttatagtgtgataggtttggtgttgagtgttgattttgagttgttatggtaattattaattttatttttattttatagatgatgggattaagatttagagaagtttatgatttgataggttgggtatggtattttat

SEQ ID NO: 2757 - DNA, 2397 bp, Artificial Sequence
  chemically treated genomic DNA (Homo sapiens)
atgagatattatgtttagtttgttaaattatgaatttttttgggttttagttttattatttgtaaaatggggataaagttggtggttgttatgataatttaaggttaatatttagtattaagtttgttatattgtagtttttagtaaataatagttttttttagatttagatttgatttttgattttttaaattttagtttattttagattttttttttttttttttggtttatgttttttggtttttttttgtgtttaaagttttaggttatattttttggaagtatggagtttgattatttgggtttagattttgtttttgttgtttattggttatgtggtttagggtaagtttttttatttattaaatgggaataatatagtgagataaaaggttagttaaatatagattattggttattattaaatattggtttgtaattttagaattttaggaagttgaggggggaagattgttgaggataggagtttaagatttattttggtaatatagtaagattttgtgtttataaaaaaaaaaaattagttgattaggtggggtggtttatgtttgaaattttagtattttgggaggttaggagtttaagattagtttggttaatatggtaaaatgttgtttttattaaaaatataaaaattagtttagtgtggtggtgtgtatttgtagttttatttatttgggaggttgaggtagaagaattatttgaatttaggatgtggaggttgtattgagttgagattttattaatgtagtttgggtgatagagttagattttgtttaaataagtaaataaataaataaatatgagttgggtttttagagtttgagtttggggtttggaatttattgaattgttggttttttttgagttttagttttgttttttttatagttatgaattttagtttttttatttgtaaaatgggataatagttatattttttatagggttatttaggttatgtatttatttggatttttatttttttaattggttatttaggtatttattttgttgaattgatttgagtttgtggaggtaggtggttgtgagtaggaagttatagttggtagggggtgtttggaattttttagttaggttgtaggtggtttttaggtagagtggatttatggtggttaattgaagtgggtggtggtggtggtttagtagtagtgttgatagggttagggtgaatagaggtgtggtggtagtaattagttgtgttaggtttaggggtatagtttttaggtttatgttgttgtaggttatggatgtgttaaaggtgagattgagtagtaggatttggtagtgagtgttgtttggtatggggtgttgtgttttttggtggtatgttagggttgttattagtatgtgtagggttgatagtagtaggggttgtttaaagttgtgtattgtgaagatttatttgttgaggtttgatatgttggtttttgttagtagttatattagtgttgttatggttatttgggtttggttaggttgttggagggtttgagggttgttagggggttatttggggggtttagttgtttgagtattattagttgttgtttttattttggttgaggttattttgttattatggtgttttggtgggtagtggtatatttgtattagtgaggttagggtaggaggtgggttttttagtgatgatttttgggttattagagagttttgtttggggttaggttagattttggtttttttgattttgtgttttgttttagataggtgaggatattgtttatttgtgttaggtttgtgttagtgatgtttagaagttaagttgtgtttttagtttagatagggtagagttaaggttgtggttgttaggatgttagggtttttgatgtttaagtgtgggttttaggtatttttgttttgtgttaggtggtttttatttttttttttgtttagtgtttatgttatgtttttagatgaaatttttgttttttttttttttttagtttttaggttattagggtgtgtgtagatttagattttgggaatttttgtgtgttttggttgtgattaggtttggtaggggggtgatttgggttttgtgtttggtggtgtttggtttggggggttgtgggtttgttgttttttatagtgtttgggtagtgagttgatattatggtttgttttttggttggtgtttggtggtgagttaggtgtggatttagtagggtttgtgttttaatttttgttttttgaggttttggttgtggttttggttgtggttgtgattttggttgtggtttttgttgtgatttatgtttggttttagtttaggtttggtatggtgggtgtggtggtgtgtttttgattttgtttttgtttttgtttttt

SEQ ID NO: 2758 - DNA, 2353 bp, Artificial Sequence
  chemically treated genomic DNA (Homo sapiens)
agtaggtgtttggggtgagtgatatgataatatatggtattggtagataaagtagttgtgttagtttttgagtttttgggattttgttagatgggttgaggttgtagttttatattttaattttagtagttttaagtttgggttagggtattttgagtgggtttggttggggtggggatggggtttgagggtttaggtgtattaggtttttgttgttagttgtttaagtagataaagaggatgtttttatttgtgttatagttggttttggtttttttaaagttattgatgttggtgttgtatatttttgttgggggtggggaaggtagaatggggttagtgggttgtgagagagtatttatattattgatatagtgtttaggggagttgagtgaggtttgttttttatttatatggttattttttttaatttaagttttttatttttaggaagttttttttgtttattttggtttttatgaggtttttttgatttttttttagtaaagtagttggagaaaggtttagagaggggtagaaatgtgttttaggttatatagatggggtaagtttatgtggttagggtgtttaggggttgtttatgtgaatttagtttatgagagttagggtagtttttttttgtgtttggagggtagtaggtaggttaggatgggtttagagtaggggttgggtttggttgggtttttttttttgaggaatgtgttggttattttggtggttgggggaggggtgtagtttgggtagtatgaaagggtaaggtagggatttgggtagtggtgtggggtttgtggtgtgagagggaggggtggttagggtgtagaggaggttggtatagtttgtggtaggtttgtttgtatggtttgaggggtggttatagtgataagagtttaggaggagtaggggttttggggaaaaggtagggagggaggttttggttatattagattgaatgggtgggaattgtgggtattgggtatatagaatagtgaatgtggattattttgttttatttattttatttagtatttatggttggtataggttgggttgttgtagaagatgtagttagtggtttggttgtagttatgtagtatgatgaagtggttttggtagttaggagtgtggtagaagtagtggtggttattgggggtgaagtagtagtatttgatagggttggagtataggttatagtgtagtatttttgagtttattagtatgatggttatatggttttgagttaggtgtgtttggatgttttttatatttattgtgttgtgggtgggaggggggttagttggtgttgttgggtttttattttttattttttaaatggatttttgtttgtgtttgtttttttgttataaagtttggggattggttttttttttttttgttttgaattttttgttttgttattgtggtttaggtttagtttagagttaagtaggagattggtggggggggtgtgtgtgtgtgtttgaatgtgtataaagatgagttggttttgttaggttttttatggggagagtatttagttttaggtgggtttagttaagggttattagagtagtatatagaaattatttttttattgtattttagtttggttagtgaattttttttgtttagttttgttttttttttattttaaattatgtgtggtttatattgaaaattgttagttaagtatggtttagatatttttaaaattaaatgtttttttgaaagagttattttattttttttttaaggtttttggtggtagaaggggttgtttaggaagggttgggttatattgtttttaggggagttttagtttagtaatgatatttatttggagttttttttattggtagaaggtattgttttattttgtgttttttattaggtagtaaatttaaatgaaaatttagagtagggttgggtatagtggtttatatttgtaattttagtgttttgggaggttaaagtggaaggattgtttgagattaggaattagagattagtttgggtaatatagtagtattttgtttttataaaaatatttaaaaatttattaggtgtggggtgtggtggtatgagattgtggttttagttatttgggagattgaggtaagaagattatttaagtttggggttgtagtagtgagttgtattgtaatattgtgttatagtattatagtttgtatgatagattaagattttgttttttaaaaaaaaaaaaaagaaaagaaaagaaaatatttagagggatagagggtagatggggttgtgggtagggggagttttaggttaggggtttttgtatttttgttggaggggttgtttattt

SEQ ID NO: 2759 - DNA, 2353 bp, Artificial Sequence
  chemically treated genomic DNA (Homo sapiens)
gggtgagtagtttttttagtaaagatgtaggagtttttggtttagagttttttttgtttatagttttatttgttttttgtttttttgggtgtttttttttttttttttttttttttttttaagagatagggttttaatttgttatataggttgtagtgttgtggtgtaatattgtaatatagtttattgttatagttttaggtttaagtgatttttttgttttagttttttgagtagttggaattataattttatattattatgttttatgtttggtaaatttttaaatgtttttgtaaagatagggtattgttgtgttgtttaggttggtttttaatttttagttttaagtgatttttttgttttggttttttaaagtattgggattataggtgtgagttattgtgtttagttttgttttaggtttttatttggatttgttgtttagtggaaggtataggatggggtagtgttttttgttagtgagggaggttttaggtagatgttattgttgaattggagtttttttggaagtaatgtggtttagttttttttgggtagttttttttgttattaggagttttagaaaaaaagtaaaatagtttttttagagaagtatttggttttgaaagtgtttgagttatgtttggttggtagtttttaatgtaaattatatatgatttagggtagaggagagatagggttgggtaaaaagaatttattaattaggttggggtgtagtaggaggatggtttttgtgtgttgttttagtggtttttgattggatttatttggagttgaatgttttttttgtgaagggtttgatagagttagtttatttttgtgtatatttagatatatatatatattttttttattggttttttgtttggttttaggttgagtttgggttatagtgatagagtagggagtttagggtaaagggaaaaggagttgatttttaagttttgtaatagagaaataggtataagtagggatttatttgagggatggggaatgggggtttagtagtattagttgattttttttttgtttatagtatagtgagtgtgaaggatatttaggtgtatttggtttagggttatgtggttattgtgttggtgaatttgggggtgttgtattgtgatttgtgttttagttttgttaagtattgttgttttatttttagtggttattattgtttttgttgtatttttgattattagggttattttattgtgttgtgtggttataattgggttattggttgtattttttataataatttagtttatgttgattgtgagtgttgggtggggtgggtgaggtagagtggtttatatttattgttttgtatgtttagtgtttatagtttttatttatttaatttagtgtggttagggtttttttttttattttttttttaaagtttttgttttttttgggtttttgttattgtggttattttttaggttatgtaggtaaatttgttgtaaattgtgttagttttttttatattttggttattttttttttttatattataggttttatgttattgtttaggtttttgttttatttttttatgttgtttaggttgtattttttttttaattattaggatggttggtatattttttagaaagaaaagtttggttagatttagtttttgttttagatttattttggtttgtttattgttttttgggtatagggaagggttgttttgatttttatagattggatttatatagatagtttttggatgttttgattatatagatttattttgtttatgtggtttggagtatgtttttgtttttttttgggtttttttttaattgttttattggggaggagttagagaaattttatgaagattaggatgggtaaggagggttttttgggggtggaggatttgagttgagaggaatggttatgtggatgggaaatagattttatttagtttttttgggtattgtgttggtggtgtaggtgtttttttataatttattgattttgttttgttttttttatttttagtaggaatgtgtagtattagtattagtaattttgaggaggttagaattagttatggtatagatgaggatattttttttgtttatttggatagttgatagtaggagtttggtgtgtttaggtttttggattttatttttattttagttgggtttgtttaggatgttttggtttaggtttggggttgttggggttggaatgtggaattgtagttttagtttatttggtagagttttaggaatttggagattggtatagttgttttgtttgttagtgttgtgtgttgttatgttatttattttaagtatttgtt

SEQ ID NO: 2760 - DNA, 2483 bp, Artificial Sequence
  chemically treated genomic DNA (Homo sapiens)
taggttttttatgtggttgttggttagaagtatatttgataaggtgttttggttgttttggttgtttttatatgaagtttgtttagttaaggtatttttaggggtttaatgagaagggaattgtggttgggtgattttgaaggtgatgggaaagatgttgttttttatttataaagttgttagggttagttggggaaaagtagaggaaagggaaattataagaaagtagatttaaagaaatagaatttgaaagagttttttaggttgttgtttagaatatttggaattaagttaatgggtatggagggagagtagttgttaagttattttttggtatgagttttgagagttgtttgagggagttggagtagatgttgtgggattttttttttgagttattgtagtttttttttggagttggtttggggtggtggtttaaatatggaaatgtggtttgaattttttttttagtaattgttgttgggttttagtttttttttgtgaggtgggtagttgagtgaaatgaaattataatatttaattataatattgtgagtgttagatattgtgttgagttttgtatgtggatttttttaatttttaaaataattttagaggtggtaatgattgtatttattttatagatagaataattggttagagagggtgtgtgtgtgttatttaaggttatggagttagtaagggtattgggtgagaatttgaatttagagttattggttttttaattatagtgtttttttgttgagtagggataagtatttatttttttagttttttttgtagttagggagttagaatattttgggattggaaattgttgtttggatgattttagttagttattttgttttgtagatggggaaagtgagaattagagaaggttggtgattggtttaaggttatgttgtgttttatattttttttttatttttggatgtttagttttttaatagttttagtatagagttggggaaaaatttttagagatatttttttgggaagatagttggaaggtagggttgagttggggttatttgtgatttagtggtgaggtgatgaggtattgatgaaagtattgtattttttttttttgagaaatgttttggtattagatgagttttgggggagggaggagaggaatttggtagggatttggttataagttatttggagggtggtgtgaggattggaaaagttgttgtttgttttgtttggttttattttttgaatgaggttattgaatgtgtatgggaggtttagtgttgttttattttagtttgatggagaaattttatttgaaattttaaagtagggtagggatatttttattagatatttttgtagtttttgttttgtgggatgaagtaagggatgatgatatatttgtttgtttatttggaagtgagttttaggttattgtattagaagggtgataatttaatataagttattgttaagtaatttttgtgtgtttagtatttatatttttttgttttattttgattattatattgtataggagttattatttttattttttgtttttatttatagatgaggatattgagatttagagagttttttgttttgttttgttttttgagatggagttttgttttgttatttaggttggagtgtaatggtatgattttagtttattgtaatttttgttttttgggtttaagagatttttttgttttagttttttgagtagttgggattataggtatttgttattatatttagttaattttgtattagagatggggttttattatgttggttaggttggtttttaatttttgattttgtgatttatttgttttagttttttaaagtgttgggattataggtatgagttattgtgtttggtttgttttattttttgttttgtttgtttgttttgttttgtttttagagatagggtttggttttgttttttaggttagggtgtagtggtgtgattatagtttattgtagttttaaatttttgggtttaagtaatttttttgttttagtttattaggaattggaattataaatgtatgttattatttttagttaatattttttttttttggaaaaatgaagttttattatgttgtttaggttggttttaaatttttgggtttaagtgatttttttgtagtgttgggattataggtatgagttattttgtttggttaattttagagagttttgatgaagttataaaattttgattatggagttagaatttaaatttaggtatgtgaggtttgagtttaggtttttattagggttattgtgttgtaattgttattattttttggtattttaagtgatatttgagtattatttaagggaaatggtttatattttggtaatttttttatttgttttatttttttttttgaattagggattttggtagagatagagttttagtagtttttatttgtttttttgtgttggttttgttt

SEQ ID NO: 2761 - DNA, 2483 bp, Artificial Sequence
  chemically treated genomic DNA (Homo sapiens)
gagtaaggttgatatgaggggatgggtggaggttgttggggttttgtttttgttgaagtttttaatttagagaagaaagtggggtgggtgggggaattgttgggatatgggttattttttttgaatgatgtttgggtgttatttgaggtgttaggaagtggtggtagttgtagtatagtggttttggtggaagtttgggtttagattttatatatttagatttgagttttggttttatggttagaattttgtaattttattaaaattttttgagattggttgggtagagtggtttatgtttgtaattttagtattgtaggaggattatttgagtttaggagtttgagattagtttgggtaatatagtgagattttatttttttaaaaaggaaaaatattagttggggatggtggtatgtatttgtagttttagtttttggtaggttgaggtgagaggattgtttgagtttaggagtttgaggttatagtgagttatggttgtattattgtattttaatttggaaaataaagttagattttatttttgaaaataaaataaaataaataaataaaataaaaaataaaataggttaggtgtggtggtttatgtttgtaattttagtattttgggaggttgaggtaggtggattatgaggttaggagttggagattagtttggttaatatggtgaaattttatttttaatataaaattagttgggtgtggtggtaggtgtttgtagttttagttatttaggaggttgaggtaagggaattttttgaatttaggaggtagaggttgtagtgagttgagattgtgttattgtattttagtttgggtgatagagtaagattttattttaaaaaataaaataaaataaaaaattttttgggttttggtgtttttatttgtaaatggaggtggggggtgagaataatggtttttgtgtagtgtagtggttagaatgaagtaagaaaatgtgaatattgagtatgtgagagttgtttagtaatgatttgtgttaggttgttatttttttgatgtaatgatttgagatttatttttgggtgggtaggtgagtgtgttattattttttgttttgttttataggataaaggttgtaaaagtatttggtgggaatgtttttgttttgttttgggattttgggtaggatttttttattaggttggagtggggtagtgttgagttttttgtgtatatttagtgattttatttaggggatgagattaaatagaatgggtagtggtttttttggtttttatgttattttttagatggtttataattagatttttgttaaatttttttttttttttttttaagatttatttgatgttaaagtgttttttaaaagggggaaatatagtatttttgttagtattttattattttattgttgggttataaatgattttggtttagttttgttttttagttgtttttttaaggggatgtttttgaagatttttttttagttttgtgttggggttgttggggagttggatgtttgggaatgagaggaggatatgggatataatgtgattttgggttagttattggttttttttggtttttattttttttgtttgtgaaatgaggtagttggttgaggttatttaggtagtagtttttggttttagggtgttttggttttttgattgtagggagagttgggaagatgagtatttgtttttgtttagtaggagagtgttgtggttaggaagttagtggttttgggtttaaatttttatttggtgtttttgttggttttgtgattttaggtaatatatatatattttttttgattagttattttatttgtaaagtgggtgtaattattgttatttttggagttgttttaaggattaagaggatttatatgtagaatttagtgtagtgtttgatatttgtaatattataattaaatattataattttattttgtttaattgtttgttttatagagagaaattgaggtttagtagtggttgttgggaagaggatttagattatatttttatgtttgagttgttattttgggttggttttaggaggaagttgtaataatttaggggaaaagttttatggtgtttgttttagtttttttaggtggtttttagagtttgtgttaagagatggtttggtagttgttttttttttatgtttattagtttagttttagatgttttaggtagtagtttggggagtttttttaggttttgtttttttggatttatttttttgtagttttttttttttttgtttttttttaattggttttggtagttttataaatgaaaaataatgttttttttattatttttgaaattatttaattatagttttttttttattagatttttggaaatgttttggttagatagattttatgtagggatggttaggatagttgggatattttattaaatgtgtttttgattagtaattatatgaaaggttta

SEQ ID NO: 2762 - DNA, 2498 bp, Artificial Sequence
  chemically treated genomic DNA (Homo sapiens)
aattgttttttttattggttaggaaaagaatattttatagggaatttgataggttaatttataatagtgttaggttgtaatgttattttttaagaattttttttagtaaatatttgttatttttttaaagtaattgggagttgttgagtgtggaagtgaaaattaagttaagaagttttgttatttgggtgagtttagtttttataaaagttttgttggatgtgttttaaattgtttggtgtattttagtttttttttgtagggatttggagaaattgtgttattgttgttttatagagaaataattttttaatattttttttgttgttattttttttaagattttaaattgaaaatattttttttgatggtttttgttattatgtttggatgttttaattttaataaaatgaaataatagtgttaagttttttgagttaaatttgatattatagaggtagggattttaggatattagaattttattataatataaatgaaatataaagttttttatgtttaatagtgtattttagaaaattttgtttgagtgaattagttttgtattttataatgaaatgaggaattattgagagatatttaggtaatggattttaaatgagtgaataaggaagggaaaaattttaggaaaatgtagaaaaaagtagtggagattttggaaaaaaaattttaaagtattttttaatgtaaatatatttgattttttatagttaaataggataatagattagtttattaagttaaatgattaatgtttttgtaggttatggtttatgtgaaatattaaagaaatttgtaatggaaaatgatttgtttgaaagagttagttttttatttaaatttattaattagaattttgtattgaaaaaataaattaattgtgaatttttatggttatttttggaatttagtaattgattattaatagggattgtttataatttaattagagtgattttgtttttatatagaggggtaaattaatttttttaatttatttattttgtagatgaattatggtgtgtattaagtagatggtttgtaaatttataggtggtaaagtattgtgtaaatagttggttattaaggtagtttgtaagagtgttttggttatgggtggtgtgaagaagttttattgttattgttttggtattgtggttttgtgtgagatttgttgttattagaagtttattgagtttttaatttggaagttgttgttttagtgtttggtgtgagaaatagtttaggattttaagattgatttgtgtttttagagttttgtggtgatggtgttgtaggaggtttgtgaggtttatttggtggggttttttgaggatattaatttgtgtgttatttatgttaaatgtgtgattattatgtttaaagatatttagtttgtttgttgtatttgtggggagagggtgtgaattgttttgagtataaattttaaatttaaaggttttttttagagttaattattttgtttgtgaaaagggttgtaattttttgagatgtattagattattaaattgtattgatttaaatagatatttgaaatagtggtatttagtttttttgatgttttatttaaatttttaaatttaagtgtttttttaggtttttgtttagggttgggtttttttatgttgttttttattggtttagttggttttgttttgttgtttaggttttttgttgtttttttgtatattgtttttgttttttaaatttttggttatttaattgtattttgtttaatttatttttttgttttttggtttaatgtttttttatgtggtggtttgtattttaggttttaattgtataggtttttaatgttttggttttgtttttttttgatgtttatttgattttgtttgaggggttagtgtttttgatttgtattaggttgttttattttattagtgttttgagatttagttatttgttggtgatggttggtgttttgggtgtggttaatgttattttttgtgtgtttgatattggtttaaggttaaggttattagttggaatatttagatttgtggtattaatatatagtttttgtagatttgatagttttgtataggttttaaattgtaggagttaaagtaatgaaggtgtagatgggtgtgttttaaatttgagtgtgaaaggaaaatgtagaaattatgagtttttttaattttttagttgatattttttgtttgtttttttttttttttatttatttatttatttatttatttatttatttatttatttattttgagatggagttttgtttttgttgtttaggttggagtgtattggtgtgattttggtttattgtaatttttgttttttgggtttaagtgatttttttgttttagttttttgagtagttgggattataggtatgagttattttgtttggttttttggttgatattttaaaagaattttttaattttagtaaatattttgttttaattaaa

SEQ ID NO: 2763 - DNA, 2498 bp, Artificial Sequence
  chemically treated genomic DNA (Homo sapiens)
tttgattaagatagggtatttattaaagttgaaaagtttttttaagatattagttggaaggttgggtgaggtggtttatgtttgtaattttagttatttggaaggttgaggtaggagaattgtttgaatttgggaggtggaggttgtggtgagttgagattgtgttaatgtattttagtttgggtaataagggtgaaattttgttttaaaataaataaataaataaataaataaataaataaataaataaataagaaaagaaaaaagtaaataaaagatattaattggaaagttgaaaaggtttatgatttttgtattttttttttgtatttaggtttgagatatatttatttgtatttttgttgttttgatttttgtagtttagaatttatgtaaggttgttaagtttgtaagagttgtgtgttagtgttatgggtttaggtgttttagttaataattttagttttagattagtattaggtgtatagagagtaatgttgattgtatttaaggtattgattgttgttggtaagtagttgggttttaaaatattagtggagtaaggtagtttgatgtagattaaaagtgttggttttttgggtaaggttaaataaatattaaggaaaggtaaaattaaggtgttgaaagtttatgtagttaagatttaaaatgtaggttattatatgaaagagtgttgagttagaaaataagaggatgggttaagtagggtataattaagtggttaggagtttagaaaatgagaataatgtataagaaagtagtagagggtttgaatagtaaaataaagttagttaaattaatggagaatagtgtagggaggtttagttttaggtgaaaatttgagggagtgtttaaatttggaaatttaaatgaagtattgagggaattgaatgttattattttaaatgtttatttggattagtgtagtttagtggtttaatgtgttttaaaggattatagttttttttatggataaagtggttggttttgagaagagtttttggatttaaggtttgtatttaaaataatttatgttttttttttatgaatgtggtgggtaagttggatgtttttaggtatgatggttatgtgtttggtatgaatagtgtataggttggtgtttttgaaaagttttattaagtaggttttgtaggttttttgtagtgttattattgtggaattttggaagtgtaggttggttttgaagttttgagttattttttgtattaggtgttgaaatggtagtttttggattagaagtttggtagatttttggtagtgatggattttgtgtagagttatggtgttagggtggtagtgatggggtttttttatgttgtttgtggttggagtgtttttgtgagttgttttagtggttagttgtttgtgtggtgttttattgtttgtggatttatgagttgtttgtttagtatgtgttatagtttatttgtaaagtaaatgagttaggaagattggtttgtttttttatataggaatagaattattttgattggattgtggatgatttttgttagtgattggttgttaaattttggaagtggttgtagagatttatgattggtttatttttttagtgtaagattttgattggtaaatttggatagagaattggtttttttaaataagttgttttttgttataggtttttttgatgttttatgtagattatgatttgtaaagatattgattatttaatttaatagattgatttgttattttgtttagttataaaaaattgaatgtgtttgtgttagaaagtgttttagaattttttttttaaaatttttgttgtttttttttgtatttttttgaagttttttttttttttatttatttatttaaaatttgttgtttaagtattttttaatgattttttgttttattatagagtataaggttaatttatttaaataaggttttttaagatatattgttaagtataaggaattttgtgttttatttgtgttatagtaaaattttaatattttggaatttttatttttgtaatattgggtttgatttaaagaatttaatattattattttgttttgttgaaattaaaatgtttagatataatggtaagagttgttaaaaaaagtatttttaatttaaaattttgaaaaagatggtggtgaagagagtgttagaaggttgtttttttgtaagataataatggtgtagtttttttggatttttgtgggagagagttgaggtgtattgaataatttaagatatatttaatagaatttttataggaattggatttatttaaataataggattttttaatttggtttttgtttttatatttaatagtttttaattattttgaaaaagtaataaatgtttattggaaaagatttttaaagaatgatattatagtttaatattattgtgaattaatttattggattttttgtaaggtgttttttttttagttaataaaaagagtagtt

SEQ ID NO: 2764 - DNA, 2433 bp, Artificial Sequence
  chemically treated genomic DNA (Homo sapiens)
aagttttttgtattattgattgatgttgggtaagtaggtgtgtattttagatagatattgttagtgttgttgttagaatggtttaggtgaggttgagtgttaaggggttggtggggaatttggttttttgtgtaagttttttttgtaagtgttggtagatagggtattatgtatttttggtgttgattataggtaagtatttgtttgtaggaggttttgtttttggtttttttaatttataggtagggaattatttaataatgatttttttagttatatagtttggagaaagttgtttttttttaaaatattaaaaaatgatttataaatttaatagaaataattagagtagaattatttttatgaaatataggttttattggtaatttgagaatttatagagttgttttaattttaggatatagatagtaaataattgtttttgatattttttttaaatgtgtatatattttattttttagaatttattttttatttaggataatttataaggaattttaaaaatgtattgataaaatgatttaatttagtattattttaaaagaaaatgtaattttaattttttaaaaggggagtagtaggagaataaagggaaggggaagaaaaaggtatttatataaaatattatatgttggaaatgatgtttagtttttagaagaatattgtaagtttattttgtgtattttttttttttaaattttttatttttaaatgtttatttatttgttttttttagatattttgtggattttttttttgggttagtgtattttgtttttagtggttaaaatttatttttattataaaagaaagatgttaaattttatatttgggatagttaatatgggtttttaaatttaaatagttttttttagaaatagtaaaaaggaaaagattgtttttttttttttttaagatattattggtttgtttattattagaaggatgtttatttatgtaaaaaaaaaattaatttataggatgtaatttggagagtaggagaaagtaatttttattaaatttataaatttttttatgttagatgttagggattttttgaattgaggttgaatttttgtgttttagtggaataattattttagttggtttaaattagtttattgttaaatgtagtaaaaatgttggtaaaagttttattttttggtgtgttgaataaaaggaagtaaaaatggattaaagtaatttttaagaggagtaaggttagaggtgtggaattgttttttatgtttatgttaatgagtttttttttggatttattttaagtttatggttattattatttgttttagttgagggttggatttggatagttttttgtttttattttttgtggttgaatttttgaaattttagggtttggtatttgtgtgggttgtttatatggttgagattgggagggtaattggggaagaggtttttttgtttttgtttggtgtagaaataagtaaatttttttgttagttgtattgtttttattatgaattttgttgtattgtttatatttgaaaaatattagtaataaattaattgtagttttaagtttgtgttatttgtagatagttttttttttgttttgatgtttattttaagattttgttataatttataggttggattttgtgtttttattaaaagatagttttagagttttgtggaagagattgtattaggtattttaaattattgattttttaaagttgagttgatatggttttggtaatttttagattgtattggtaaattgagttaggatttttataattttatagttgaaaagtggttttatataattgttaatttaagatttaatagaatgagaattaattatataagattgaaaaaaaattgatgagagaaattttttttgggttatttgaaatgtagttgttttaaggttttgtttttagattgtaagaagttttttttttttttttttgtgttatttgtaatttataataagtttttaaattttgtttttataaattagaatgaagtatttttaaattatatatgatttttattaatatgattttttttatttgaatttagaaatttttatttagtttttttatattttttggtaatatagttgtttgtataggtttagtaagaatttgtttttttttttgttaaaatataattggaagtattaattatgtaatgaaagttttgttttgaatgttttatttgagaataatgtttatttaatgaggtgtgataagttattttaaggaataaaggttggttgtatttatggaattaatgtttataatgtttttttaggaaatttgatgtaggtttagtttatagtgtttagttttatagttagtaaggaaagttatttttaggtaagtatttggaggtatttttttgaaatttttagaagaaagg

SEQ ID NO: 2765 - DNA, 2433 bp, Artificial Sequence
  chemically treated genomic DNA (Homo sapiens)
ttttttttttagaggttttagaaaaatatttttaagtatttgtttagaagtgattttttttattaattgtaagattggatattataaattggatttatgttaggttttttgagaggatattataggtattggttttgtaagtatagttaatttttattttttaaaatggtttgttatattttgttaaatgaatattatttttaaatagggtatttaaggtaaggtttttattgtataattgatgtttttagttgtattttggtaaaagggaggatagatttttattaaatttatgtaaataattatattgttaagaaatgtagagagattgggtaagagtttttgaatttaaataagaagaattgtgttagtgagaattatatataatttaagaatattttattttggtttataaaagtagaatttaaaagtttattgtgaattatagatagtataagaagagaaagaaaaggttttttatgatttgggaatagaattttaaaataattgtattttaaataatttgaaaaaaattttttttattaatttttttttagttttgtgtaattaatttttattttattggattttgggttagtagttgtgtgaaattgttttttagttatagagttatgggaattttgatttagtttattggtatagtttgaaagttattaaaattatgttagtttagttttgaagagttaatagtttggagtatttaatgtggttttttttatgaggttttgagattgttttttgatgaagatataagatttggtttgtagattatagtagagttttaaagtaagtattaaagtaaaagaaaaattgtttataaataatatagatttgaggttatagttaatttattattggtattttttaaatgtggatagtgtagtaaggtttatgataagaataatgtaattgataaggaaatttatttgtttttgtgttaaataaagataaaaaaattttttttttagttgtttttttaattttagttatatagatagtttatgtaggtattgagttttggggttttagggatttagttataggaagtgggggtaggaagttgtttaaatttagtttttagttaaagtaaataataatggttgtaagtttaaaatagatttagggaggagtttattaatgtgaatatagaaagtagttttgtatttttggttttattttttttggaaattgttttggtttatttttatttttttttatttgatgtattagaaaataagatttttattaatatttttattgtatttgatgatgaattaatttagattggttaaaataattgttttattgggatataggaatttaattttagtttagaaaatttttgatatttgatgtaggaggatttataggtttagtggaaattgtttttttttgttttttagattgtattttgtgggttgattttttttttgtatgagtaaatatttttttaataatgaatagattaataatgttttaagagagaaaaagaataatttttttttttttgttgtttttggagagagttgtttgaatttggaaatttatgttggttgttttaaatatgagatttggtattttttttttgtggtggggatgggttttggttattgaaagtagaatgtattggtttggaagagaagtttatgagatgtttaagaaaggtaggtgagtggatatttagggatagaggatttaggaaaagaggatgtataaagtgagtttatagtgtttttttagaaattgagtattatttttagtgtatggtgttttgtgtggatgttttttttttttttttttttttgtttttttgttgttttttttttagaaagttagaattatgtttttttttaaaatgatgttagattagattattttattagtgtatttttaaaattttttatgaattgttttgggtgaaaggtagattttggaaaatagaatatatgtatatttaaaaaaaatattaagggtaattgtttgttgtttgtgttttagggttagaataattttgtgaatttttaaattattaatgggatttgtattttatgagaatgattttgttttaattatttttgttagatttgtgaattattttttaatattttaaaagaaagtagttttttttaagttgtgtgattagaaggattattattagatggttttttatttataaattgggagggttagggatggagttttttgtaggtaagtgtttgtttgtggttaatattaaaggtgtatggtgttttgtttgttagtatttgtagagggagtttatataggaaattaggttttttattagttttttagtatttggttttatttgggttattttgatggtagtattggtaatgtttatttgggatgtatatttgtttgtttggtattagttaataatataggagattt

SEQ ID NO: 2766 - DNA, 2461 bp, Artificial Sequence
  chemically treated genomic DNA (Homo sapiens)
attaatagtaatagtggttttaattttagataaattatttgttatttataattttatgaagaaaaatgttatgaaagataattatatatttgatttttgttattttataatttggtttatgtttttagatgtaagtaaaaatgtaaaataatatttgtattttttatttatatatattattttttatattttgtttttgtgaaaaatgttatattttaagtttatgattataagtgttaatgttgtgaattggaaattataatatattttattgtatattttattaattgtttttatttttttaataattggaagttagaaaggtttgatttttagttaaaaagtaaagtgagattgagggaagtttagagatgttatgaaggaattggtgattagagttttttgttgtttatggaatttataagaataaagatagttgttttttggaattatgattttaatttaggatttgtggagtttattttaatttggtgttgttttggaaaaggttatgttgaaaagaatttgtttttagagatttttaggaaagtagttaatttaaattgtttaattttgtgagattatttttggttggtagtaagaattttttgttatgtggggtttgtttgagagtgaagagtatttgtatatttattgtttttgaatttatatttgttggggtttatatgtatatgtatatattagtatttgggtttttatatttgttttttatattgattgtgtgaattgatttataagtttttaagtgttttagttagattaatttagtttagttttgaaagaatagataggtaagatagattgttatattttattaagttaatttttaattttataattgaggttttaataggatgtttggtttattaaggttttttattttgtttaagagtaattaaatattgttgttaattttattattaagattaagttgttgtttagtgattttttttttggttgtttttttgttttggggtttttttagtttgtttatggttaggagttgtttaaaaagttgtatttattttagttatattttgttatatttttaagtttgtggatgattttgtttgagtttttagtagttttaaagttttgttaatagtagatggaggtattatgttgagttttgtggagagaaagttttgtattgtgtaagtgatttatttggtattagagagggggaggggaagagaaattttgatgggttttagggattttttatttatttatttttttttgggatttttttttggagggtttttgtaaatatagttgttttgttatggtggaggattattaatagaaatttatgaaataaggttatgttttgtggtattttgagttagttttgtagtgtgatttattagttttttgaaaaaagaaatttgttaggatttgggttggaattgtaagatgtaaagatgttaagttgaaaaatttagggtgggtttaaatttttaattttttagttttgatttttattttgggaaaattattttagtgtaaatatttttttttatatttagtatatttgtgtaagaaaaattattttattatttaatattaataatatttattttgaattttaattttgaaaattatagaattttttaaatgttgtaaatagttgatatgggtgttttttttttgtttttaaaggaattgtttttgtaattattgagtagggtgaagttgaattttttttgtagtaaataggagagtgtgtaatgagatattttaattaaaaatattaattatatttagattaattaataatagaaaatttttaggatatttttaatgttttaaaaataaaaaagtttttattttttgaagttgttaggtttttattttagttttgagtataaataaatgtttgatatatggtttaagttaaattttaaaatgtagtaaaaatagtgtttgtatatttggtaggaatttaaattagtttaggttagtgtttttttttgtttaaagaagagtttttgtatttgtattgagttaggaaaataatataggaaaatatggggaataatatggaatattgtaagttttagtatttggttggttaaagaataatgtttggggtaattttgaaattattgtttaggttgtagtttgggtttgtataatgttttggaggattgtgagtaagatagaaagtattgattgtattgttgtaaggaaattgtttttttttttttaaagtttttattttgtaaattatttttttttagtaaaagtatattttatttgttaattttttttttgttattaatttttttaattatttttttttattattgtagaatggtttttggaataaagtagtattttaaagttttttttattaaaagtttgtttttttttttttttaaagaggtagtgtgggggtaattttttttttttttttttttttttgtgtttttttttt

SEQ ID NO: 2767 - DNA, 2461 bp, Artificial Sequence
  chemically treated genomic DNA (Homo sapiens)
aaaaaaaaaatataaaaaaagaaaggaagaaagaaaattatttttatattgtttttttaaagggggggaggggtaaatttttagtgggaaaggttttaaaatgttgttttgttttaaaggttattttgtaatgatgaagggggatgattgaaaaggttagtagtaggggaagagttaataagtaagatgtgtttttgttaagagggggtgatttgtaaggtgagagttttagaagggggaaggtaatttttttataataatgtaattggtattttttgttttgtttatagttttttaagatgttatgtaaatttaaattgtagtttgggtggtaattttagagttgttttaaatattattttttggttagttgggtattggagtttataatattttgtgttgttttttatgtttttttgtgttatttttttagtttagtgtaaatgtagaaatttttttttgggtagaaagagatattgatttgaattggtttaaatttttgttaaatatgtaggtattgtttttgttatattttggaatttggtttagattatatgttaggtatttatttgtatttagaattagaatggagatttaataattttaaaaaataaaagtttttttgtttttaaagtattaagaatgttttgaaagttttttattattaattaatttgaatatgattaatgtttttagttaagatattttattatatatttttttgtttattgtaggggaaatttagttttattttgtttagtaattataaaaataatttttttgaaagtaagggaagaatatttgtgttagttatttatagtatttaaaaaattttgtggtttttagaattaaggtttaaagtgaatgttattaatgttgagtaataaagtagttttttttgtatagatatattaaatgtaaaaagaaatgtttatattggaatgatttttttagggtgggaattggggttggggagttggaggtttgggtttattttaggttttttaatttgatatttttatattttatggttttagtttaggttttagtagatttttttttttagagagttggtaaattatgttatgggattgatttagagtgttatggggtatggttttgttttgtgggtttttgttgatgattttttattgtggtggggtaattgtgtttgtaagagttttttaggagaggattttggggagaagtagatggatgaggagtttttggagtttattaggatttttttttttttttttttttttggtgttaaatgggttatttgtatagtgtaaagttttttttttatagagtttagtgtgatatttttgtttgttgttggtaaagttttaagattgttgggaatttagatgaaattatttataggtttggaggtgtggtagggtgtaattagaatgagtgtaattttttaaatggtttttaattataggtaggttgggaaggttttaagatggaagggtagttgaggggagggttgttgaatagtagtttgattttaatgatagaattggtagtggtgtttggttgtttttgaatagagtaaaagattttaataggttagatgttttattaaaattttaattgtgaaattagaaattaatttgatggaatgtgatagtttattttatttatttgtttttttagagttggattaaattggtttaattaggatatttgaaggtttgtgaattagtttatatgattagtgtgaaaagtgggtatgaagatttagatgttggtgtgtatgtgtgtatataagttttaataggtatgaatttagaagtagtggatatgtgggtattttttatttttaagtaagttttatatgatagaaagtttttgttattagttaggaatgattttatagggttgagtagtttgaattggttatttttttgaaaatttttagaaataaattttttttgatatagttttttttagaatagtattaaattagagtaaattttataaattttgaattagaattgtaattttgaaaagtggttatttttatttttgtgggttttataagtagtaagggattttggttattagtttttttatggtgtttttgaattttttttaattttgttttgttttttagttagaaattaagtttttttggtttttgattgttggagaagtggaaatagttaatggagtatgtaatgaggtatgttgtaatttttaatttatagtattaatgtttgtagttatgaatttgaaatgtagtattttttatagaggtaaagtgtggaaagtagtatatatgagtaaggagtataaatgttgttttgtatttttgtttatatttgagagtataggttaaattatagagtgataaaagttagatatataattgttttttatagtatttttttttatagaattataaatgataaatgatttatttaaaattaaaattattgttattattaat

SEQ ID NO: 2768 - DNA, 2440 bp, Artificial Sequence
  chemically treated genomic DNA (Homo sapiens)
tttttttttttagtaatttttttattttttttttgtaggtataattttgatagtattttttttagaattttgttaaataagtggattggaataatatttagattatagatttttatgtaattttttttttttaagaaatgaattatagtttttatttgggtttggtttttttgtatttagggtttttgttattttgtattgttagaaagtaaaattttagtttgttaaggatggggaaggggttatttttgagtatttagggtgtaggtttttatttgttttttaaatagaattttagttaatatttatggatttttagttgtatattttatttttataagtatttaatgatttatgttttaaggatttttagaattttagtgttatttggtttaattttaaggtttttttaaaatagtttggggtttttattgtgttatttattatttatttttttgttttttgatttttttattaaaataaaattttgttatttttttttttttttttattaattttttaaatgtgttttttatttttttttaaaatatgtttattgttaattttggaagaaaaatgtggtaaatggtatgtttttatttttttatattgatttggaattttttttttgttttaatttggtttagtttatatttatatatattaaggttagatttaaagataaaattaattattttaattttattagttttggttaataattttgtttttatgtttttttgatttagttagtttttatgtaagttaaggtggttgagtattataagtttttattattataatgattttatatttaaatattggataggaaaaattgattatgggtttggtatttatttatatggttttatagaaagagagaaaaaaatatttttagatagtggtattaaaaaaggttgatatatattttttattattttttttttttttttgtttgtaagttattaatagttatatttaaggataaaatatttttatgtatttataattttttattagtaaagatttgattattaaataaaggtagtttgattagattatggttttatgatgggtttgagaggggttttgttttatattttggttgtatttttagtggggtttatttttaattgttttatgatttggggagatatattgttgattttattgtttagagttttttttttttttttttttgtggaatgagtgatgttttatatggaagattaagatatataataataaaatagaaatttttatgtttagttgtagttagatttatggttaagtttatggagattatttagggttgggaatatatgtttaagaatgtttttgtagttataattgtgtatggagtgagatgttgttatagattatggatagtaaatatttttgaggttgtgtgttattttttgtaggtttatgagtttttttgatttaagtaggaaggtgtttgttagtaatgtaaataaaatttagtttaatttttgatttttaatatttggaatatttatttttttggtaattgtgtggtttattgaatatttattattttagtggtttattgaagaaggattttggtttgaaaagagattgttatgggaaaaaaaaaatttaatttagagtagttattattgagaatattaaaaggatttgtgatagtaatatttttttgattttatagttggtttgtgtggattgtgttttagtgagagtttgtttttttaatgttgtgagaaaagatatagattttttttttggattttattataatataagattttttttattgtatattttaaagattttttaatttgaaaatttagttttaattttttatttttttgtatgtttttgaatggaatttaaataatttaatattgttttttttttttttttttttttagaaatggatgagagatttaagtatatttttttgatgttttgtggatatttttgtatttttatattttttattaaatataaaataaagagttttggttttgaatataagagaatataagttgttaagattattaataatttgttaatggttataggtattttggatttttttttatagtttttggggatatatttttttttaaatgttgggtagaatagtaagtgtggttaaggttgatttgagaatgaagttggaattggatgtagtagttttataatgatattaaggtttaaggttagggaagtggtaagatttttatttagtagagttaattataagttataaaagtatttaggagtagatttgagtgaagtatgtgtttagttagttattgaaataaaagtatgtagtttgttttaagtttttggtaattattttagggttgattgattaggtatttttgtgtgtatgtaattgtttttttttatttaagaataaattataaggaatagatattatatagttttt

SEQ ID NO: 2769 - DNA, 2440 bp, Artificial Sequence
  chemically treated genomic DNA (Homo sapiens)
agaagttatatagtatttgttttttgtagtttatttttaaatggagaaaagtaattatatatatatagaaatatttagttaattagttttgaagtagttattaggaatttgagataagttatatatttttgttttaataattaattgaatatgtgttttatttaggtttgtttttagatatttttatggtttatagttaattttgttgggtaaaggttttgttatttttttgattttggattttgatgttattgtgaaattgttgtatttaattttaattttatttttaagttagttttaattatatttattgttttatttagtatttgagaaagagtgtgtttttagaagttatgggaaaagatttagaatgtttgtgattattaatgagttgttaatggttttaataatttatatttttttgtatttagaattaaagttttttgttttatgtttaatgaagaatataaaaatgtaaaaatgtttataggatattaaaaaagtatatttgaattttttatttatttttgaaagagaaaaagaaaaaaaaatgatgttgaattgtttggattttatttagaggtatatagagaaataaaaagttgaaattaagtttttggattaaagagtttttaaagtgtataataaaaaaaattttgtgttgtaataaggtttaaaggaagaatttatgtttttttttatggtattaggaaaataggtttttattagagtataatttatgtagattagttgtggagttaaagggatattgttattataaatttttttggtatttttagtgataattattttgaattagatttttttttttttatggtggtttttttttaagttaaaatttttttttagtggattattggaatggtgagtgtttagtgaattgtataattgttaaagagataaatattttagatgttgggaattagaggttaaattaggttttgtttgtattattaatagatatttttttatttaaattagaaagatttatgggtttataggaagtgatatataattttagaggtatttattgtttatagtttgtaatagtattttattttatgtatagttgtaattgtagagatgtttttggatgtgtgtttttagttttaagtaatttttataaatttaattataaatttaattatagttaaatgtgagagtttttgttttgttattatatattttaattttttgtgtggaatattatttattttataagaaaaaggagaagaaaggttttgaataataaaattagtaatgtgtttttttaaattatgaaatagttaagaatgagttttattgaaaatataattagaatgtgaaataaagttttttttaagtttattataaaattgtggtttggttaagttgtttttgtttagtagttaggtttttgttagtgaaaagttgtaaatgtataggaatgttttatttttgggtgtgattgttagtagtttgtaaataaggaaggagaggagatgataaaaaatatatattaattttttttgatattattatttaaaagtgtttttttttttttttttgtaaaattgtatagatagatgttaagtttataattaattttttttatttagtgtttgaatatgaaattattatagtaatagaaatttataatatttaattattttgatttatataaaaattgattaagttagaaaaatatagaaataaaattattgattaaagttggtaaaattaaaataattgattttatttttaagtttagttttggtgtatgtggatataggttgaattaaattaagatagagaaggaattttagattaatgtggaggaatgaaggtatgttatttattatgttttttttttaaaattggtagtaaatgtattttaaaagaagataaaaagtatgtttaagagattaatgaaaaagggagaggagataataggattttgttttaataagaaaattaagaagtagaaggatgagtagtaaatgatatagtagaaattttagattattttaagaaaattttaaaattgagttaaataatattaggattttggggatttttgaaatataaattattaagtatttatggaagtagagtatatagttaaaagtttataggtattagttaaaattttgtttaagaaataaatagagatttatattttaggtgtttagagatagttttttttttatttttgatagattaaaattttattttttaataatatagaataataaaaattttggatgtaagaaaattgggtttagataagagttgtgatttattttttaaaaaaagaaggttatgtgaaagtttatagtttgaatattattttagtttgtttatttggtgaagttttagaaagaatgttattagggttatgtttgtaagaagaagatgggagaattattaggggagaaaa

SEQ ID NO: 2770 - DNA, 2334 bp, Artificial Sequence
  chemically treated genomic DNA (Homo sapiens)
attatatttttatattttatagttgaagaatttaaagttaaaaaagagtgagtagtttaatattatttagagttagttaataaagattttttttagtattttttataaagtattttatagtaaggagaaaggttttggtttttaatatagttgtatgaaaattttagttttattattttaaaggtattattttttattagtagattttttttgtgtgtaatggggttatttggataaaataaaattgatttttatttttattattaaattgggattgatgtgtgagtataaaattttagggtaatgtagtttttaattttttttatttttttatttttgtttttttttgttttagttaattgaaaaagggagttatttgtatgttgttggagggagattatttttaattgttttggtttattaatagtagatgtatagtaaagtttttaaagaaatatatgtttttaggattttatagagttttaagagtagtattttatgggtttattttggattttaggtgattaatggatgtggatgaaatttttaatttttttaattgtttgtttttgtttttttagttttttttttaagtttttttaattagttaaatttaaagtttttttgaattatttaatgttatataaaagtatttgttttaggtagagaaagagaagtaatttagttttggggtaattgatttattatatgtagggaaattttttgttagttttttaaaagttatttttttttttgttatttggaaagtatagtagttttttattttattttttattgatggaaaatagatttgtttgatgtttagaagaagttttatttgtattggtgttttatttatttatttatttttttttttggtagattattataattattggttgtgtatatttatattggatttggttattgtattatattgtatttgtaaaaatgtttttttttagatatggtaagaaaagtttttataagttgaattaatattatttgtttttttaaaatgttttaattgtattggtaaaaggagtattttttattttttaaagtttattgtaattggattgttagagtagtattattaaaaggataatgatggtgttatttttaaatagatttttttaaaataattgtttttttttattgagtgttggtatggtatttgtgaaattttgatggggttagtgggttttttgatgttgtttattagaagattgtttttttttgatttattttttttttttttgttttttttttatttatatttatgttggttttatttagttattgtaatttgtttttgtatttgaattaagttaattttttttaatgatataaataggtagtttttttattgggttagtgtttgttgtttttttattttgttttgatggaaatttttttattgtaggagttaaatattgattatgagagtgttattattttagaaattgataggttgattatgaaattataggtttgtatattttgttttttattttgggttattttaagaagttggtaatgattggtatgaatgggggtatttgatttttgttaggagggagtggattttaggttttttaggttgtttgttagggttgttattttggagttggagagggaaatgagaagtttggtttgtatgaggtttgattgaggttgtggatatgaagtaatagggaagtgaagtttatgtttttgataaaagaagatattagaaagggaggtttgaaatattaagttaaaggtgtttggtagagaattgtagagaagtaagatagagaaaagtagagagtttaaagagatttttggagatgaatgtatgtagatagagaggattttatagttatttattgtttttattttgggtaaggagaaagttgttttaagagttaatttatataggagaaaaataggagtatatatttattgttttattttatgtttaatttaaattgaggtagtttataaattaatatagaatagatttaatttttgtgttaatattgtagtttagtaatggtatatatatagttagaaagtggaaagtattagtttaatttttttgatgttgggttttagtttagttaatgttattgaattgatagattatttttttaaatttgtttaaagttattaaattaatggtttttataatgtaatataaagttattttttttttttttttgtttagaatgatattttaaatatagatggagtttttgaatatttggtttttttttaagtgatgtatggaggatggatgaaggaaaattgaaatatttttttgttatgttatttttttaatttatttgt

SEQ ID NO: 2771 - DNA, 2334 bp, Artificial Sequence
  chemically treated genomic DNA (Homo sapiens)
ataaatgggttgaaaaggtaatatagtagaaaagtgttttaatttttttttatttgttttttatgtattatttagggagaaattaagtgtttagagattttatttgtatttagaatattattttaaatggagagaaggagggaataattttatgttatattatagaaattattagtttaataattttagataggtttgaagaggtggtttgttaatttaatggtattagttaaattgaagtttgatgttaaaaaaattaagttaatgttttttattttttgattgtatgtatattattattgagttatagtgttggtatagagattaagtttattttgtgttagtttataggttgttttagtttgagttgggtataaaataaaataatgaatatgtatttttattttttttttgtataaattgatttttgaaatagttttttttttgtttagagtaagggtagtgggtggttatgaaattttttttatttgtatgtatttgtttttggaaatttttttaagttttttatttttttttgttttgtttttttgtagttttttgttagatatttttagtttagtgttttagatttttttttttagtgtttttttttattagagatatgggttttgtttttttgttgttttatatttatagttttaattaagttttatataaattaggttttttatttttttttttagttttagagtaatagttttggtaggtagtttgaggagtttggggtttatttttttttagtaggggttagatatttttatttatgttagttattgttaattttttaggataatttaagataagaagtagaatatgtagatttgtgattttatggttaatttgttaatttttgagatggtgatatttttatagttaatgtttgatttttataataaaaagatttttattaagataaaataaagaagtagtaaatattggtttaatgagaaagttatttgtttatattattaaaaaaaattggtttgatttaggtgtaaagataagttgtagtagttaaataaaattaatgtgagtgtagatgaggaaaaaataaaaggagagagagtggattggaaagagataattttttggtgggtaatattaaagaatttgttgattttattagaattttatgagtgttgtgttagtatttagtaaggaaaagtaattattttaagaaaatttatttgagggtaatattgttattatttttttaatggtattgttttaataatttagttatagtaggttttaaaaaataagaagtgttttttttgttaatataattaaggtattttggagaggtagatggtattagtttagtttatagaggttttttttgttatgtttagaaaagaatatttttgtaagtgtagtatggtgtagtagttaagtttaatataggtgtgtatagttaatgattgtagtggtttattaagaaaaaaaataaataaataaataaaatgttagtgtaaatggagttttttttaggtgttagataaatttgttttttattagtggagaatgaagtggaaaattgttgtgttttttaaataataagagaagagataatttttggaaaattaataagaagtttttttgtatgtaataaattagttgttttgaaattgggttatttttttttttttgtttagggtaagtatttttgtgtgatattaggtgatttaaaagggttttaagtttagttaattaaaggaatttggagagggagttggagaagtaggagtagataattgaaaaggttaaaggttttgtttatatttattaattatttgaaatttaaaatgaatttatagaatattatttttgaaattttgtgaggttttgaaggtatgtgtttttttggaagttttgttatatatttgttattaataggttagaataattagaaatagtttttttttagtaatatgtaaataatttttttttttgattaattagggtagaaagaagtaaaagtagaaaagtgagagaaattgaaaattatattgttttaaaattttgtatttatatattaattttaatttggtggtaaaagtggagattggttttgttttatttagataattttattatatataaaggaaatttattgataaggaatgatatttttgaagtggtagggttggaatttttatataattgtgttgaaaattaaaatttttttttttattgtaaaatgttttgtgaagggtgttgggggggatttttattaattaattttggatgatgttgagttatttatttttttttggttttagattttttagttgtaagatgtaaagatgtagt

SEQ ID NO: 2772 - DNA, 2308 bp, Artificial Sequence
  chemically treated genomic DNA (Homo sapiens)
tagtatgtattttaaggaaggaagaatagtaagggtaggaaaatagtgagtttttagggtatttggtgagtttgatataatatttgttgaataaatgaatgaatgattgatatttaaattttattgtatatatataagtattttattgagaaaatgttagtgttttgtttggattagttttaatttgtttgattttgattgtagtttttttgatagtgaaatgaggattttattatttttaattatttatggttaaagttaataaattattaaaaatttttatttagtgaattattttaatttttttattgttaaaatttttattagagttgtgatttaaggtaattgggttgagatatgttattgttaattttttagttgtatgtaggttaatgttgtatttttgtggggaaataaataaagggtatagtggttaggagtaaaaggttttttgataattagtttttgaataatttagagttgattgtattatgtaagtgtattttttaagatagggaagatgaggattatgtgtatgttttggatttttgtgttagtgtttaaattatttttattttattgtaaattggttatgtgaaaatgttaataataataatattttttattaaaatttttagagtttatgaaatttatttatattgattattttatttaatatggtttttatataattttgggaaatagtatattagatattaaatttaaagagttgaagtttaaataggttaaatggtttttttaaggttatatggtttttaagtatttgagttaagattagtattaaggttttttgatttttaatttaaaattttttttaatgtaaattgttttttagtatatttttataaaatttttttagattgtattagaataataatgtttgttaatatattatttttagatattttaatgataggatatatattttttttttgttaaaagttatttttttaagtttatatttttggggatatttaatgagtttttttttaattttgagaatttgtggttttaaaagtgtggatggtttagtaggggtaaaattttagttttgttttatagtttttgttgttatgaggtgagttgtttttttttgagggtattagagggttttatttagttaggtattgttttttaagtatgtgttttatgtgttggggtaggtttattattggattttatttatgttttggtagttagtgggtttagtggaatatttgtgattgggaatatggtgatattgtattgatttggatttttattttttttttttatagttgtatatagaattgtgggtgtagtttatttttgggtttggagaattgtttttttggttttgtttttttttttttttggagaaggggagtttttgtgttttggtggttattatagtattgattttgttttggttatatatgtgtgtatttattttttaattttgtgttgtttttttttttatagagatagtttttggtttttggtatggtttgtgatagtataggtattattatggtaatagatgtgttataaatataggataatagttttgtttttgtttttttttttttttgtttttatgtagtgaagggaattattatgatttttaaataataattatagatttttttgtagattttaggaaatgaatagaataaggttttgttatataggtaagttatgaagaaaatttataagaatattagaaaataataaaagtattgattaatattttttttttgtgtaaatatgtttttatttttttagtttgaataaatgtaaaaatttttttttttgttaatttaaaaaattatattatgaatataatttgaagtggtaaaaaatatgttagtaagaattttgaaagataggttaattaaatggtaattttgttgtaatttattttatgttagagattttagtatgggtttaattttttgagattttatttgaagatgattatgtttttaaagggtttgggtatggattgtaagaattgtgttgtagtgagtttttattaagatatttggttttttttggttttaattgagttttaaatttggttttttttaagtttgatgattgaggtaaagtatttagaagggattttgaatatatatttttgataaaggttttataatggtttttattgttttataagtgtaatagtttttggttgtattgattggttattaattttttgtagaggtagggtaggtttgggtttttttattttgttaatttttggttaaagtagttagggtagattttggtttagttgagatttaga

SEQ ID NO: 2773 - DNA, 2308 bp, Artificial Sequence
  chemically treated genomic DNA (Homo sapiens)
tttgagttttaattgggttagggtttattttggttattttgattagaagttgataaggtggggagatttaaatttgttttatttttgtagaaaattgatggttagttaatgtagttaagggttattatatttgtaaagtagtgaagattattataaggtttttgttaaagatatgtatttaaaattttttttgagtgttttattttaattattaaatttggagggaattaaatttaaagtttaattaaaattagagaaggttaaatattttaatgaagatttattatagtatagtttttataatttatgtttaagttttttaaaggtatgattatttttgaatgaagttttaaagggttgaatttatgttaaaatttttaatatgagatgaattatagtaaagttattgtttaattaatttattttttaaaatttttgttgatatattttttgttattttagattatgtttatgatgtgattttttaaattagtaaagaaggaggtttttatatttgtttaaattgaaagaataaagatatgtttgtataaaaagaaagtgttggttaatatttttattattttttaatatttttataagttttttttatggtttgtttatatggtaaagttttattttgtttattttttagagtttgtaaaaaagtttgtgattattatttaaggattatggtgattttttttattgtatgggggtgggggagggggaaagtaaaagtaaagttattattttgtatttataatatgtttgttattatagtaatgtttgtgttgttataaattatattaagggttagaggttgtttttgtggggggaaaggtagtatagagttggaagatgaatgtatatatgtgtggttagagtagggttaatgttgtggtaattattaagatatgggagttttttttttttagagaaaagggagggtagggttagaagagtagttttttaggtttagaagtaagttatatttataattttgtatgtagttgtgagaaaggagagtggaaatttaagttaatgtagtattattgtgtttttaattatgagtattttattgggtttattggttgttaagatatggatgggatttagtggtgagtttgttttagtatatgaaatatatgtttgggaaatagtgtttgattggatggagttttttggtatttttaaagagaagtaatttgttttatgatggtaagaattgtaaaataaagttaggattttatttttattgggttatttatgtttttagaattatagatttttagggttagggaagaatttattgagtgtttttaaaaatgtggatttgaaaaagtaatttttagtaggaagagagtgtatgttttgttattggggtatttggaagtagtatattaataggtattattattttgatataatttagggaaattttgtaggaatatgttaaaaggtaatttatattaaaaagaattttggattaggagttagaagattttagtattagttttggtttaagtatttagaagttatgtgattttgaaaaagttatttaatttatttgaattttagttttttaaatttaatatttaatatgttattttttagagttatatgaagattatattaaataaaataattaatgtgaataaattttataaattttaaaaattttaatgaaaggtattattattattagtatttttatatagttagtttataatgggataggaataatttgaatattaatataggaatttaaagtatatatatgatttttattttttttattttgagaggtgtatttgtatgatatagttaattttaaattatttaagggttgattattaaggggttttttgtttttagttattgtattttttatttgtttttttataggaatgtagtattaatttatatatagttagaaaattgatagtagtatattttaatttaattattttgaattataattttggtaaaagttttagtaatggaagagttaaaatgatttattagatggaagtttttgataatttgttgattttagttatggataattaagagtgatggaatttttgttttattattaaggaagttgtagttaaggttaaataggttgggattaatttagataaaatattagtatttttttagtgaaatgtttatatatgtgtaataagatttgaatattagttatttatttatttatttaataaatattgtgttaagtttattaaatattttgaaaatttattatttttttgtttttgttgtttttttttttttgaaatatatattg

SEQ ID NO: 2774 - DNA, 2496 bp, Artificial Sequence
  chemically treated genomic DNA (Homo sapiens)
attttgagttggttgtaaataaaatattttaagttattgtttttttttttatttgattgagttagttattgtatagggaggtgatataaaataaaattttgtgtttttgaagttgagattttgggattgtattttatgtaaagttatttataagttttgattattttgagagaaaaatattatagtatttttaggaagttttatgtatttgttttaaagttaagtattattttttttttagttaaaaaaaaaaaaaagtttggaaaatagtgatatgttagtataaagggaatattgttttataataagaaggaatatgttatagatatatagtatggatgaatgttaaaaatattgtgagagaaaaatgtttgaataggagagtaattattgtttgattttatttttgtggaattttagaaaaggtaaaattaatttatggtaataggaagtagattagtgattgttaggggtgatggggattggaggaggttgattgtaaaagggtagaagggaattttttagggaaatatgaaatgttttatattttaattgtggtggtgtttatattggtgtaaatatatttgtttaaatttgtgtaagtatatgtttaaaatgggtgtagttttttgtatgtaagttatattttataaagttgatttgaattgaaaaaaggggttagaaaaggttgtggttggaattttttgtgtaatttaaggttaaatagtttatttatgttagtttttatagtattgtaagttatgttttttgtgtttatatttttttagttatttttttatttgttattatttaggagattttgtattttatttgttttttttttagttttatgatttgagtaatagaagtttttggtttttaggaattttatagtttttgttagttataagtaagaatgtattttaaatttattttaaattattttttaagtaggggttttggtggttttttggaatggaggtgtggtggaagtttgagtgtgtgtgggaagaggttgggtgttttttagattattgtattatgtttttttatatttgtttaagtttttgtgtgaatattgaaataaagtgttatgaattttgtttttggtatttgttggttatagttgtggttttgggttgtatatttgttgtggttttagagtttttgagaagttattggttgggagggtgttaagaatggttggtgtatgtggtaattgagtgtttaaggggaggaggatgatttttagtgtatttattgttttttagtttttattttaattttgttataatttagagagatgtttttttggtgtgtttatagagagatggatgtgtgtttaggaatgtataatttagtgagtagtttgaatatttagatgttgggaatattgttgagtatttatttttaaagtttaagttttttatgtttagttagtgttagtttgtaagaaagaattagttgtttttaatggattatgttagttggatttggtataagtgtttttttttagaagggaggattatatgtttatagtaataagatgtttttttattttttagtttattaaaagattgtgaaatagggtgtgtagatattttaggtagtattattttttaaatagatgagtttgaaagagtgagaaaaggttgtgttaggttaattgggtttaaggaaagttaaataattggtgggagaaggaaaagtaaatattaatttttttttttgttgtgtattttttttttttttttttttttgagatggagttttgttttggttggagtgtagtggtatgattttagtttattgtaatttttgttatttgggtttaagtgatttttttgttttagttttatgagtagttgggattataggtgtttgttattatatttagtttatttttatatttgtagtagagatggggttttattatgttggttaggttggtttttaatttttggttttaagtgatttttttgttttagttttttaaaatgttgggattataggtgtgagttattgaatttggttgttttgttgtgtattttttttttttttttttttttttttttttttttttttttttttgagatgtagttttgttttgttatttagtttggagtgtagtggtttaattttggtttattgtaatttttgttttttgggtttaagtgatttttttgttttagttttttgagtagttgggattataggtatgtgttattataattagttaatttttgtatttttttagtagagatggagttttattattttggtagggttggttttgaatgtttgattttaggtgatttatttgttttggttttttaaagttttggaattataggtgtgagttattgtgattggtttttgttgtgtattttttttggatattttttggttttgtgtttgtgtaaattttgaggttttttaaaattattaaagtagtgaggagaagatggtagaaagttgtgtgttgatatttttttt

SEQ ID NO: 2775 - DNA, 2496 bp, Artificial Sequence
  chemically treated genomic DNA (Homo sapiens)
aaaaagaatattagtatatagttttttgttattttttttttattgttttggtagttttaagaaattttaaagtttatataaatataaagttaaaagatgtttaaaagaaatatatagtaaaggttggttatggtggtttatatttgtaattttaggattttgggaggttgaggtgggtagattatttgaggttaggtgtttaagattaattttgttaagatggtgaaattttatttttattaaaaaggtataaaaattagttggttgtggtggtatatgtttgtaattttagttatttgggaggttgaggtaggagaattatttgaatttaggagatagaggttgtagtgagttaagattgagttattgtattttagattgggtgatagggtgagattatattttaaaaaaaaaaaaaaaaaaaaaagaagaagaaaagaaaagaaaaatatatagtaaggtggttgggtttagtggtttatatttgtaattttagtattttgggaggttgaggtaggaggattatttgaggttaggagttagagattaatttggttaatatggtgaaattttatttttattataaatataaaaatgagttgggtatggtggtaggtatttgtaattttagttatttatgaggttgaagtaggagaattatttgaatttaggtggtagaggttatagtgagttaagattgtgttattgtattttagttagagtgagattttattttaaaaaaaaaaagaaaaaagaaatatatagtaaaggaaaaaattaatatttattttttttttttttattaattatttagttttttttaagtttaattaatttgatataatttttttttatttttttaagtttatttatttaaaaaatagtattatttaaaatatttgtatattttattttataattttttgataaattaggaaataaaagaatattttgttattataaatgtgtaatttttttttttaagaaaaaatatttgtattaagtttagttaatatgatttattaagaataattagtttttttttataggttaatattgattagatatggagaatttgaattttaaaaataaatatttaataatatttttaatatttagatgtttaaattgtttattaaattatgtatttttaagtatgtatttatttttttgtggatatattaggaaaatgtttttttaaattataataggattgagataaagattggagagtaatgagtgtattaagaattatttttttttttttaagtatttaattattatgtgtattaattatttttagtgtttttttaattaatggttttttagagattttgaaattataataaatgtgtaatttgaagttatagttgtggttgataaatgttagaagtaaaatttatgatattttattttagtatttgtatagaagtttggataggtgtgaggaagtatggtataatgatttgaggaatatttagtttttttttatatatatttaagtttttattatatttttattttagaaaattattagaatttttatttaaaaaataatttgaagtgaatttaaaatgtatttttgtttatgattaataagaattgtgaggtttttgaaagttaagaatttttattgtttaaattatggagttaggaggaaggtagatgagatgtaaagttttttaagtgatgatgaataaaggagtaattgaagaaatgtgaatataaagggtatagtttataatattgtaaaaattggtgtaaatggattatttggttttaagttatataaaaaattttaattatagttttttttaatttttttttttggtttaaattaattttatgaggtgtaatttatatataaaaaattgtatttattttaagtatatgtttatatgaatttgggtaaatatatttatattagtgtaagtattattataattaagatataaaatattttatatttttttgaaaagtttttttttgtttttttgtagttaattttttttaatttttattatttttggtaattgttgatttgttttttgttgttataagttagttttgttttttttagaattttatagaaatggaattaaataatagttatttttttgtttaggtattttttttttataatgtttttgatatttatttatgttatgtatttgtggtgtgtttttttttattgtagagtagtattttttttgtattgatatgttattattttttaaatttttttttttttttaattaaaaagagggtggtgtttagttttaaaataaatatataaaattttttaaggatattgtaatattttttttttaaagtaattagaatttataagtaattttgtataaagtataattttaaaattttggttttagaaatatgaagttttgttttgtgttatttttttatataataattggtttaattaaatggaaagaaaaatgataatttgagatgttttgtttatagttagtttaagat

SEQ ID NO: 2776 - DNA, 2472 bp, Artificial Sequence
  chemically treated genomic DNA (Homo sapiens)
taggtgtatttttgaggggtttatatggtttatatagtgggaattgatattttggatgtaatatatttattatatttgtgtaaattttttagagaaaatttaaagttagttaaaaaaatattaattaaatgggttattaaaatataataaattagttatgtttaattatatattttagaaaagattttatatttatagagatgagagtaggaatagttttaatataggtaaataatttttaaagtatataattttaatgtatagaaaaattaaaaattaattttaagtatgatattgaataagtattattttttataaaattattttttttttttattagttaaataaaattaaggttaaataaaggtttaattgattgtttgtaaatatatttaaattatttttaaaaattgaaaaatataattttagaattatagaattttatgttatttgattgattataaattatattatttgtaaatagagatggtgtattttaagttttagattaaataaatttttaaaatggttaatttttaatgattaaaaaattttaataagtgaatgaaaagtatataaaatttatgatttaaaaagaaaaaaaaaattataaagaaaaaaaaaaattatgaaaaaaaaatttaattagtaagtgaaaattatataaaatttttgatttttaaattgtatgaaggatatgaatgttaagaaaaataagatttttttgattgggaattgaatttgggttgtggtggtgagagtgttgaattttaattattagattattagggaatttgtataatgtttttttttaaatatatttgttgtgttaaaaatttgtatttaatttttttaattagtaggggatagagtattgtgtttaagttatatttattttgtttttgttttgagttttggtttttgaatttattttttgaaattgaagtaaatttttggaagtgttgggatggttttttaaggaaaaaatttatattttttaaatttaattttttttttattgttatgttggaaaatatattttggaaatttttattttttatgtaatatgtaaatttttttattaagataagtgttgtttggatgtgtattgtttagagttttgtaatttgttttattattttattaattattttagttgttttttttaaatttaagttttgtttttttttgtttttttttgttttttgttatgtggatgttaagtttttttaaatattttattaaatttaatgatagattgttattagttgagagtgttttttggtgaagagttggagtgatgtgttgttttgggtgtagagtgtgtgtttaataaatatgggtgatgaagggttatgtagttttatagtatgtggttttattttatttatttggtatatgtaggttaatgaggttgagagagttgtgggtggtatgtttagtgaaggattaggatatttgtttaaggttttaagtaagttttttaaatttattgtgtttgttatttttttattttttaaattgtgttattatttgggtaattgttttatttttttgtgttatatattagatatggttaggaaatgatgtaattattaaaggagttaagatattttatagtttagttttaatttagaaatttttataaagtagatgtagagggtagtaagatataatttaattttgaaaatgttagttgttatagttgaagaaatttgatttaagagattttgttttgttgtaagatggaaggaagtttaagtaagatataaatttgtaatgaatttgtttataatatttgttgttattgtgatttgtagttattatttattattataaaattaggtgagtttgtgtttgaattttgtttttttttttttagtagtttagagatggagtttaaattattgatatattttatttgaaaatatgtaataatatgagaataggaagatttaaaggggttattaagataataagatagaaaaattattagaagaaatttttatattttattgtattttaagtgggattttttttttttattttaaggaattttagattaagtttagtaggtggagtttttaatttttatttaaggggttgttagattttagtattagattatttggttttgaataaaaagattaagtagatattagtttaaatttgtataggtttagttataatattttatataaagtataaaagggtatggtgaaaattatttttttatttattttttttttttttttagaagtaattagtgttattagttttttttgtattttttagaaataatttatgtatatataatatatatttggtttatttttttttaattttttggttttgaaatatgttaaagtaatagaaagttgtaattatagaatattgaatatatatatattttttatttatatttttgttttttaatttagagttttagtaatttgtggttattaggtatta

SEQ ID NO: 2777 - DNA, 2472 bp, Artificial Sequence
  chemically treated genomic DNA (Homo sapiens)
tagtgtttaatagttataaattgttggagttttaaattggaaggtaaaggtatggatgaagggtatatgtgtgtttaatgttttatagttgtaattttttgttgttttgatatgttttgaaattaaaaagttggaggaaaatgaattagatatgtgttgtatgtgtatagattatttttgggagatatagaagaagttggtaatattggttatttttgggaagaagaaaggagtgagtaggaggatggtttttattatatttttttgtattttgtgtaaaatattgtgattaaatttatataaatttaaattaatatttgtttaatttttttatttaaaattagatggtttaatgttgaggtttagtaattttttaagtaagagttaagagttttatttattgaatttgatttaagattttttgggataggaaaaaagggttttatttaaaatataataaagtgtagaaattttttttgatgatttttttattttattattttaataatttttttaaatttttttgtttttatattattatatatttttagataaagtatattaatgatttaaattttatttttgagttgttgaaaaaaaagaaatgagatttaagtataggtttatttaattttgtggtaatggatgatgattgtaagttatagtggtggtggatgttgtgagtaagtttattataaatttatgttttatttaagtttttttttattttgtagtggagtgaagttttttgggttagatttttttaattataatggttgatatttttaaagttgagttatattttattgttttttgtatttattttatgagggtttttgaattaaggttgggttgtaaggtgttttgatttttttggtaattgtattattttttggttgtgtttagtatataatgtggagaagtgaagtaattgtttagataataatatagtttggaaagtaggaggataataaatatagtgggtttgaaggatttgtttggagttttgggtagatgttttgattttttattaggtatattatttatagtttttttagttttgttagtttgtgtgtgttaaataaataaaatagaattgtgtgttatgaggttatgtgattttttattatttatatttgttgagtatgtgttttgtatttaggatagtgtgttgttttggttttttgttgagaaatgtttttagttggtggtaatttattgttagatttagtaaaatgtttagagggatttaatatttgtgtgatagagaatgaagaaagatggagagggatagaatttagatttggaaagagtagttaaaatggttaataaaataataaagtaaattataaggttttggatagtatgtgtttagataatatttgttttggtaaagagatttatatgttatgtaaagaatgagaatttttaggatatattttttagtatggtaataggaagaggattagatttggagggtataggttttttttttaaggggttattttggtgtttttgagaatttgttttaattttaggaaatagatttagggattaggatttagaataagaataaagtgggtgtggtttagatgtaatattttattttttattggttagaggaattaagtgtagatttttaatataataaatatatttaggaagaagtgttgtgtaagttttttggtggtttagtggttaggatttggtgtttttattgttgtggtttgggtttgatttttggttagggaagttttgttttttttgatatttgtattttttatgtaatttagaagttaagagttttgtgtagtttttatttgttggttgggttttttttttatagtttttttttttttttatagttttttttttttttttaaattataagttttatgtattttttatttgtttgttggggttttttaattattaaaaattgattgttttaaaagtttatttaatttaaggtttaaaatatgttatttttatttataggtaatgtaatttataattaattaaataatataaagttttgtgattttaaaattgtattttttagtttttaaaaataatttggatgtgtttataagtagttagttaagtttttgtttaattttgattttgtttgattaataaaagaggaagatagttttatgaggaataatatttatttagtattatgtttagagttaatttttagtttttttgtatattaagattatgtattttggagattatttgtttatattggagttatttttatttttatttttataaatatgagattttttttgagatgtatggttggatatagttagtttattgtgttttaataatttatttagttaatgtttttttggttaattttaaattttttttaagagatttatataaatatggtaaatgtgttatatttagagtattaatttttattatataaattatataggttttttaaaaatgtattta

SEQ ID NO: 2778 - DNA, 2241 bp, Artificial Sequence
  chemically treated genomic DNA (Homo sapiens)
ttttaaaggaaatgttagttttgaaatttttttttagagttagagttagatattggtttttagttgtttaaagatatatatatagtaaatagtagtattaatttttatttgttatttaaattttaaagtaattatttttttgttatatttttagagtagatgaagtagagaatgtgaattgggggaagatattttggatgtttattttgtgggtattattagttgttttgaggaagtagtatgagattttgggaagtaattgtagtattaattagattttttagatgtttttgaatatttttatttttgtgttagaaggaaaagagttttttggaatttgattattttttgtagtttttgtagttgttgtgtttgaggagtagaggatggagttgggataaagtttagttgtaggagttataaggaaaatatatttttttttatagggttttgagtaattttgtgaggaaaaaaaggtttttaattttattttatttgaatatttttagggattatataattggataattatggaattggaagattttttagatgtttgattttttagttttgtaggtaagagaattaagatttaaagagggtaaagaattgtttgattgtggagttaagtttgtgtaggggttgatgatttagtttttattgatttttgaataatttttatttagaaaagagttttaattggtaaatataggaatttgggttttttattatgttatgttatgttatgttatgttttgttgtgttatgttatattattatattatgatttatgttattataatgtttgattgttgaaagtaaataaaatattatttttggggttgtttttatagtttagagtttatataataattaatatttgtttttttaataatagagttatttttttttttttttttaaaaaagttttttgtggtattaaatattaagtagagtttaaataagaagtagagtgttatggtttttaaaatgtggttttttttttttgttaatatttgttttagagtgtatatataggtttttgttagagatatttgtttgttgggtttttatgtaaatggtagattgaagggtagtgtgattgttttagtttttaatgttgtattatatattttgagtttttggttttttattagattttaaggaatgattttatgttttgtggtttggggttttatgtatttagttttgtttgttttttttgttttttttttttagttaggttttttattatttagtttgtttttttttgtttattgagagagtgaatgtattttttttttgtttttatttttgtaaaagttattttttaaaatgttttattatgatagattattttatgtttttgtaatgaaatagttgaattttatattttttgttattttgttaatattattagaattatattaatgagaattggtaaaataattttatttgtttaattttagtattagtataaatttagagggttttgtttttttttaataatttgatataatttaattataagttaaattattgattttgtttttatttaaatagttttaattattgttataaatgataatttatttaagattgatagtttaaaggtatagttagttatttttatagaaatttttattttattttaaagttatggtgaattgatatttttttgagaattgtttatgtttttttgtttttaattattataatttttattttagatttagtgagtatatgtgtaggtatgttatatgggaagattttgtgatgttgaggtttggggtatggatgattttatgatttagtaggtagtattttagttttttatttttttgtttttttttttttttagtagtttttggtgtttattgtttttattttttttttatgtgtatattatgtttagtttttatttataagtgagaatatgtggtatttggtgtttttttttagttttaatttgtttaggatgatagtttttagttgtatttatgttgttgtaaaggatatgattttgtttttttttatggttgtatagtattttatggtgatgtattatatgttttttatttaagttattgttgatgggtatttaggttggtatttaggtatgatagattgattttatgtttttgttattgtgaatggtggtgtgatgaatataagtatatgtgtgtttatggtagaatgatttatttttttttgggtttatatttagtaatgggattgtta

SEQ ID NO: 2779 - DNA, 2241 bp, Artificial Sequence
  chemically treated genomic DNA (Homo sapiens)
tagtaattttattattgggtatagatttaaaggaaaataaattattttattataaatatatatgtatttatgtttattatattattatttataatagtaaagatatggaattaatttattatatttaggtattaatttaggtatttattaatagtggtttggataaagaatatgtggtatattattatggaatattatgtagttgtaaaaaagaataaaattatattttttatagtaatatggatgtagttggaggttattattttaagtaaattaagattggaagaaaatattaaatattatatgtttttatttataagtgagaattaaatatggtgtatatatggaaaaaagatgaaagtaatggatattggggattgttggagagggaagagagtaaggaggtggagggttgaggtattgtttattgggttatgggattatttatattttaaattttagtattataaagtttttttatgtgatatatttgtatatgtatttattgaatttaaaatagaagttgtaatgattaaaaataaaaaaatataaatagtttttaaaagagtattaatttattatgattttagggtaaaataaaaatttttataagggtaattggttgtatttttgaattgttaattttaaatgggttgttatttgtagtaatagttggagttatttaaataaaggtaaaattaataatttaatttgtaattaaattgtgttaggttgttaaaaaagagtaaaattttttgaatttatattaatgttgagattaagtaaatgaggttattttattaatttttattaatgtagttttgataatattaataagataataggaaatgtgagatttaattgttttattgtaaagatataaaatagtttattatagtgaagtattttaaaggataatttttgtagaaatagagataagagaaggatatatttatttttttagtgaatgggaaagagtaggttgagtggtgagaagtttgattggagggagagaataggaaaagtaagtagaattaaatatgtaggattttaaattataagatatgaagttattttttgaggtttaatagagaattaaggatttagagtatgtgatatggtattaggaattagaataattatgttattttttaatttgttatttgtgtaagagtttagtaggtgaatgtttttggtaaagatttatgtgtgtattttgggataagtattgataagagaggagaattatattttagggattataatattttgttttttgtttaagttttatttaatgtttaatgttatgaggaatttttttagaaaaggaaaagaaagtagttttgttgttggaaaagtaggtattaattgttgtgtgaattttagattgtgagaatagttttagaaatgatattttatttgtttttaataattgagtattataatagtatgaattataatgtggtaatgtaatataatataataaaatataatatagtataatataatatggtagagaatttaaatttttgtgtttgttaattaagatttttttttaaatgaaaattatttaaaaattaatgaagattaaattattagtttttatgtaaatttggttttatagttgggtaattttttattttttttggattttaatttttttgtttataaaattagagagttagatatttgaggaattttttaattttataattgtttaattgtataatttttagaaatatttaaataaggtaaaattagagatttttttttttttatagaattatttaaagttttatgaaaggaaatgtgttttttttatagtttttgtaattagattttgttttagttttattttttgttttttaggtatagtagttgtaaaagttgtagaaagtggttgggttttaaaaagtttttttttttttagtataggggtgagaatatttaagagtatttggaaagtttggttagtgttgtagttgttttttagggttttatgttgtttttttagagtagttaatgatatttataaaataagtatttaagatgtttttttttagtttatattttttgttttatttgttttaagggtgtgatagagaaatggttgttttaggatttaagtggtaggtgaaaattagtattgttatttgttatgtatatatttttaagtagttaaaaattaatgtttaattttaattttggaagaaagttttaaggttaatattttttttaaga

SEQ ID NO: 2780 - DNA, 2395 bp, Artificial Sequence
  chemically treated genomic DNA (Homo sapiens)
ttatggttttgaggatttttaaagtagggatttttatattgataaaaataattttttagtgtttttgtggaggaggtgaggtaaatgataaattgatatttattttgttttaaattaagtgttaaagtttggttttttaaagagaatggttagtattttgggtgtagttgttaaatttttttaatttatatagatgtaatagaatttgtgaattaatttgtggtatttattaaagttaatttttgttaaaaataaatttttttttttttggtatattgaataagagatagggatgtattaaatatttatgaagatattttaagagagttttaggtaataggaagtgttttgagattgatttgttatgttttgagtgtatagaagatagagggagatatatagggaatgtttttgagattttttttttttaattatttttttttgtgatttttattttataatttatttttaaagaggtattatagttttttgggtgttataataaaatttaaaataaatgtttttatttagataagtattattaaaaggaaaggatattgaatttatttgaatatatttatagaagattgatttttttaagggaatgtatttattttatttttttaattatttttgaagttttgtttattaattgataattttttatagaaaggaagtaaaatagtttggtttttgtgatagtgaagaattataatattagaataaaaataggtttgttattttttttattttttttaatgtttgagttattgggagttagaaatataataattttattttagtaatatagttatttagaatatgttaaattgaaaggtaaatttaaagttaaatttttttattttttgaagattagtatatttatttttaattataagtatttagtatgattagttataaaatattagagaaaatatggttatatttattttatttttttaattgattattatttgattagaaagaagattattttgttttatatgatttatttttagtaaaaaaattgtttatttaagtataggaaagttaatttttgtattaaaagagaattgagaaatttaaatagtttatgatttttattgttttggtttttgttgtaaagtgttattgtgaaaaattggttttgattttagtaattaatgtttttttattgtatagagatggtttggtgttattgtgttattgtggttgttaagggtagggttttttagtaatgtataatggttagaataagttttttttaattttgtattaagggtaggtttttagttttaaattatttttttattttattttagtttttttttgggagttgtggtttttttttgtggttgaatgtggtttagttttttttgaattttgtttttttttaaaaataattatttgttggagagtggtggtggttggataatattgtgaatgtaaaatattattgaattgtgtatttaaatgggaaattttatgttatgtgtattttattatagaaattatttttaatgtgtatttttaggtagttgagaggttgtttttttagaggattttgagttgttttttttagtaggtttattatttttgtatttttgtatgttaataaagattttttttttttttttttgagatggagttttgttttattgtttaggttgaagggtagtggtgtgattttggtttattgtaatttttgttttttaggtttaggtaatttttttgttttagttttttgagtagttgagattataggtatttgttaatatatttagttaatttttgtatttttagtagagatagggttttgatatgttgattaggttggttttaaatttttgattttaggtaatttatttattttagttttttaagtgttgggattataggtatgagttattgtagttggttaataaagattttttgtgttaattatagatatattaaatgaaattgtttttttttgtttttttttttttttattaagggatgaaatataatttttttttttttgaatttatgtagatttatgatatatttgatattaattaaatgtagtagatatgatgttggataatttttgaggtttaatgattataagtaattaatttatttttttttttatttgtttgaatttttatattggatttttgaattgtaattgtagtagtttaattgttttgtagttattatgttgtaagaaagtttagattaaagtatataaggaaattaatggagaaatattaagattatatgaagagttatggagaggtgtagttttttgttttagtttttgttgttgtttgattgtaatttataaaatttatagttagaattatatagttaaatttttttttaattttagattggttgaaattatgaggta

SEQ ID NO: 2781 - DNA, 2395 bp, Artificial Sequence
  chemically treated genomic DNA (Homo sapiens)
tattttatggttttagttagtttggaattggggaaggatttgattatgtagttttagttgtgggttttataagttgtagttagatggtgatggaagttggaatagagggttgtatttttttgtggttttttatgtagttttagtgtttttttattggtttttttgtgtgttttagtttgggtttttttgtagtatggtggttgtagggtagttgaattgttgtaattgtagtttagagatttagtgtgggagtttaagtaagtgagaaagaggatgaattaattgtttgtaattattgagttttagaagttgtttagtattatatttgttatatttgattggtgttaagtgtgttataagtttatatagatttaaggagaggaaaattatattttattttttgatggagaagggaaagggtagaaagggataattttatttggtatatttgtgattagtataggaagtttttgttggttagttgtggtggtttatgtttgtaattttggtatttgggaggttgaggtgggtggattatttgaggttaggagtttgagattagtttggttaatatgttaaaattttgtttttattaaaaatataaaaattagttgggtgtgttggtaagtgtttgtaattttagttatttaggaggttgaggtaggagagttgtttgaatttgggaggtagaggttgtagtgagttgagattgtgttattgttttttagtttgggtaatagagtaagattttattttaaaaaaaaaaagaaaaagtttttgttagtatgtaaagatatagaggtggtggatttgttgaaaaaggtagtttagggttttttgagaagatgattttttggttgtttgggaatatatattagagataatttttgtagtaaaatatatatagtataaaattttttatttaaatgtataatttagtggtattttatatttataatgttgtttaattattattattttttaatagataattatttttgggggaggatagggtttaggaaaagttgaattatgtttaattatagaaagaaattatagtttttgaagagaaattggaataagatggggaaatgatttgggattgggggtttgtttttagtgtagggttggggaggatttgttttggttattatgtattgttaaggaattttgtttttagtagttataatggtataatgatgttaggttatttttgtgtagtgggaaagtattgattgttgggattaggattaattttttatagtgatgttttgtagtagaggttaaagtaatgaagattatgggttgtttaaattttttagtttttttttagtatgaaggttggtttttttatgtttaagtaaatagtttttttgttgagagtaaattatgtgaaataaaatggttttttttttaattaggtgataattagttgaaaaaataaagtgaatatgattatattttttttaatgttttataattaattatattggatgtttgtagttaggaatgagtatattgatttttaaaaaatagagaaatttgattttgaatttattttttgatttaatatattttgaataattgtgttattgggatggggttattatatttttgatttttagtaatttagatattagaagagataaggaaagtgataaatttgtttttattttagtattataattttttgttgttatgaaagttaggttgttttgttttttttttgtaagaaattgttagttgataggtaaaattttaagaataattaaagaaataggataggtatatttttttgggaaaattaattttttgtaaatgtatttaaatgaatttagtattttttttttttaatagtgtttatttaggtgaaaatatttattttagattttgttatggtatttagaaaattatgatgtttttttaaaaataaattatagggtaaaagttatagaggaggatgattgaaaagaaaaagttttaggaatattttttgtgtgtttttttttgttttttgtgtatttaaagtatggtaaattaattttagaatattttttgttatttgagatttttttgaagtgtttttgtaaatgtttaatgtatttttattttttatttagtatgttaggaggagagagatttgtttttggtaggggttggttttggtaaatgttataggttaatttataggttttgttgtatttgtgtaaattgggaagatttgatagttgtgtttaaaatattggttattttttttgggaagttagattttgatatttggtttaaggtaaaatgaatgttaatttgttgtttattttattttttttataaaaatattaaaagattgtttttattaatataaagatttttgttttgagaatttttgaagttatag

SEQ ID NO: 2782 - DNA, 2258 bp, Artificial Sequence
  chemically treated genomic DNA (Homo sapiens)
agttaagattgtgttattgtattttagtttgggtgatataaattttgttttaaaaaaaaaaaaaaaaaaaagaagaaattttgtgtttttttttttgatatagtgtttagggaattagtaagattttattaatataagtattatatttttttatttttttgtaaaattattagtagtaagtgtttttttttaatattaaaatatatttattttggttgtgtatggtggtttatgtttgtaattttagtattttgggaggataaggtaggtggattatttgagtttgagagtttaagattagtttgggtaatatggtgaaattttgtttttataaaaaaaaaaaaatataaaaaattagtagggtgtggtggtgtatatttgtggttttagttatttgggaggttgaggtgggaggattgttggaatttttgaggttgaggttgtattgagttgagattgtgttattgtattttagtttgggtgatagagtgagattttgttttaaataaataaataattgaaagttaattatatttttgtttatggaattttttattttatataagttgagagaagttaaatttgggttattgaaatgttttagaaaattgttaaattgtttatttttttaagtttttagtttgttttagttatatgtgtgtgtgtatatatgtgtgtgtgtatgtgtgtgtgtgtatatatatatatatatatatatatatatatatatatatatgtatgttattgtattttaattttggtaatagagtgagaatttgtttttaaaaaatagtaaaaaataagttaataataaaataagttggttaggtgtagtggtttatgtttgtaattatagtattttgtaaggttgagatatataataatgtttaagagtaaaaattaagtaaatagttataatatgattagttattttatttattttattttgttggattggagtttgttgttatattatataaaatatttgttaggattttgtatttttaatatttatgtatatttatgggaatttattagagggggaagtttggatttaaaatttttttttatgaaatagttaaagattaagaggtgaattgtgtgggatatgaagtatgttatggttgagttgttgatgaggttttggttgtgttttgtattatgtaagggtttagtattttgagaaggtgtttggtaaatgttattggttgattggatggtagtttttggaaggtttgttgattagaaatagagtttttggtagaattttaatggtaaagttataaatagtaatagtttttaaaataataattgtaattttagtaaaatgaaaattttttatgtgggaggtataatgggaaatgtattgattggtatttttttttagatatatgaatagtgattataagtagagatgttttttttttttataaaggaaaaggtgtaaaatattggttttataatgtaggaaaattaataaaatggtggtataaaatattgattattattagtagatttttttagtaagaatggtagtttaagttaatagatatgttttatgaattttgtggttgtaagtggttggaatggaatgaaaattagtttttatgaatttatttttttattttttttattttaatgagtatttattgtatgttaggtattgttttaggtatgtgtaggatattagtgagtttagttaagattaaattttttttgtttagatatagaaaataagggatatatattatataaaaatatataatatgttagaaagtggaaaaagtaagtagaaaaaagaaaaagtatagtagtaagggaaatttaagagtgttaggttgggtgtggtggtttatgtttgtaattttggtattttgggagtttaaggtgggtggattatgaggttaggagattgagattattttggttaatatggtgaaattttgtttttattaaaaatataaaaaattagttgggtgtggtggtgggtgttatatgggaagttgaggtaggagaatggtgtgaatttgggaggtggagtttgtagtgagttaagattgtgttattgtattttagtttgggtgatagagtgagattttgttttaaaaaaaaaaaaaaaaaaagagtgttaaaaaatggtgggtatggagtaggggtattaggtgggtagaggtagttttgttgagatggtgataagtgaatagagttttggagtagaaaattagtggatgatgggggaagagtattttgggtaaagg

SEQ ID NO: 2783 - DNA, 2258 bp, Artificial Sequence
  chemically treated genomic DNA (Homo sapiens)
tttttatttggaatgttttttttttattatttattggttttttgttttaggattttgtttatttattattattttagtagagttgtttttgtttatttaatgtttttgttttatgtttattattttttggtattttttttttttttttttttttgagatggagttttgttttgttatttaggttggagtgtagtggtgtgattttggtttattgtaagttttgttttttgggtttatgttatttttttgttttagttttttgtgtagtgtttattattatgtttggttaattttttgtatttttagtagagatggggttttattgtgttagttaggatggttttgattttttgattttgtgatttgtttattttggatttttaaagtgttgggattataggtgtgagttattgtgtttggtttggtatttttgaattttttttgttgttgtatttttttttttttttatttattttttttattttttaatatattatgtatttttgtatgatgtgtattttttattttttgtatttgagtagagagaatttaattttggttaggtttgttgatattttgtatatatttagaataatgtttagtatgtagtaggtgtttattaaaatgagaagaatgagagaatggatttgtgaaagttgatttttattttattttagttatttgtaattataaaatttatgaaatatatttattggtttgaattgttatttttgttagaagaatttgttgatggtgattaatgttttatattattattttattggtttttttatattgtaaaattaatgttttatatttttttttttgtagaaaaggggagtatttttatttgtgattattatttatgtatttggagaaaaatattaattaatatattttttattatattttttatatagaaggtttttattttgttgaggttgtagttgttattttagggattgttattgtttgtgattttgttattgagattttgttaaaggttttgtttttgattagtaggttttttgagaattgttgtttgattagttagtggtatttattaggtatttttttagggtgttgagtttttatatgatgtaaagtatagttgaggttttgttagtagtttagttatgatatgttttatattttatatgatttattttttgatttttaattgttttatggagggaaattttaaatttaggtttttttttttaatgaatttttataaatgtgtatgggtgttaaaaatataaaattttagtaaatgttttatatgatataatagtagattttaatttagtaaaataaaataaataaaatgattaattatgttataattgtttatttaatttttatttttgggtattattatgtgttttagttttgtaaagtgttgtgattataggtatgagttattgtatttggttaatttattttattattaatttattttttattattttttagagataggtttttattttgttgttaaggttagagtgtagtggtatatatatatatatatatatatatatatatatatatatatatatgtatatatatatatatatatatatatatatgtatatatatatataattaagatagattaaaaatttaaaaaagtaaatagtttaataattttttaaagtattttaataatttaagtttgattttttttagtttatgtgaagtaaaaaattttatagatagaagtataattaatttttaattatttatttatttgagataggattttattttgttatttagattagagtgtagtgatatgattttagtttaatgtagttttgattttaagggttttagtaatttttttattttaattttttaaatagttgggattataggtgtgtgttattatattttgttaattttttgtatttttttttttttgtagagatagggttttattatgttgtttaggttggttttgaatttttaagtttaagtgatttatttgttttgtttttttaaagtgttgggattataggtatgagttattgtgtgtagttagaataaatatattttaatgttaggaaaaagtatttgttgttgatgattttgtagaaaaataagagaatatgatgtttatgttgatggaattttattgattttttaaatattatgttaagagaaagaatatagggtttttttttttttttttttttttttttgagatggagtttgtgttgtttaggttggagtgtagtggtgtgattttggtt

SEQ ID NO: 2784 - DNA, 4090 bp, Artificial Sequence
  chemically treated genomic DNA (Homo sapiens)
ggtttttaataattattgaatgaaatgttttttaatatggtattttttgtattgttatttagttttttttagtgtaggtttgattttgatttttttagatgtgaaatttgttgggataaggattagattttatttatttttttatttttattatttgtttttttgtttaatatttatttaaaggggaaagaaaggaaagatagtgaatttagggtattgataatttagaaagtgtggaggtgggggttagtgagtagagagttatttggattttaagggtgtgggtaattttggagaggaataagttattatatttatttgtttatgaatttatttatatttgtttttttttagaaagggtttgaggtggttgataaaaatatatataatataaggtaaaaaataagttgttgaggaaattaggttgagaggaaaataagagtaggaaaaataagattgagttggtttgttataagtgggttaaaaagttggttaagttttttatagtttatttgaggtggaagttttttttttttttttgttttaggggtggttatatgttttatatggatggggagagatgtatttgagagagagggtggataggattttttttgtatttttttagttgttaggttgttagtttggtgtttgggtttagtagtttttgtggttttggagagtgtgaagtggaggggtgtgtggttttggggggtagtttgagtttagatttgggttttaaggtgttggtggggagtttgtgatttgggatggggtgttggaggttgaggaattgtgtttttatgttatgttgtagaggtttttgtgtttgaaattgaatgttttttagttattattatttatggtttattaagtgtgtgttttgggtttagggtataaagatggagggagtggtgtgatttatttgttttatttttatttattagataaaggggtaggttgttttttttttagttttttttgtgggttttgttgttttttgtttttttttttttgggttgttttttggtgatttttttttttttttaagggtggttttgggattttttaggaattgtgttttatttggatgtggggtggggagttggtgtgtagagggtggtttttgggtttatttttaggttgagttggttttaggtttgtgtttttttttttgaatttgtgtttttggtttttggtgtttttttgtttaggtgtttttgtttttatttggttaagtatgtgttgtttgggttttgagtgttttttgttgtatgggtgggggttgggtttattttttgtttgttttttatttttattggaaatatttttgttatatttttgtaattgtaaggtttagtttgttgttttttattttgtttttgtgttgggtttagggtttttttgtgttttttttattgttggtttgttttttgaggagggggttgggttagggttttggttgattggggaggaagaaggggagtagagaaaaatatgagttatagttgtgtgttattggagtgtattttaattttttgtattataggaggtgtggaaggttgttttggggattgggtgtgggaggtgtgtttgagaaggttttgggttggtttgtagggtgtgttgttttgtttgtgttttttttttttttattgttttttttgttatttttttttttggttttttttttgtttggtgtaataagtttttgttaagttgggtgttgggtgggttaggtgtggtggagatggtttgtgtgtttggtttttgtttttaaagtgtttttaggtgatttttggtttattttttatttttatttatagttttaatggaagggtttaggtttttaagtgggtttgtgtatttttagaatattatttaagttattttaaggtatgaagttttttttgggtgtatttgttaatgagttaattgttggttttgttggaaggttttattttgattatggtttgttggtggttattaataaaatattttggattttataagttttatgtttgaattttataagatttgtattttattaattagttatatgtgggttgatattgaaaggtatatgttgatatttgtttgtttaggggaaatttattatttttttattttagttagggggtggtgtgtaggttgtggaattttttaatgagtgtgtttttttttattttttgggtttgtgtggatttttgtttatttttatatgttttggggggggggttgggtttatatgttttggaagtttttagaggtgattttttttgggatttttgtattagggaggaaggatattgttatttgttattattttttgttagaagtttttttgtgatttttttgtgtgtgtttttttatattttttttgtttgggattgtgaggagtgggtggttgatttgagtttgtagtttaggttttttatatgtttttttttgttgttagtatttatttgtgtggtagtggtggtggtggttggtgggtggttgtttttttaaatttttgggtttatttgtatggttttgttttttgagtgatatggttggtgtgggtgggtttgttttttttgtttttgggttgttttttttaagtttttttgagttggtgttgtgtttttttaattgggattttgagttggggttatttttggtgttggtgtggttttaagaaggtgtgagtttgtggttgttttggtggttttttttttttatatttataatttaattaaattatttatttattgaggttgtgtatgggttgtgtttagttttttgttttttgttattttttgggggagggggaatatttttgtttttttgtttggttgtgatatataaatattttgtgggggtttgggtggtgagtatgtggtggtggtggtttttgagtgtttttgtttttttttggttttagatttgtatttgttattagtggtggttgtggtggagttaggttggtttttagtgtttagtattgttgtttttggtaatttggagtgtgtattgtaggttggtggttgagtttgtggtgagttgtttttggggtttgtggtggtggtggtggaggggggtgtttgtgtttttgtttgtatgttgttttttttgtgagttgtttggggttgtagtgtgtgttgttggttttatttttaggttggggtggtgtgagttggtggtgggggagggttgtgtggtgtgggggtgggtggtggggtttggtggtgtggggaggatgtttgtatttttttttttgtgttgtgggtgttttgtggggggtggggatttgggaaaggtgtgtggtgggggagggggtgtgtagttgtggtgagtgtgagttgtgtatttggtggagtttggaggagtttggtgtattttgtgtggtggttgtttttgttggagttggagtttgagtttgagtttgggtttgggtgaggggtggggagagatatgggttgtggtgtggtaggagagtggggggttgggtgttttttgtagtttagggaagttttggaagtgagggagatggggaggaatttttaaatttggttttatgtttttttggttttttttttgtgttttttttgtagatgaggttggagtgtgggtttgggtttggggttttattttgattttatttttggtttggtttgtgtttttttagttttaggggttgggtttgttttttgtttttataaattggttttgttgttttgttgggttttgttggaattagtttttttgattttttgtttttattttatttttttttggggttttattttgtggggaggggatggagggagggggtttttttttttttttttgtgtttgtgtgtgttaggttttttgttttaaggtgggtttgggtgttttttttggtaggaagtggggttgggtgtatttgtgtggtggtgtatgtggttggggtgtgttgtttttttgtgtttgtaggagtggtttgtgtttttttttttgtgtgttttggttttgggttttgttggttggtttgtaatggttgggtgtagatatttgtagagttatttttgggttgggtttggagtttgatgttttgggggtttag
